United States Patent Application Publication US 2018/0126003 A1 - sequence listing, part 61

SEQ ID NO: 108877 - DNA, 2061 bp, Artificial Sequence
  derived and/or modified sequence
atgcggctgcccgacctgcggccctggaccagcctgctgctggtggacgctgcccttctgtggctgctgcagggacctttaggcaccttactaccccaggggctaccaggtctctggttggaaggcacactccgtctcggcggactctggggattgctgaaattaagagggctgctgggctttgtcggtactctattgctgccgttgtgcctggccaccccgctaaccgtgagtttgagagcgctggtggctggagcatcccgtgcgccacccgctagggtcgctagtgccccatggtcttggctgttggtcgggtatggagctgccgggctgtcctggtcactgtgggccgtgctgtcccctccaggagcacaggagaaggaacaggatcaggtcaacaacaaggttctaatgtggaggctgctgaaactgtcccgtccagatctgccactacttgtggcagcatttttctttctggtgctggccgtgttaggcgaaacactcatccctcactactcgggaagggtaatcgatatcctggggggggacttcgatccccatgcctttgcttctgctatcttcttcatgtgcctgttttctttcgggtcatccctgtcggccggatgtcgcggtggctgcttcacctacacaatgagtcgcatcaatctgcgaatccgtgagcagcttttctctagtttgctgcggcaagacctgggcttcttccaggagaccaagacaggcgaactgaatagcaggctgtcttcagacaccaccttgatgtccaattggctgcctctgaatgctaatgtgctgctgagaagtctagtcaaggtcgtgggtctttacggattcatgctcagtatctcacctcgcctaaccctcctctcgcttctgcacatgccatttacgatcgctgcagagaaagtgtataatacacgccatcaggaggtgttgcgggaaatccaggacgccgtggcaagagcgggccaggtcgtgcgggaggccgttggcggcctgcagaccgttaggtcgtttggcgcagaggaacatgaagtttgtaggtataaggaggccctggaacagtgccggcagctatattggagacgggatctggaacgtgccttgtacttgctggtacgccgggtcttacacctgggggtgcagatgttaatgctctcctgtgggttgcagcaaatgcaagacggcgaacttactcaggggtccctgctgtcgtttatgatctaccaggaaagcgtcggaagctacgtccagacgctcgtgtacatctatggtgatatgctttctaatgtcggagcggcagagaaagtcttcagttatatggaccggcagccaaacctgccatcacctggcacactggctcctacaacccttcagggcgttgtcaagttccaggatgtgtcctttgcctacccgaacagacccgaccgccctgtgctcaagggccttacctttaccttgagacctggcgaggtcacggctctcgtgggacctaacggaagtgggaaaagcacggttgccgccctgctccaaaatctgtatcagcctaccggtggacaggtcctgctggatgagaaaccaatctctcagtatgagcattgttatttgcattcccaggtcgtatccgtgggccaggagccagtcctctttagtggctccgtgcggaacaacatcgcttatggactacaatcatgtgaagatgacaaagtgatggccgccgcacaggccgcccatgccgatgacttcattcaggagatggagcatgggatctacactgacgtgggcgaaaagggcagccagctggccgcaggtcaaaagcagcgcctagcgatagctagggccctggtgcgagatccacgcgtgttgatcctcgatgaggctacgagtgcccttgatgtgcagtgtgaacaagccctccaggattggaattcacgcggagaccgcaccgtcctggtgatcgctcatagactacagacggttcagcgagctcatcagattctggtactgcaggaaggaaagcttcagaaactagctcagctatag

SEQ ID NO: 108878 - DNA, 2061 bp, Artificial Sequence
  derived and/or modified sequence
atgagactgccagatctcaggccgtggacaagtctgttgctggtggatgccgctctgctgtggctcctccagggcccactgggaaccctcttaccacagggtttgcctggcctgtggcttgagggaaccctcaggctcgggggactctggggcctgcttaagctcaggggcttactgggtttcgtgggcacactgcttctgcccctctgtctggccacaccactaactgtcagcctaagagccctggttgctggcgcatcccgagcaccgccagctcgagtagcttctgccccatggtcctggttattggtggggtacggggctgccggactctcatggtccctgtgggctgtactttctcctccgggagcccaggagaaggagcaagaccaggtgaacaataaggtgctgatgtggcgcttactcaagcttagtcggccagaccttccccttttagttgcagcattctttttcctggtgcttgcagtattaggcgagacattgatacctcattacagtgggagagtgatcgatatactcggcggtgacttcgatcctcacgcattcgctagcgccatcttctttatgtgcctgttctcattcggctctagcttgtccgccggatgcaggggaggatgttttacttataccatgagtagaatcaacctccgtattagggaacagctgttctctagcctccttagacaggacctggggttctttcaggagaccaaaacaggcgagttaaacagccgcctttcgtccgacactactctgatgagcaattggctgcccctaaacgcaaatgttttattgaggagcctagtcaaggtggtgggcctctatgggtttatgctttctatttcgccgagattaacccttctgagcctcctccacatgccctttactatcgccgcagagaaagtctacaacacccgccaccaggaagtgctccgcgaaattcaggacgccgtggccagggctggccaggtcgtacgtgaagccgttggtgggctgcaaaccgttcgatccttcggcgcagaggagcacgaggtatgccgctataaggaggcattggagcagtgtcggcaactgtattggagaagagatctggaacgcgcactatacctcttagtgaggcgggtcctgcacttaggggtgcaaatgctgatgctcagttgtggactccaacagatgcaggatggggagctgacgcaggggtccttgctgtcttttatgatttaccaggaatctgtcggatcttatgttcagacattggtctatatttacggcgatatgttgagcaatgttggtgcagcggagaaggttttcagctatatggaccgccagccaaacttgcccagtccaggtacgttagccccaacaacgttacagggggtcgtcaaatttcaagacgtcagtttcgcttatcctaataggcccgatagacctgtcctcaaagggctgacgtttactttaagacctggcgaggtaacagccctggtcggacctaatggatcaggaaaatcaacggtggcagctctgttacagaacttgtaccaacccacaggcggacaagttctgttggacgagaaacccatctcacagtatgagcactgctacctgcactctcaggttgtgagtgtgggacaagagccagttcttttttcaggctcagtgaggaacaatatcgcctacggtctgcaatcctgcgaagatgacaaggtcatggctgctgctcaagctgcccacgcagacgatttcatccaggagatggaacacgggatttataccgatgtgggcgagaaaggctcacagctggccgctggacagaagcaacgccttgccatcgcaagggctctagtgcgcgacccaagagtgctgattcttgacgaggctacctcagctttggacgtccagtgcgaacaggcgctgcaggactggaatagtcgcggagatcggactgtgttggtgatcgcccacagactgcagaccgtgcagcgggctcatcagattctggtgcttcaagaaggcaaattgcagaaactggcccagctgtag

SEQ ID NO: 108879 - DNA, 2061 bp, Artificial Sequence
  derived and/or modified sequence
atgcgactccctgatttaagaccctggacaagcctcctcttggtagacgcagcactgctgtggcttcttcaagggcctctcggcactctgttgcctcagggactgcctggtctgtggttggagggcactctccggctcggcggactgtggggcctcctaaagctcaggggtctcctaggttttgtgggcacccttcttctccctctgtgcctggctactcccttgacagtgagtcttagggccttggtggccggtgccagtcgggctcctccagcaagagtagccagcgcaccctggagctggctgctggtcgggtacggggcagcgggactaagttggagcctgtgggcagtgcttagtcccccaggagcacaggagaaggagcaagaccaggtgaacaataaagtgctgatgtggcgcctgctcaaactgagtagaccagatttgcccctccttgtggccgcattctttttcctggttttggccgttttgggggagacactcattccacactactcaggtcgcgtcattgacatactgggcggtgatttcgatcctcacgcatttgcttcagctatctttttcatgtgtttattcagctttggctccagcctgtccgccggatgccgtggaggatgcttcacgtacacaatgagtcggattaacttaaggatcagggagcagctttttagctccttactccgtcaagacctcggctttttccaggagaccaaaacgggcgagttaaactcgcggttgtcatctgacaccaccctaatgtctaattggctcccattgaacgctaacgtactcttaagaagtctggttaaggtcgtaggcctgtatggtttcatgctctccatctcccctaggctaacacttcttagcctgctccatatgcccttcaccatagccgctgagaaggtttacaacacccgacaccaagaggtgcttagagaaatccaggacgccgtggctcgcgcaggacaggttgtccgggaggcagtgggcggactgcaaacagtccgatcctttggcgcagaggagcacgaagtgtgcaggtacaaggaagccctcgagcagtgccgccagctatactggcgcagagatctggaacgtgctttgtatttactggtgcggcgagtgctgcacctgggggtgcagatgttgatgctctcctgtggcctgcagcaaatgcaggacggagaactcacccaggggagcctgctgagttttatgatttaccaggagagcgtggggtcttatgtgcagacgttagtctacatctatggggatatgctctccaacgttggagctgccgaaaaagtgttttcctacatggatcgtcagcctaatctgccctccccgggaacactcgccccaactacccttcagggagtagtgaagttccaagacgtttccttcgcctaccctaaccgcccagataggcccgtcctcaaaggcctgacttttaccctccgaccaggcgaggtgaccgctttggtgggtcccaatgggtcaggcaagagtactgtagccgcattactgcagaatctttatcagcccacggggggtcaggttctcttggacgagaagccgatctcacagtacgaacattgttacctgcactcacaggtagtgtcagttggtcaggaacccgtgctgttctctggttccgtgcgcaacaatatagcctacggcctccaatcttgtgaagacgacaaggttatggcggcagcacaggctgcccacgcagacgatttcatccaggaaatggaacatgggatatacaccgatgtgggagaaaaaggaagtcagctcgctgcagggcagaaacagagacttgctatcgcacgggcactcgtgagagatcccagagtactgatccttgatgaagcaacatctgctctcgatgtgcaatgcgaacaagcgttgcaggactggaattctcggggtgacagaaccgtacttgtgattgcacaccgtctgcagacggtccagagagcacaccagattctggtgctgcaggagggaaagcttcagaaactggctcaattgtag

SEQ ID NO: 108880 - DNA, 2061 bp, Artificial Sequence
  derived and/or modified sequence
atgagactcccagacctgcgcccttggacgtccctactactggtggatgctgcattactgtggctgctgcaagggcctctgggcacgctgcttccacaaggattgcccggtctttggctcgagggtacactacgcctgggcggactgtggggtcttctgaagttgaggggtcttctgggattcgtggggactctgctgctcccactgtgcctggctactcctctgactgtgtccttacgggctctagttgcgggtgcttcccgggctccgcctgccagggttgctagcgccccatggagctggcttctggttgggtatggagccgcagggctgagctggagcctctgggccgtgctgtctccccctggcgcacaggagaaagagcaggaccaagtgaataacaaagttctgatgtggaggctcctaaagctgtcacgccctgacctccctctcctggtcgctgcttttttcttcctggtgctagcggtactgggagagacattgattccacactacagtggaagagtgatagatatacttggtggtgactttgacccccacgcattcgcttctgcaatatttttcatgtgtctcttcagtttcgggagcagtttaagtgctgggtgccgcggaggatgtttcacctacaccatgtccagaatcaaccttaggatcagggaacagttgtttagtagtctgttgaggcaggatcttggctttttccaagagactaaaactggcgagcttaacagccggctgtcctcagacactaccctgatgtctaattggctgcctctcaacgccaatgtcttgctgcgtagtctagtgaaggtggttggactgtacggcttcatgctttcgattagccctcggctcacactgctcagtttgctgcatatgccattcaccatcgccgctgaaaaagtttataatacaaggcatcaggaggtgctgagggaaattcaggacgccgtggcgagggcaggacaagtggtaagggaagcagtgggcggactccaaacagtgcggtcattcggagcagaagagcatgaggtttgcagatataaagaagccttggagcagtgcagacaactctactggcgcagggatctggagagagctctatatctgttagtccggcgagtgttacacctgggggttcagatgttaatgttgtcctgtgggctccaacagatgcaagacggggagttaacacagggatcccttttatcttttatgatctatcaggagagtgttggcagctatgtccagaccctcgtttacatctatggcgacatgctgtccaatgtaggcgctgccgaaaaggtgttctcctatatggaccggcagcctaacctgccctcccctgggacactggcacccactacgcttcagggagttgttaaatttcaagatgtttcctttgcctacccgaataggccagataggccagtgctgaaaggcctcacgttcacattgcgacctggggaagtcactgcattagtcggtcccaacggtagcggcaagagcactgtagctgctctgctccaaaacctctaccagcctactggtggacaggtgctgttagacgagaaaccaataagtcagtatgagcattgttacctgcatagccaagtggtcagcgtgggacaagaaccggtgctgttcagtggaagcgtcaggaacaacatcgcctatggccttcaatcttgcgaggacgataaggtcatggcggcagcgcaggcagctcacgccgatgactttatccaagaaatggagcacggcatctacacagatgttggcgagaaaggaagccagctggccgctgggcagaaacagcgcctagctatcgctcgcgcattggtccgggacccccgagtactgattctggatgaagccaccagcgccctggacgttcagtgcgaacaggcattacaggactggaatagcagaggcgatcggacagtcttagtgatcgcccaccgcctgcagaccgtgcagagagctcaccagatcctggtcttgcaggaaggcaagttacaaaaacttgcacaactgtag

SEQ ID NO: 108881 - DNA, 2061 bp, Artificial Sequence
  derived and/or modified sequence
atgcggttgccggatcttcggccatggacctccctattgctggtagacgcagccctcctctggctgcttcagggcccactcgggactctcctgcctcaaggcctgcccggtctatggctggaggggaccctcagactcgggggtctgtggggcctgttgaaacttaggggattgctggggttcgtcggaacactcttgttacctttgtgcctggcgaccccgctgaccgtgtccctacgtgctctcgttgctggagcaagtcgtgccccaccggctcgagtggcatccgcaccctggtcgtggctcctggtagggtacggcgcagccggattgagctggagcctatgggccgtgctcagccccccaggggcacaagagaaggaacaggatcaggttaataacaaggtcctaatgtggcgtctcctgaagcttagtcgacccgatctgcctttgctcgtggccgcttttttttttctggtcctcgcggtcctgggcgagactctgatcccccattatagcggccgagtaatcgacatcctcggtggagactttgatccgcatgcatttgcctcagcaatctttttcatgtgcctatttagcttcggatcatcactgtcagccggttgcagagggggttgttttacctatactatgtcccgcattaatctgaggatccgtgaacagcttttttcgtcactattgagacaggatctggggttctttcaggagactaagacaggcgagctcaactctcgcctgagttctgatactactttgatgtctaattggctcccactgaatgctaacgtgttactgcggagcctagttaaggtagtcgggctgtatggctttatgctctcaatctctcctcggctcacactcttatcgctcctgcatatgcctttcaccattgctgccgagaaagtgtataatactaggcaccaggaagtcctgagagaaatccaggacgccgtagctcgcgctggccaagtggtcagggaggctgtgggcggacttcagaccgtccgcagttttggtgccgaagaacacgaggtgtgccgctataaagaagctctggagcagtgtcgacagctatactggagacgtgatttagagcgtgccctgtacctgctcatcagaagagtgctacacttgggcgtgcagatgctgatgctctcatgtggtttacaacagatgcaggatggggagttaacgcagggtagcctattgtccttcatgatatatcaggaaagcgtcggctcctacgtacagaccctggtgtacatctacggagacatgctgagcaatgtgggggcagcggaaaaagtattcagctacatggaccgacagcctaatcttccttccccaggaacattagccccaacaacattgcagggcgtagtgaaatttcaggacgtgagtttcgcctaccctaatcgacccgatcggcctgtcctgaaggggctgacattcaccctccgaccaggcgaagtaactgcactcgtgggccctaatggttcgggaaagtcaactgtcgccgctctgctgcagaatctgtaccagcccacaggcggacaggtattgctcgacgagaaaccaattagtcagtacgagcactgttacctccacagtcaggttgtgtctgtgggccaagaaccggtgttgtttagtggaagcgtgcggaataatattacatatggactgcagtcatgcgaagacgacaaggtgatggccgctgctcaggcggcacatgctgacgattttattcaggagatggaacatggtatttataccgacgtgggtgaaaagggttcccagctcgccgcaggccagaaacaacgccttgcgattgccagggccctcgtccgggatccccgagtgctcattttagacgaagccacttcagctcttgatgtgcagtgtgaacaggcgttgcaggattggaactctcggggagaccgtaccgtgctggtgatcgcccaccggttgcagaccgttcagcgcgctcaccagatcctggtgctccaggaggggaagttgcaaaaactggctcagctgtag

SEQ ID NO: 108882 - DNA, 2061 bp, Artificial Sequence
  derived and/or modified sequence
atgcggttgcccgatctgcggccttggacctccctgctgctggttgatgcggcactgctttggttactgcagggccctcttggtacacttcttccccagggactacctgggttgtggctcgaagggactctgcgactgggaggcctctgggggcttctgaaactccgtggactgctcggctttgtgggcaccttgctgctccccctctgtctggcaaccccactgactgtttccctgagagctcttgtagctggtgcttcgagagccccacctgctagggtggcatcagcaccatggtcatggctccttgtaggatacggagcggcaggcttgtcctggtctttgtgggccgtgctgtctccgccaggggctcaggaaaaagaacaggaccaggtgaataacaaagttctgatgtggagactgctaaagttatcccgcccagatttgcctctgttagttgccgcttttttttttcttgtccttgccgtgctgggggaaactctcattcctcactattctggacgcgtcatcgatattctggggggagattttgatccacatgccttcgccagtgcgatctttttcatgtgtttgtttagttttggttcgagtctgtccgccggttgccggggtggatgttttacctacaccatgagccggatcaacctgaggatccgcgaacagttgttttcctcattactgaggcaggatctgggcttcttccaggaaacaaagactggtgaactgaactccaggctgagctcagacactacgcttatgtctaactggttgccactgaatgcgaacgtgctcttgcggagtctagtgaaggtggtaggcctgtacgggttcatgctgtcgatcagcccccgactgacactgctgtccctgttacacatgccatttaccattgccgctgagaaggtctataatacaaggcaccaagaagtgctgcgggagatccaggatgccgtggctcgggcaggccaggtagtgcgtgaggcagttggaggtctgcagactgtgaggtcattcggcgcagaggagcatgaggtatgcagatacaaagaagctctggagcagtgtaggcagctatattggagaagggacttagaacgggctttgtatctgctcgtcagacgcgtcctgcacttgggagtgcagatgctgatgctaagttgcggccttcaacagatgcaggacggtgaactgacacagggaagcctgctgagttttatgatttatcaggaatccgttggctcttatgtccagacattagtatatatctatggtgacatgctgagcaatgtgggggctgccgagaaggtcttctcttatatggataggcagcctaatctgccctcccctggaactctggctcccacaacactacagggtgtggtcaagttccaggacgtctcatttgcctatccgaatcgtcccgatcgacccgtattgaagggcctcactttcacacttagaccaggggaagtgacagcattggtgggaccaaacgggagcgggaagtccacggtggcagctctactacaaaacttgtatcagccaaccggcggacaagtgctgctggacgaaaagcccataagccagtacgagcattgctatctgcacagccaggtggtgtctgtgggtcaggagcctgtgctctttagtggatctgtcaggaacaacattgcttacgggttgcagagttgcgaggacgataaggtgatggcagctgcacaagccgctcatgctgacgactttattcaggagatggaacatggcatctatactgacgtgggcgaaaaaggcagccaactggccgcaggtcagaagcagcggctggctatagctcgagcattggtccgagaccctcgtgtccttatccttgacgaggccacctccgccctcgacgtacagtgcgagcaggcccttcaggactggaattcacgcggtgatcgcactgtcttggttattgctcaccgcctgcaaactgtgcagcgtgcacaccagatactggtcctgcaggaaggcaagctgcagaaactcgcgcagctctag

SEQ ID NO: 108883 - DNA, 4332 bp, Artificial Sequence
  derived and/or modified sequence
caggaactggaggctgctcttcatcgggatgacgtggagtttatctccgacctgattgcttgcctcttacaggggtgttatcagcgccgggatatcacgcctcagacattccacagctatctagaggacatcataaattacaggtgggagcttgaggaagggaagccgaacccgttgagggaggcctcctttcaggaccttcccctcagaacccgtgtagagatactgcatcgcctctgcgattaccgtttagatgcggacgatgtgtttgacctgctcaagggtctggacgcagattccttgagagtggagccgctgggcgaggataatagtggtgctctgtattggtatttttacggcactcggatgtataaggaggaccctgtgcagggaaaaagtaatggcgagttgtcattaagccgcgagagtgagggccagaagaatgtctcaagcattcccggcaaaactgggaagcgacgaggaagaccacccaagagaaagaagctgcaggaagagattctgctcagcgagaagcaggaagagaacagccttgcttctgaaccacagacacggcatggatcgcagggtcctggccagggcacctggtggttgctgtgccagaccgaggaagagtggcggcaggtgacagagtcctttcgggaacgcacctcgcttagggaacgccagctttataagttattgtctgaagatttcctgccagagatctgcaatatgattgctcagaaaggcaagcgaccgcagcgcacgaaggccgaacttcacccccgctggatgagtgaccatctgtccattaagcccgtgaaacaggaggagaccccagtgctcacccggattgaaaagcaaaagcgcaaagaggaggaagaagagaggcaaatactgctcgctgttcagaagaaggagcaggaacagatgctgaaagaggaacggaaaagagagctggaggaaaaggtcaaggccgtagaagggatgtgttccgtgcgggttgtgtggaggggggcttgcctgtctacttcccgtcctgtagacagggctaagcgcaggaaactgagagaggagagggcttggcttctggcacagggcaaggagctcccgcctgaactgtcccacctggaccccaactctccgatgcgagaggagaagaagacaaaagacctattcgagctcgacgatgatttcaccgctatgtataaagtgctggatgtcgtcaaagcccataaggactcctggccgttcctcgaacccgtcgacgaatcatacgctcccaattactaccaaataattaaggcgccaatggacatctcttcaatggagaagaaactgaacggcggcctctactgtacaaaggaagaatttgtgaatgatatgaagactatgtttaggaattgccgcaagtacaacggggaaagctctgaatatacaaaaatgtctgataacctggaacgctgtttccatcgtgctatgatgaaacattttccaggcgaggacggcgacacagacgaagagttctggattagggaggatgaaaaacgtgagaaaaggaggagccgcgcaggccgatccgggggctcccatgtgtggacccgctcgcgggaccccgaagggagctcacgtaaacagcagcccatggaaaatggcggcaaatctctgccacccacacgcagggccccctcttccggcgacgaccagtcgagcagttccactcagcctcccagggaggtgggaacatccaatggccggggttttagccatccactgcactgcggggggacaccatctcaagctcctttcctgaaccagatgaggcctgccgtccctggcacattcggccccctacgaggatcagatccggccaccctctacgggtccagtggggtgccagaaccacacccaggtgagcctgtgcagcagcggcagccatttactatgcagcctcctgtcgggatcaattccctgcggggaccccgactgggcacaccagaagagaagcagatgtgcgggggcctcacccacctttcaaatatgggaccacatccggggtccctgcaactggggcagatctctggtcctagtcaggacggctctatgtacgccccagctcagttccagccagggttcataccaccgaggcatggcggagcgccagcccgcccacctgatttcccagagtcgtctgagataccacccagccatatgtaccggtcatataagtatcttaatagagtgcattccgctgtgtggaacggcaatcatggagccactaaccagggccccttaggccccgacgagaaaccccacctgggtccagggcccagtcaccagccccggaccttgggtcatgtcatggacagccgcgttatgcgaccacctgtgcctcccaatcagtggaccgaacagagcgggtttctgccccacggcgttcccagctctggttacatgcgccctccctgcaagtctgccggccacaggctgcaacccccccctgtgccagcacccagttctctgtttggtgcacccgcccaggctttaaggggcgtgcagggcggcgattctatgatggatagccctgagatgatcgccatgcagcagctctcgtctcgcgtgtgcccaccaggcgtcccataccacccccatcaaccagcccatcctaggcttccgggtccgttcccccaggtagcgcatcccatgagcgtcacggtgagcgcccctaagccagcattgggtaaccccggccgcgcccctgaaaactccgaagcacaggagccggaaaacgaccaggcagaaccattgccaggacttgaagagaaacctccgggtgtgggcacatccgagggcgtgtacttaactcagctgccgcaccctactcccccattacagacagactgcactcggcagagctcccctcaagagcgcgagacagtcgggcctgagctgaagtcctctagctcagaaagtgccgataattgcaaggccatgaagggaaagaatccatggccttccgactctagttacccaggcccagctgcacaagggtgtgttagggatctctcaaccgtggcggaccgaggcgccctgagcgaaaatggagtcatcggagaggcttcaccctgtggatccgagggcaagggtttggggtcatccgggtccgagaaactgctctgcccaaggggaaggacacttcaggagaccatgccctgtacaggacaaaatgctgcaacccctccaagtacagatcctggactcaccggaggaactgtaagtcagtttcctcccctgtatatgccaggactggaatacccaaattccgccgctcactatcacatttcacctggccttcagggggttggccctgtcatgggggggaagtcaccagctagtcacccccagcatttcccgccccgtggattccagtccaatcacccgcattctggtggattccccaggtacaggcccccccagggcatgcgatatagttaccacccccctccacagcctagctaccatcactatcagagaaccccatattacgcctgcccccagtctttttccgattggcagcgccccctgcacccccaaggaagtccctcgggcccaccagcctctcagccccctcctccccgatccctattctctgacaaaaacgctatggcatccctacaggggtgcgaaacacttaatgcagcgctgacctctccaacccggatggatgccgtcgctgccaaggtgccgaacgacggccagaacccaggccccgaggaggaaaagctggatgaaagcatggagcgtccggaaagtcctaaggaattcttggatctcgataatcacaacgctgccaccaagagacaaagttctctgtccgcatccgagtatttgtacggaacacctccccccctgtcttcaggcatgggatttggatcatccgcttttcccccccatagcgtcatgttacagacaggcccgccatatacaccacagaggcctgccagccattttcagcctcgagcttatagctcccccgtggcggccctgccacctcatcatcccggcgcgacacagcctaatggtctatcccaagaaggaccaatttaccgctgtcaggaagaaggactcggacatttccaagccgtgatgatggagcaaatcggcacccgtagtgggatccgcggccccttccaggagatgtatagacccagtggaatgcagatgcaccctgtgcagtcccaggcctcgtttccgaaaacacccacggcggcaacgtcacaggaagaggtgccaccccacaaacccccgaccctgcctctggatcagtcatag

SEQ ID NO: 108884 - DNA, 4332 bp, Artificial Sequence
  derived and/or modified sequence
caggagctggaggccgccctgcacagagatgatgtggagttcatcagtgacctgattgcctgcctgctgcagggctgctaccagaggcgggacatcaccccccagaccttccacagctacctggaggacatcatcaactaccgctgggagctggaggagggcaagcccaaccccctgcgggaggccagcttccaggacctgcccctgcggaccagggtggagatcctgcaccggctgtgtgactaccgcctggatgctgatgatgtgtttgacctgctgaagggcctggatgctgacagcctgcgggtggagcccctgggggaggacaacagcggggccctgtactggtacttctacggcaccaggatgtacaaggaggaccctgtgcagggcaagagcaatggagagctgagcctgagccgggagagcgagggccagaagaatgtgagcagcatccctgggaagacaggcaagagaagaggccggccccccaagaggaagaagctgcaggaggagatcctgctgtctgagaagcaggaggagaacagcctggccagcgagccccagaccaggcatggcagccagggccctggccagggcacctggtggctgctgtgccagacagaggaggagtggaggcaggtgacagagagcttccgggagaggaccagcctgcgggagcggcagctgtacaagctgctgtctgaggacttcctgcctgagatctgcaacatgattgcccagaagggcaagaggccccagaggaccaaggccgagctgcacccccgctggatgtctgaccacctgagcatcaagcctgtgaagcaggaggagacccctgtgctgaccagaattgagaagcagaagaggaaggaggaggaggaggagcggcagatcctgctggccgtgcagaagaaggagcaggagcagatgctgaaggaggagaggaagcgggagctggaggagaaggtgaaggctgtggagggcatgtgcagcgtgcgggtggtgtggaggggggcctgcctgagcaccagcaggcctgtggaccgggccaagaggaggaagctgcgggaggagcgggcctggctgctggcccagggcaaggagctgcccccagagctgagccacctggaccccaacagccccatgagggaggagaagaagaccaaggacctgtttgagctggatgatgacttcaccgccatgtacaaggtgctggatgtggtgaaggcccacaaggacagctggcccttcctggagcctgtggatgagagctatgcccccaactactaccagatcatcaaggcccccatggacatcagctccatggagaagaagctgaatggaggcctgtactgcaccaaggaggagtttgtgaatgacatgaagaccatgttcaggaactgcaggaagtacaatggagagagcagcgagtacaccaagatgtctgacaacctggagcgctgcttccaccgggccatgatgaagcacttccctggagaagatggagacacagatgaggagttctggatcagagaagatgagaagcgggagaagaggaggagccgggccggccgcagcggcggcagccacgtgtggaccaggagccgggaccctgagggcagcagcaggaagcagcagcccatggagaatggaggcaagagcctgccccccacccggcgggcccccagcagtggagatgaccagagcagcagcagcacccagcccccccgggaggtgggcaccagcaatggccggggcttcagccaccccctgcactgcggcggcacccccagccaggcccccttcctgaaccagatgaggcctgctgtgcccggcaccttcggccccctgcggggcagtgaccctgccaccctgtatggcagcagcggcgtgcctgagccccaccctggagagcctgtgcagcagaggcagcccttcaccatgcagccccctgtgggcatcaacagcctgcggggcccccggctgggcaccccagaggagaagcagatgtgtggcggcctgacccacctgagcaacatgggcccccaccctggcagcctgcagctgggccagatcagcggccccagccaggacggctccatgtatgccccagcccagttccagcccggcttcatcccccccaggcatggaggagccccagcccggcccccagacttccctgagagcagcgagatcccccccagccacatgtaccgcagctacaagtacctgaacagagtgcacagcgctgtgtggaatggaaatcatggagccaccaaccagggccccctgggcccagatgagaagccccacctgggccctggccccagccaccagcccaggaccctgggccacgtgatggacagccgggtgatgaggcctcctgtgccccccaaccagtggacagagcagagcggcttcctgccccatggagtgcccagcagcggctacatgaggcctccctgcaagtctgctggccaccggctgcagcccccacctgtgcctgcccccagcagcctgtttggagccccagcccaggccctgcggggcgtgcagggcggggacagcatgatggacagccctgagatgattgccatgcagcagctgagcagccgggtgtgccccccaggagtgccctaccacccccaccagcctgcccacccccggctgcccggccccttcccccaggtggcccaccccatgtctgtgacagtgtctgcccccaagccagccctgggcaaccctggccgggccccagaaaattctgaggcccaggagccagaaaatgaccaggccgagcccctgcccggcctggaggagaagcccccaggagtgggcaccagcgagggcgtgtacctgacccagctgccccaccccaccccacccctgcagacagactgcacccggcagagcagcccccaggagcgggagaccgtgggccctgagctgaagagcagcagcagcgagagcgctgacaactgcaaggccatgaagggcaagaacccctggcccagcgacagcagctacccaggccctgctgcccagggctgtgtgcgggacctgagcacagtggccgacagaggagccctgtctgaaaatggagtgattggagaggccagcccctgtggcagcgagggcaagggcctgggcagcagcggcagcgagaagctgctgtgcccccggggccgcaccctgcaggagaccatgccctgcaccggccagaatgctgccaccccacccagcacagatcctggcctgaccggcggcaccgtgtcccagttcccccccctgtacatgcctggcctggagtaccccaacagcgctgcccactaccacatcagccctggcctgcagggcgtgggccctgtgatgggcggcaagagccctgccagccacccccagcacttccccccccggggcttccagagcaaccacccccacagcggcggcttcccccgctacagaccaccccagggcatgagatacagctaccaccccccaccccagcccagctaccaccactaccagaggaccccctactatgcctgcccccagagcttcagtgactggcagaggcccctgcacccccagggcagccccagcggccccccagccagccagcccccaccacccaggagcctcttcagtgacaagaatgccatggccagcctgcagggctgtgagaccctgaatgctgccctgaccagccccaccaggatggatgctgtggccgccaaggtgcccaatgatggccagaaccctggccctgaggaggagaagctggatgagagcatggagaggcctgagagccccaaggagttcctggacctggacaaccacaatgctgccaccaagaggcagagcagcctgagcgccagcgagtacctgtatggcaccccaccacccctgagcagcggcatgggcttcggcagcagcgccttccccccccacagcgtgatgctgcagacaggccccccctacaccccccagaggcctgccagccacttccagccccgggcctacagcagccctgtggccgccctgcccccccaccaccctggggccacccagcccaacggcctgagccaggagggccccatctaccgctgccaggaggagggcctgggccacttccaggccgtgatgatggagcagatcggcaccaggagcggcatccggggccccttccaggagatgtaccggcccagcggcatgcagatgcaccctgtgcagagccaggccagcttccccaagacccccacagctgccaccagccaggaggaggtgcccccccacaagccacccaccctgcccctggaccagagctag

SEQ ID NO: 108885 - DNA, 4332 bp, Artificial Sequence
  derived and/or modified sequence
caggagctggaggccgccctgcaccgggacgacgtggagttcatcagcgacctgattgcatgtctgttgcagggctgctatcagcgacgcgacattacgccccagacctttcactcataccttgaggacataatcaactatcggtgggagctagaagagggaaagcctaacccgctgcgagaagcaagctttcaggatctgccccttaggactagggtggaaatcctgcaccggttgtgcgattacagacttgatgccgacgatgtgttcgacttgcttaagggcttggatgccgatagcttgcgagtggaacccctaggggaagacaactctggcgccctctattggtacttctacggcacacgaatgtataaagaagaccccgtccaaggcaagagcaatggagaacttagccttagccgggaatcggaggggcaaaaaaacgtatcctcaatccccggtaagactggtaagaggcgtggcaggccacccaagcgcaaaaaactgcaggaggaaattctgttgtctgaaaaacaggaggagaactcactggcgtccgagccccagaccagacatggaagtcaaggccctggccagggtacttggtggctcttgtgccagaccgaggaggaatggcggcaggtcaccgagtccttccgagaaagaacatctctaagagagcgacaattatacaagctgctgtctgaagatttcctgcctgagatatgtaacatgatagcccaaaaggggaagaggccgcagcgtaccaaggctgaactacaccctcggtggatgtctgaccacctgagcataaagcctgtgaagcaggaagaaacaccagttcttactcggatcgaaaagcagaaacgtaaggaggaagaggaagagcgtcagatcttgctagcagtccagaagaaagagcaggagcagatgctgaaggaggagcggaaacgcgaactggaagagaaagtaaaggctgtggaagggatgtgctcagtacgtgttgtctggcgcggtgcctgtcttagcacctccagacctgtggacagagcaaaacggagaaagctaagagaggagagggcttggttgcttgctcagggaaaagaacttccacccgagctgtcccacctggaccccaactctccgatgcgggaggaaaaaaaaactaaggacctcttcgagttagacgatgacttcactgccatgtataaggtcctggacgttgtgaaggcacacaaagactcttggcctttcctggaacctgtggatgaaagctatgcccccaactattatcaaataatcaaggctcctatggacatctcgagtatggaaaaaaagctgaatggcgggctatactgtacaaaggaggagtttgtaaacgacatgaaaaccatgttcaggaattgtcgcaagtataatggcgagtcctctgaatacacaaagatgagcgataaccttgagcgctgttttcaccgcgctatgatgaaacactttcccggggaagacggagatactgacgaggaattctggatccgcgaggatgaaaagcgagaaaaaaggagaagtagggccgggcggagtggtggatcccatgtctggacccgaagtcgagatcccgagggcagtagtcggaagcagcaacccatggagaacggtggaaaaagcttgcctccaactagacgcgcgccctccagcggcgacgaccagagcagctcaagcacccaacctcccagagaagtaggcacatctaatggtcggggtttcagtcatcccctccattgcggcggcactcccagccaggccccctttctgaatcaaatgagaccagccgttcctgggaccttcgggcccctgagagggtcagatccagctaccctgtatggcagcagtggggttcccgagccacatcccggtgagcccgtgcaacagcgacagccgttcaccatgcagccccctgtgggaattaattcactgaggggtccgagactagggaccccggaggaaaaacaaatgtgtggtggactgacacacttgtctaacatggggccgcaccccgggtcgctccagctaggccaaataagcggccctagccaggacgggagtatgtacgcgcccgcgcaatttcagcccggcttcatccctcccaggcatggaggagcgccagcaaggcctcccgattttccagagagcagcgagatcccgccttcacacatgtaccgctcgtacaaatacctcaaccgtgtccattctgccgtgtggaacggcaaccacggcgcaaccaatcagggcccgttaggacccgacgagaagccgcacctcggaccaggacccagccatcagccccgcacactcggacacgttatggattcccgtgtcatgagaccgccggtgcctccaaaccagtggacagagcaatcaggatttctcccacatggggtgccaagctccggatacatgaggccaccatgcaaatccgccggccaccgactgcagcctccgcccgttccagccccctcaagcctgtttggggcccccgcccaagccctgagaggggtgcaaggcggcgatagcatgatggacagcccagaaatgattgctatgcaacagctcagcagcagggtttgccccccgggcgtcccgtatcacccacaccagcctgcccaccctcgcctgcctggtccatttcctcaggtggcgcaccccatgtctgttacagtatcggccccaaaacccgctttgggcaacccagggcgggcacctgagaacagcgaggcccaggagcctgagaatgaccaggctgaaccactgcccggcctggaagagaagccaccaggtgttggtaccagtgaaggtgtttacttaactcagctgccccatcctacacctcctctacagacagattgcacacgacagtcctccccccaggagcgggagaccgttggccccgagttgaaatccagttcttcagagagtgctgataactgtaaggcaatgaagggaaagaacccttggccctccgactccagttatcctggtcctgcggcacaagggtgtgtgagggacctgtctactgttgcggacagaggggcgctatccgagaatggggtgataggggaagcctcaccctgtgggtccgagggaaaagggctagggagtagcggctccgaaaagctcctgtgcccaagaggcaggaccctccaggagaccatgccctgtaccgggcagaacgctgcaacccctccatcaacagatccaggtctcacaggagggactgtcagccaatttcctcccctctatatgccgggcctggaataccctaacagcgcagcccattaccatattagtcctggtctccagggcgttggtccagtgatgggtgggaagagccccgcaagccatccccagcactttcctcctcgaggcttccagagcaaccacccccattccggcggatttccccgataccgccctccccagggtatgcgctattcgtaccatcccccaccccagccctcttatcaccattaccagcggacaccctattatgcgtgcccgcagtccttctccgattggcagaggccactgcatccccagggctctccgtcagggcccccagcaagccagcctccacctccacgctcgctcttctcagataaaaatgccatggcctccctccagggctgtgagacactgaacgccgccctcacgagccccacacgaatggacgcagtcgcagcaaaggtgcccaatgatgggcagaatccaggtccagaggaggagaaacttgatgaatcaatggaaaggcctgaatccccaaaagaatttcttgacctggacaatcacaacgcagctacaaagagacaatcatctctgtctgcaagcgagtatctctacggtacacccccgccattgtcatccggtatgggctttggctcgagtgccttcccgccacattccgtgatgttacagactggacccccctacacacctcagcgtcctgcatcacactttcagcctagggcatactcaagcccagtcgccgctctcccacctcaccatcccggagccacacagccgaatggcctatctcaagagggacctatttataggtgccaggaggagggactcgggcactttcaggctgttatgatggaacagatcggaactcgttctggaatcagaggcccttttcaggaaatgtataggcctagtgggatgcagatgcacccagtccagtctcaagcctccttcccaaaaacgccaaccgccgcgaccagtcaggaggaagtgccccctcataaacccccaaccctccctctggatcagtcctag

SEQ ID NO: 108886 - DNA, 4332 bp, Artificial Sequence
  derived and/or modified sequence
caggagctcgaggccgctttgcaccgggatgatgttgaatttatttctgatctaatcgcgtgtctcctgcaggggtgttatcaacgccgtgatatcaccccccagacattccacagttaccttgaggacatcatcaattacagatgggagctcgaggaggggaaacccaaccccctgagagaagcaagcttccaggatctgcctctgagaactagagtggagatcctccatcgtttatgcgattaccgcctggatgccgatgacgtgttcgatctgttgaaaggactggacgccgattccctccgggtggaaccactcggcgaggacaactcgggggctctctactggtatttttatggtactcgtatgtacaaggaagaccctgtgcagggtaagagtaacggggagctgagtctgagcagggaatctgaaggccagaagaatgtcagctctatacccggtaaaaccggcaagagacgcggtcggccacccaaacgcaagaaattgcaggaagaaattttgctatcagaaaagcaggaagaaaacagtctcgccagtgagcctcagaccaggcatgggagccaggggccaggacagggcacatggtggttactctgccaaactgaggaagagtggagacaggtcaccgagtctttcagagagcgaactagcctcagggaacgccagctctataagctgctcagcgaggattttctccctgaaatatgtaacatgatcgcccagaagggaaaaagacctcagcgtactaaggccgaactccaccccagatggatgtcagatcatctctctataaaacctgttaagcaggaggaaacgcccgtcctgaccaggattgagaaacagaagcgcaaagaggaggaagaagagagacagatactgcttgctgtgcagaagaaagagcaggaacagatgcttaaggaagagaggaagagggagctcgaggagaaagtcaaggctgtggaaggcatgtgtagcgttagggttgtatggcgaggggcatgcttgtccacatctagacctgttgacagggcgaagagacgaaaactgagggaggagagagcatggttactcgctcagggcaaggagcttcctccagagctctcacacctggacccaaactctccgatgagagaggaaaaaaaaacgaaagacctctttgagctcgacgatgacttcacagctatgtataaagtgctggatgtagtaaaggcccacaaggactcttggcccttcctcgaacctgtggacgagagctacgcccctaattactaccagataatcaaagctccaatggatatcagttccatggaaaagaagctgaacggcggtctgtactgtaccaaagaagagttcgtcaatgacatgaaaacgatgttccgcaattgcaggaagtacaacggggagtcctctgagtacacaaaaatgtccgataatctcgagcggtgctttcatagggccatgatgaaacacttccctggcgaggacggcgatactgatgaagaattctggattcgcgaggacgaaaagcgggaaaagagacggagtcgggctgggcgatcgggcggtagccatgtctggaccagaagcagagacccagagggatctagtagaaaacagcagcctatggagaacggaggtaaaagtttgcctcccacacgacgagctcctagctctggagatgaccaatcctccagtagcacccagcctccacgcgaagtggggacaagcaatgggagggggttcagccatccactccactgtggcggtaccccatcacaagctccatttcttaaccagatgagacccgctgtccccggtacatttggtcccctcagaggctccgatcccgcaaccttatacggcagctccggggtccccgagccacaccccggagaaccggtgcagcagagacaaccctttaccatgcaacctccagttggcataaactccctcaggggccctcggttagggacccccgaagaaaagcagatgtgtggcggactcactcacctctcaaatatgggacctcaccctggatccctgcagctggggcagatctctggaccctctcaagatgggtccatgtacgcacctgcccagttccaaccaggatttatcccaccgcgtcatggaggcgctcccgctagaccacctgattttcctgagtcaagcgaaatacctccttcgcacatgtatagatcatacaagtatctgaacagggtgcattcggcggtttggaatggcaaccacggcgctaccaatcaggggcctctgggccctgacgaaaagcctcacctcggtccagggcctagccatcagcccaggacactgggacacgtcatggactcacgagtcatgcgaccgccagtgcctccaaaccagtggaccgaacagagcggcttcctgcctcacggggtgcccagcagcgggtacatgagacccccatgtaagtctgctggacatagactccaaccgcctcccgttccagcgccatcaagcttattcggagcacctgcccaggcacttagaggagtgcagggcggagactctatgatggacagccccgagatgatagctatgcagcagctaagcagcagagtgtgtcctccaggggtcccatatcatccacaccagcctgcccacccacgactaccaggccctttcccccaggttgcccaccccatgtctgtgaccgtctccgcacccaaaccagctctcggaaatcccggtcgggcacctgagaactccgaagctcaggaaccagagaacgaccaggccgagcccttgcctggtctcgaggagaagccaccaggcgttggcacctccgaaggggtgtacctgacacagctcccgcatcctacacctccactccagacagattgtacaagacagtccagcccacaggaacgagagaccgtgggacccgagcttaagtcatcctcaagcgagtcagctgacaactgcaaagcgatgaaggggaaaaacccgtggccctcagactcatcatatccaggacctgcggctcagggttgtgttcgcgatctttcaactgtagcagatagaggggcactttcagagaacggggtgattggcgaagcgagcccttgcggctccgagggaaaaggccttgggtctagcggttcagaaaaactgctgtgccccagaggtcgtacactccaagagactatgccttgcaccggtcaaaacgctgctaccccaccatccactgaccccggtctcaccggcggaacggtttcccagtttccgcctctctatatgccgggacttgaatatcctaactccgccgctcactaccacatttcgcccggtctgcagggagttgggcctgttatgggtggtaaatctccagcctcccacccacagcattttccacctaggggatttcagtccaatcatccgcactccggagggttccccagataccgtcctccccaaggcatgagatattcttatcaccctcctcctcagccctcctatcaccactatcagcggacaccatattacgcgtgtccgcagtctttctctgattggcaaaggccactgcacccacagggtagtccatcaggcccaccggcatcccaaccccctcctcctagatctttatttagcgacaaaaacgccatggctagcctgcagggctgcgagacccttaacgccgctttgacgagtccaaccaggatggatgcagttgccgctaaggtgcctaatgacggacagaatccagggccagaagaagagaagctggacgaatctatggagaggcccgagtcgccaaaggagttcttagacttggacaatcataacgcagccaccaaaagacaatcgtcattaagcgctagcgaatatctgtacggaacacctcctccgttatcttcaggtatgggatttggcagttctgcctttccgcctcacagcgtgatgctccagactggacccccttacaccccccaacgacctgcctctcatttccagccaagggcctactctagccccgtggctgcgctcccacctcaccaccccggtgctacccaacccaacgggctgtcccaggaagggccaatctaccggtgccaggaagagggactggggcacttccaagccgttatgatggagcaaattggtactcgctcagggatcagaggaccctttcaagaaatgtaccgcccaagtggcatgcagatgcatcccgttcagtctcaggcttcattccctaagacacccaccgcggctacgagtcaggaggaagtgccacctcataagcccccaacactgcccctggaccagtcgtag

SEQ ID NO: 108887 - DNA, 5637 bp, Artificial Sequence
  derived and/or modified sequence
caggagttagaagccgctcttcacagagatgacgtggagtttatcagtgacctgattgcctgcctgcttcagggctgctatcaacgaagagatatcacgcctcagacattccacagctacctagaggacatcatcaactaccgctgggagctcgaagaagggaagcccaaccctctgagggaagccagtttccaggacctgcctcttcgcacacgggtggagatcctgcaccgactctgtgattaccggctggatgcagacgatgtcttcgatcttctaaagggcctggatgcagacagtctccgtgtggagccattgggtgaagacaattctggggcactatattggtatttctatggaacacgaatgtacaaagaggacccggtgcaaggaaaatccaatggagaactctctttgagcagggaaagtgaaggacaaaaaaatgtctcaagtattcctggaaaaacgggaaaaagaagaggaagacccccaaaacggaagaaactgcaggaggagattctgttgagtgaaaagcaggaagaaaattccttggcatccgagccacagacaagacatgggtcccaagggccaggccaaggtacttggtggctcctgtgccagacagaagaggaatggagacaggtcaccgagagttttcgcgagaggacctcccttcgagaacggcagctctacaagctcctcagtgaggacttcctgcctgagatctgcaacatgatcgcccagaagggaaaacgtccacagcgcacaaaggcagagttgcatcctaggtggatgtctgaccacctgtccatcaaacccgtcaagcaagaggagactcctgtgctgaccagaatagaaaaacaaaagcgcaaagaggaggaagaagagcgtcagattcttctagcagtgcagaagaaggagcaggagcagatgctaaaggaagagaggaaacgcgagttggaggagaaggtcaaggcagtggaaggtatgtgcagtgtccgcgtggtctggagaggtgcatgtctgtcgaccagccgtcctgtagatcgagcgaagaggagaaagctcagggaagaaagggcatggctgctggctcaaggaaaggagctccctccagaactttcccatctggaccccaattcccccatgagagaggaaaaaaagactaaagacctctttgagttggatgatgatttcactgctatgtataaagttctagacgtggtaaaggctcacaaggattcctggcccttcttggaacctgtggatgaatcttatgcccctaactattatcagattattaaggcccccatggatatttccagcatggagaagaaactgaatggaggtttatactgtaccaaggaggaatttgtaaatgacatgaagaccatgttcaggaattgtcgaaagtataatggggaaagtagtgagtataccaagatgtctgataatttagagaggtgtttccatcgggcaatgatgaaacattttcctggagaagatggagacacagatgaagaattttggattcgagaggatgaaaagcgggagaaaagacggagtcgggctgggcgaagtggtgggagccatgtttggacccgctccagggacccagaagggtccagcaggaaacagcagcccatggagaatggaggaaagtcgttgccccccacacgccgagcgccctcttctggggacgatcagagcagcagctccacacagcccccgcgggaggtgggcacttccaatggccgaggtttttctcatcccctgcattgtggtgggacacccagccaggcaccctttttaaaccagatgaggccagcagtaccaggaacatttggccctctgcgaggatcagatcctgccaccttgtatggctcctctggagtcccggagccacaccccggggagcctgtgcagcagcgtcagcctttcaccatgcagcctccagttggaattaacagcctccgaggacccaggctaggcacaccagaggagaagcaaatgtgcggggggctgacacacctttctaacatgggcccacaccctggatccttgcagcttgggcagataagtggcccaagtcaggatggaagcatgtatgctccagctcagttccagccaggattcattcctccccggcatgggggggctccagcccggccaccagactttcctgaaagctcagaaattcctcccagccatatgtatcgatcgtacaagtacctgaatcgagtacactctgccgtctggaatgggaaccatggtgctacgaaccaaggacccttgggcccagatgagaagccccacctggggccaggaccctctcaccagcctcgcactctcggtcacgtgatggattcccgagtcatgagaccacctgtcccccccaaccagtggactgaacaatcaggcttcctacctcatggagttccttcctcagggtacatgcgaccgccctgcaagtctgccggacatcggttacagccacctccagtgccagcacccagttctttgtttggagcacctgcccaggctcttcggggggtgcagggaggggactccatgatggacagcccagagatgattgcgatgcagcagctctcctcccgcgtctgccccccaggtgtgccttaccacccccaccagcctgcacacccccgtttacctggcccttttccgcaggtagctcacccaatgtcagtcactgtgtcagcccccaagcctgccctgggcaaccctgggagggcaccggagaacagtgaagcacaagagcctgagaatgaccaagcagagccgttgcctggccttgaagagaaaccaccaggtgttggtacttcagagggggtctacctcacacaactacctcaccccacacctcccctgcagactgactgcaccaggcagagctcaccacaagaaagggaaacagtgggcccggagctcaaaagcagctcctccgaatctgcggacaactgtaaagcaatgaagggcaagaatccctggccctcggatagcagctaccccggcccagccgcccaagggtgcgtgagagacctctccacggtggcagacaggggcgctctatccgagaacggagtcattggggaagcatctccttgtggatcggaggggaagggccttggtagcagtggttccgaaaagctgctctgccccagaggcagaacgttgcaggaaaccatgccatgcacgggacagaacgcagcgacaccgcccagcacagaccccggtttgacgggaggcactgtgagccagtttcccccgctgtatatgcctggcctagagtacccgaattcagctgcccattaccacatcagtccaggcctgcagggtgtgggccctgtgatgggagggaagtccccagcatcccatccccagcattttcccccaaggggctttcagtctaaccacccacattctggaggctttccccggtatcgccccccacaaggaatgaggtattcctaccacccaccgccacagccttcctaccaccactatcagcgaactccttactatgcctgtccacagagcttttctgactggcagagacctctccatccccagggaagcccaagcggacccccagccagtcagcctcccccaccaaggtccctcttctcagataagaatgccatggccagtctgcaaggctgtgagacactgaatgctgccttaacttctccaacccgtatggatgcagtggctgctaaagtcccaaatgacgggcagaatcctggtccagaggaagagaagctggatgaatctatggagaggccagagagtcccaaagaatttttagacctggacaaccataacgcagctaccaagcggcagagctcgttgtcagccagcgagtatctctatggaactcctccgcctctgagttcaggaatgggatttggttcatctgcatttccaccccacagtgtgatgctgcagacggggcctccctatacccctcagcggccggccagtcactttcagcccagggcttactcttcccctgtggctgccctcccacctcaccacccaggggccacccagcccaacggcctctctcaggagggtcccatctatcgctgccaggaagaaggcctgggtcactttcaagctgtgatgatggaacaaattggcactagaagtggaataagaggacctttccaggaaatgtacagaccatcaggaatgcagatgcacccggtccagtcgcaggcctcgttcccaaagacccccacagcagcaacatcacaggaggaggtgccgcctcataagcctccaacacttcccctggatcagagctagtccaaggaggaaatgagccccaagcaatggaaagctgcacacgaagactggaatgtggagaactggggagtgccctgtcagctctattcccatcacctgctccaccccttcacggcgacccactcgtgccatacttgagctggagccagtcacgggccctaaaaggacactccttagatgactgacacacagattgcaaaggtcctcggccagggatctcttgcacagctgatgtagacagtcaggcaaaactaatgaacgtggagttaatgatgacttttccaaatcctgagacacttttcagggaaaatcactttaaacttgggggagggggtatactcaagaatggagtggtgcttttaaactttgatgagcagctaaactcaggtatatatttggggaagggactactcttagtattaatggttttggagctgggtccagtttacagaattttcatgttgccttttaaaataatttttgttggtggtgaatgtattgtacataaagtgggaagggtgggtggggatgcggaagaaatgggggtcctaactggtgggcacacagcactggagtgatttttatctgtttacaatcatgtcacactgaatacttatgggagccggagatgagggtaggaaaggtttgatcttgtaatgtgtcactgtgtttccttagtggccagccagccttcagaatagctaaaggccttccttccttccagtcagcctgagagagaacacctgtcccctaagcacctggtgtctccattggaggcagactgctctcaggagactactagaagcttcagcccggaagacaggctgctctctcatgctggtggcccaaattgagaaagtggtgtcccttcctgattttgccaccagccctaccgaatagttgtaaaccagtatcaggaattgggatcgctagagtgtttcacgtattagaagatgaatcgtcctcatcacagacctccctgtcaggactgtgatctagaaggcatcacacacagctttctggcacgaatcacattttgtggaagtgactactcaggtttgtatattttagtatcaataaagaattgcacaggtttgaataggaaaaatgtattctatagatttacagtttgaatttaggaatatttcagtatatatagtttttattcgttttaagtgaatcatagtaaaatcagtcatggtgatttaaaatagctatcaagaacaagttcttggaattatctgttgtatctgtgataggaaaccattttacagtattaaattactttattacagttgtagagtt

SEQ ID NO: 108888 - DNA, 4332 bp, Artificial Sequence
  derived and/or modified sequence
caggagctggaggccgccctgcacagagacgacgtggagttcatcagcgacctgatcgcctgcctgctgcagggctgctaccagagaagagacatcaccccccagaccttccacagctacctggaggacatcatcaactacagatgggagctggaggagggcaagcccaaccccctgagagaggccagcttccaggacctgcccctgagaaccagagtggagatcctgcacagactgtgcgactacagactggacgccgacgacgtgttcgacctgctgaagggcctggacgccgacagcctgagagtggagcccctgggcgaggacaacagcggcgccctgtactggtacttctacggcaccagaatgtacaaggaggaccccgtgcagggcaagagcaacggcgagctgagcctgagcagagagagcgagggccagaagaacgtgagcagcatccccggcaagaccggcaagagaagaggcagaccccccaagagaaagaagctgcaggaggagatcctgctgagcgagaagcaggaggagaacagcctggccagcgagccccagaccagacacggcagccagggccccggccagggcacctggtggctgctgtgccagaccgaggaggagtggagacaggtgaccgagagcttcagagagagaaccagcctgagagagagacagctgtacaagctgctgagcgaggacttcctgcccgagatctgcaacatgatcgcccagaagggcaagagaccccagagaaccaaggccgagctgcaccccagatggatgagcgaccacctgagcatcaagcccgtgaagcaggaggagacccccgtgctgaccagaatcgagaagcagaagagaaaggaggaggaggaggagagacagatcctgctggccgtgcagaagaaggagcaggagcagatgctgaaggaggagagaaagagagagctggaggagaaggtgaaggccgtggagggcatgtgcagcgtgagagtggtgtggagaggcgcctgcctgagcaccagcagacccgtggacagagccaagagaagaaagctgagagaggagagagcctggctgctggcccagggcaaggagctgccccccgagctgagccacctggaccccaacagccccatgagagaggagaagaagaccaaggacctgttcgagctggacgacgacttcaccgccatgtacaaggtgctggacgtggtgaaggcccacaaggacagctggcccttcctggagcccgtggacgagagctacgcccccaactactaccagatcatcaaggcccccatggacatcagcagcatggagaagaagctgaacggcggcctgtactgcaccaaggaggagttcgtgaacgacatgaagaccatgttcagaaactgcagaaagtacaacggcgagagcagcgagtacaccaagatgagcgacaacctggagagatgcttccacagagccatgatgaagcacttccccggcgaggacggcgacaccgacgaggagttctggatcagagaggacgagaagagagagaagagaagaagcagagccggcagaagcggcggcagccacgtgtggaccagaagcagagaccccgagggcagcagcagaaagcagcagcccatggagaacggcggcaagagcctgccccccaccagaagagcccccagcagcggcgacgaccagagcagcagcagcacccagccccccagagaggtgggcaccagcaacggcagaggcttcagccaccccctgcactgcggcggcacccccagccaggcccccttcctgaaccagatgagacccgccgtgcccggcaccttcggccccctgagaggcagcgaccccgccaccctgtacggcagcagcggcgtgcccgagccccaccccggcgagcccgtgcagcagagacagcccttcaccatgcagccccccgtgggcatcaacagcctgagaggccccagactgggcacccccgaggagaagcagatgtgcggcggcctgacccacctgagcaacatgggcccccaccccggcagcctgcagctgggccagatcagcggccccagccaggacggcagcatgtacgcccccgcccagttccagcccggcttcatcccccccagacacggcggcgcccccgccagaccccccgacttccccgagagcagcgagatcccccccagccacatgtacagaagctacaagtacctgaacagagtgcacagcgccgtgtggaacggcaaccacggcgccaccaaccagggccccctgggccccgacgagaagccccacctgggccccggccccagccaccagcccagaaccctgggccacgtgatggacagcagagtgatgagaccccccgtgccccccaaccagtggaccgagcagagcggcttcctgccccacggcgtgcccagcagcggctacatgagacccccctgcaagagcgccggccacagactgcagcccccccccgtgcccgcccccagcagcctgttcggcgcccccgcccaggccctgagaggcgtgcagggcggcgacagcatgatggacagccccgagatgatcgccatgcagcagctgagcagcagagtgtgcccccccggcgtgccctaccacccccaccagcccgcccaccccagactgcccggccccttcccccaggtggcccaccccatgagcgtgaccgtgagcgcccccaagcccgccctgggcaaccccggcagagcccccgagaacagcgaggcccaggagcccgagaacgaccaggccgagcccctgcccggcctggaggagaagccccccggcgtgggcaccagcgagggcgtgtacctgacccagctgccccaccccaccccccccctgcagaccgactgcaccagacagagcagcccccaggagagagagaccgtgggccccgagctgaagagcagcagcagcgagagcgccgacaactgcaaggccatgaagggcaagaacccctggcccagcgacagcagctaccccggccccgccgcccagggctgcgtgagagacctgagcaccgtggccgacagaggcgccctgagcgagaacggcgtgatcggcgaggccagcccctgcggcagcgagggcaagggcctgggcagcagcggcagcgagaagctgctgtgccccagaggcagaaccctgcaggagaccatgccctgcaccggccagaacgccgccaccccccccagcaccgaccccggcctgaccggcggcaccgtgagccagttcccccccctgtacatgcccggcctggagtaccccaacagcgccgcccactaccacatcagccccggcctgcagggcgtgggccccgtgatgggcggcaagagccccgccagccacccccagcacttcccccccagaggcttccagagcaaccacccccacagcggcggcttccccagatacagacccccccagggcatgagatacagctaccacccccccccccagcccagctaccaccactaccagagaaccccctactacgcctgcccccagagcttcagcgactggcagagacccctgcacccccagggcagccccagcggcccccccgccagccagccccccccccccagaagcctgttcagcgacaagaacgccatggccagcctgcagggctgcgagaccctgaacgccgccctgaccagccccaccagaatggacgccgtggccgccaaggtgcccaacgacggccagaaccccggccccgaggaggagaagctggacgagagcatggagagacccgagagccccaaggagttcctggacctggacaaccacaacgccgccaccaagagacagagcagcctgagcgccagcgagtacctgtacggcacccccccccccctgagcagcggcatgggcttcggcagcagcgccttccccccccacagcgtgatgctgcagaccggccccccctacaccccccagagacccgccagccacttccagcccagagcctacagcagccccgtggccgccctgcccccccaccaccccggcgccacccagcccaacggcctgagccaggagggccccatctacagatgccaggaggagggcctgggccacttccaggccgtgatgatggagcagatcggcaccagaagcggcatcagaggccccttccaggagatgtacagacccagcggcatgcagatgcaccccgtgcagagccaggccagcttccccaagacccccaccgccgccaccagccaggaggaggtgcccccccacaagccccccaccctgcccctggaccagagctag

SEQ ID NO: 108889 - protein, 568 aa, Artificial Sequence
  derived and/or modified sequence
MRTAGRDPVSAGLQFPKDGSTQRPANRARFVPARTRPSPLHPCCFCFEGGGSMLSPQRVAAAASRGADDAMESSNILLQDHIRDLDVVVVSVAGAFRKGKSFILDFMLRYLYSQKESGHSNWLGDPEEPLTGFSWRGGSDPETTGIQIWSEVFTVEKPGGKKVAVVLMDTQGAFDSQSTVKDCATIFALSTMTSSVQIYNLSQNIQEDDLQQLQLFTEYGRLAMDEIFQKPFQTLMFLVRDWSFPYEYSYGLQGGMAFLDKRLQVKEHQHEEIQNVRNHIHSCFSDVTCFLLPHPGLQVATSPDFDGKLKDIAGEFKEQLQALIPYVLNPSKLMEKEINGSKVTCRGLLEYFKAYIKIYQGEDLPHPKSMLQATAEANNLAAAASAKDIYYNNMEEVCGGEKPYLSPDILEEKHCEFKQLALDHFKKTKKMGGKDFSFRYQQELEEEIKELYENFCKHNGSKNVFSTFRTPAVLFTGIVALYIASGLTGFIGLEVVAQLFNCMVGLLLIALLTWGYIRYSGQYRELGGAIDFGAAYVLEQASSHIGNSTQATVRDAVVGRPSMDKKAQ

SEQ ID NO: 108890 - protein, 971 aa, Artificial Sequence
  derived and/or modified sequence
MNFLRGVMGGQSAGPQHTEAETVRGAAGLGLGKGSGQGRGRSTRRPEECGLKFRHSFRLVKHILYHVTINVSDSEIIGYALDTLYNIISNEEEEEVGGSQEENSTRQSEDLGSQFTEIFIKQQENVTLLLSLLEEFDFHVRWPGVKLLTSLLKQLGPQVQQIILVSPMGVSRLMDLLADSREVIRNDGVLLLQALTRSNGAIQKIVAFENAFERLLDIISEEGNSDGGIVVEDCLILLQNLLKNNNSNQNFFKEGSYIQRMKPWFEVGDENSGWSAQKVTNLHLMLQLVRVLVSPTNPPGATSSCQKAMFQCGLLQQLCTILMATGVPADILTETINTVSEVIRGCQVNQDYFASVNAPSNPPRPAIVVLLMSMVNERQPFVLRCAVLYCFQCFLYKNQKGQGEIVSTLLPSTIDATGNSVSAGQLLCGGLFSTDSLSNWCAAVALAHALQENATQKEQLLRVQLATSIGNPPVSLLQQCTNILSQGDKIDRRGSKIQTRVGLLMLLCTWLSNCPIAVTHFLHNSANVPFLTGQIAENLGEEEQLVQGLCALLLGISIYFNDNSLESYMKEKLKQLIEKRIGKENFIEKLGFISKHELYSRASQKPQPNFPSPEYMIFDHEFTKLVKELEGVITKAIYKSSEEDKKEEEVKKTLEQHDNIVTHYKNMIREQDLQLEELRQQVSTLKCQNEQLQTAVTQQVSQIQQHKDQYNLLKIQLGKDNQHQGSYSEGAQMNGIQPEEIGRLREEIEELKRNQELLQSQLTEKDSMIENMKSSQTSGTNEQSSAIVSARDSEQVAELKQELATLKSQLNSQSVEITKLQTEKQELLQKTEAFAKSVEVQGETETIIATKTTDVEGRLSALLQETKELKNEIKALSEERTAIKEQLDSSNSTIAILQTEKDKLELEITDSKKEQDDLLVLLADQDQKILSLKNKLKDLGHPVEEEDELESGDQEDEDDESEDPGKDLDHI

SEQ ID NO: 108891 - DNA, 2916 bp, Artificial Sequence
  derived and/or modified sequence
atgaacttcctgagaggcgtgatgggcggccagagcgccggcccccagcacaccgaggccgagaccgtgagaggcgccgccggcctgggcctgggcaagggcagcggccagggcagaggcagaagcaccagaagacccgaggagtgcggcctgaagttcagacacagcttcagactggtgaagcacatcctgtaccacgtgaccatcaacgtgagcgacagcgagatcatcggctacgccctggacaccctgtacaacatcatcagcaacgaggaggaggaggaggtgggcggcagccaggaggagaacagcaccagacagagcgaggacctgggcagccagttcaccgagatcttcatcaagcagcaggagaacgtgaccctgctgctgagcctgctggaggagttcgacttccacgtgagatggcccggcgtgaagctgctgaccagcctgctgaagcagctgggcccccaggtgcagcagatcatcctggtgagccccatgggcgtgagcagactgatggacctgctggccgacagcagagaggtgatcagaaacgacggcgtgctgctgctgcaggccctgaccagaagcaacggcgccatccagaagatcgtggccttcgagaacgccttcgagagactgctggacatcatcagcgaggagggcaacagcgacggcggcatcgtggtggaggactgcctgatcctgctgcagaacctgctgaagaacaacaacagcaaccagaacttcttcaaggagggcagctacatccagagaatgaagccctggttcgaggtgggcgacgagaacagcggctggagcgcccagaaggtgaccaacctgcacctgatgctgcagctggtgagagtgctggtgagccccaccaacccccccggcgccaccagcagctgccagaaggccatgttccagtgcggcctgctgcagcagctgtgcaccatcctgatggccaccggcgtgcccgccgacatcctgaccgagaccatcaacaccgtgagcgaggtgatcagaggctgccaggtgaaccaggactacttcgccagcgtgaacgcccccagcaacccccccagacccgccatcgtggtgctgctgatgagcatggtgaacgagagacagcccttcgtgctgagatgcgccgtgctgtactgcttccagtgcttcctgtacaagaaccagaagggccagggcgagatcgtgagcaccctgctgcccagcaccatcgacgccaccggcaacagcgtgagcgccggccagctgctgtgcggcggcctgttcagcaccgacagcctgagcaactggtgcgccgccgtggccctggcccacgccctgcaggagaacgccacccagaaggagcagctgctgagagtgcagctggccaccagcatcggcaacccccccgtgagcctgctgcagcagtgcaccaacatcctgagccagggcgacaagatcgacagaagaggcagcaagatccagaccagagtgggcctgctgatgctgctgtgcacctggctgagcaactgccccatcgccgtgacccacttcctgcacaacagcgccaacgtgcccttcctgaccggccagatcgccgagaacctgggcgaggaggagcagctggtgcagggcctgtgcgccctgctgctgggcatcagcatctacttcaacgacaacagcctggagagctacatgaaggagaagctgaagcagctgatcgagaagagaatcggcaaggagaacttcatcgagaagctgggcttcatcagcaagcacgagctgtacagcagagccagccagaagccccagcccaacttccccagccccgagtacatgatcttcgaccacgagttcaccaagctggtgaaggagctggagggcgtgatcaccaaggccatctacaagagcagcgaggaggacaagaaggaggaggaggtgaagaagaccctggagcagcacgacaacatcgtgacccactacaagaacatgatcagagagcaggacctgcagctggaggagctgagacagcaggtgagcaccctgaagtgccagaacgagcagctgcagaccgccgtgacccagcaggtgagccagatccagcagcacaaggaccagtacaacctgctgaagatccagctgggcaaggacaaccagcaccagggcagctacagcgagggcgcccagatgaacggcatccagcccgaggagatcggcagactgagagaggagatcgaggagctgaagagaaaccaggagctgctgcagagccagctgaccgagaaggacagcatgatcgagaacatgaagagcagccagaccagcggcaccaacgagcagagcagcgccatcgtgagcgccagagacagcgagcaggtggccgagctgaagcaggagctggccaccctgaagagccagctgaacagccagagcgtggagatcaccaagctgcagaccgagaagcaggagctgctgcagaagaccgaggccttcgccaagagcgtggaggtgcagggcgagaccgagaccatcatcgccaccaagaccaccgacgtggagggcagactgagcgccctgctgcaggagaccaaggagctgaagaacgagatcaaggccctgagcgaggagagaaccgccatcaaggagcagctggacagcagcaacagcaccatcgccatcctgcagaccgagaaggacaagctggagctggagatcaccgacagcaagaaggagcaggacgacctgctggtgctgctggccgaccaggaccagaagatcctgagcctgaagaacaagctgaaggacctgggccaccccgtggaggaggaggacgagctggagagcggcgaccaggaggacgaggacgacgagagcgaggaccccggcaaggacctggaccacatctag

SEQ ID NO: 108892 - DNA, 2916 bp, Artificial Sequence
  derived and/or modified sequence
atgaacttcctgcgcggtgtcatgggggggcagtcagcagggccacagcacactgaggcagaaacagttcggggcgctgctggcctgggcttgggtaaaggaagtggacagggccgagggcgaagcacacgcaggcctgaagaatgcggcctcaagtttcgacactctttccgcctcgtcaagcacattctctatcacgtgacaatcaacgtgtccgactcagagatcattggatatgcccttgatacgctgtacaatattatctccaacgaggaggaagaagaggtcggcggttcacaggaggagaactcaactagacagtccgaagatctcggcagccagttcacagaaatatttattaaacagcaggaaaacgttaccctgctcctgtcccttctggaggagttcgacttccacgtgcgatggccaggcgtcaaacttttgacgagtttgttgaaacagctgggtccccaagtgcagcagataatcctggtgagtccaatgggagtgagccgcctgatggatctactggccgattcccgcgaggtcattcgcaatgacggagtgttgctgctgcaggccctcactagatctaacggcgcaatacagaagatcgtggccttcgaaaatgcttttgaaagacttctcgatatcatatcagaagaagggaattccgatgggggtattgtggtggaggattgcctaatcctgctgcagaacctcctcaagaacaataatagtaatcagaatttttttaaggaggggagctatatccaacggatgaaaccatggttcgaggtgggcgatgagaacagtgggtggagcgcccagaaggtgactaacctgcatctgatgttacaactggtaagagtgctggtgagccctactaacccccctggagctacaagctcttgccagaaagcgatgtttcagtgcggccttctccagcaactgtgcactatccttatggctacaggggtcccagccgacatactgacagagaccatcaatacggtgagcgaggtgattcggggttgccaggtgaatcaggattatttcgcttccgtgaacgccccaagcaatccgccacgacctgcaatagtggtcctgctgatgtctatggttaatgaaaggcagccctttgtcctcaggtgcgcagtattatattgttttcagtgcttcctgtacaagaatcagaaaggtcagggggagatcgtgtcaacgctcctgccttcgaccatcgacgccacagggaacagcgtttctgcaggccagctgctttgcggcggcctgttctctacagattccctgtcaaactggtgcgcggcggtcgccctcgcacatgcgctgcaggaaaatgccactcaaaaggagcaacttttgagagtccagctggccacctctattgggaaccccccagtgtccctactccagcagtgcacaaacattctttctcagggggataagatcgaccggcggggatccaaaatccaaaccagagtggggttgcttatgctcctgtgcacctggctatccaattgcccaattgctgtgactcactttttgcataattctgcgaacgtgccattcctgaccgggcagattgccgaaaacttgggcgaggaagagcagctggtccagggtctctgtgcattgttgcttggcatatcaatatactttaatgataattcgctggaatcgtacatgaaggaaaagctgaagcagcttattgagaaacggattggcaaagaaaattttatagagaagttggggtttatctccaagcatgagctttatagcagggccagtcaaaagccccagcctaacttcccttctcccgagtatatgattttcgaccatgaattcaccaagcttgttaaagagcttgaaggcgtgattacgaaagcaatatacaagagctccgaagaggacaagaaagaagaagaggtcaagaaaaccctggaacagcatgacaacatcgtgacccactacaagaacatgatcagggaacaggatctgcagctggaggagctccgccagcaagtgagtactcttaagtgtcagaacgagcaactgcaaacagctgttacccaacaggtgtcgcagatccagcagcataaggatcagtataatttgctgaaaatccagcttggcaaagataaccagcaccaagggagttacagcgagggagcccagatgaacggcattcagcccgaggaaatcggaaggttacgcgaagagatcgaggagctgaaacgaaatcaggagctgcttcagtctcagctgaccgaaaaagatagtatgatcgagaatatgaaatcatcccagacaagcgggaccaacgagcaaagctccgctatcgtgagtgctagggactcagagcaagtagccgaactgaagcaggagctggcaaccctgaagtctcagctcaactcacagtctgtggagatcactaaattgcagactgagaaacaagagctgctccagaaaaccgaggcattcgctaaaagcgtcgaggtccagggcgaaactgagactattattgcaactaaaaccaccgacgtagaaggccggctcagcgcgttgctgcaggagaccaaagagctcaagaacgaaattaaagcgctgagcgaggaaaggaccgctattaaggaacagctggacagttctaattccaccatagctattctgcagacggagaaagacaagttagagctcgagattacggactcaaagaaggagcaggatgatttactagtactcctggccgatcaggaccaaaagattctcagtcttaagaataagcttaaagacttgggccatccagtcgaagaggaagatgagctggagtccggagatcaagaggacgaggatgatgagagtgaggatccaggaaaggatctcgaccacatttag

SEQ ID NO: 108893 - DNA, 2916 bp, Artificial Sequence
  derived and/or modified sequence
atgaacttcctgcggggcgtgatgggcggccagagcgctggcccccagcacacagaggccgagaccgtgagaggagctgctggcctgggcctgggcaaaggaagtggccagggccggggccgcagcacccggcggcctgaggagtgtggcctgaagttccgccacagcttccggctggtgaagcacatcctgtaccacgtgaccatcaacgtgtctgacagcgagatcatcggctacgccctggacaccctgtacaacatcatcagcaatgaggaggaggaggaggtgggcggcagccaggaggagaacagcacccggcagagcgaggacctgggcagccagttcacagagatcttcatcaagcagcaggagaatgtgaccctgctgctgagcctgctggaggagtttgacttccacgtgcgctggccaggagtgaagctgctgaccagcctgctgaagcagctgggcccccaggtgcagcagatcatcctggtgagccccatgggcgtgtcccggctgatggacctgctggccgacagccgggaggtgatcagaaatgatggagtgctgctgctgcaggccctgaccaggagcaatggagccatccagaagatcgtggcctttgaaaatgcctttgagcggctgctggacatcatcagcgaggagggcaacagtgatggcggcatcgtggtggaggactgcctgatcctgctgcagaacctgctgaagaacaacaacagcaaccagaacttcttcaaggagggcagctacatccagaggatgaagccctggtttgaggtgggagatgagaacagcggctggagcgcccagaaggtgaccaacctgcacctgatgctgcagctggtgcgggtgctggtgagccccaccaaccccccaggggccaccagcagctgccagaaggccatgttccagtgtggcctgctgcagcagctgtgcaccatcctgatggccactggagtgcctgctgacatcctgacagagaccatcaacacagtgtctgaggtgatccggggctgccaggtgaaccaggactactttgcctctgtgaatgcccccagcaacccccccaggcctgccatcgtggtgctgctgatgtccatggtgaatgaaaggcagccctttgtgctgcgctgtgctgtgctgtactgcttccagtgcttcctgtacaagaaccagaagggccagggcgagatcgtgtccaccctgctgcccagcaccattgatgccactggaaacagcgtgtctgctggccagctgctgtgtggcggcctcttcagcacagacagcctgagcaactggtgtgccgctgtggccctggcccacgccctgcaggagaatgccacccagaaggagcagctgctgcgggtgcagctggccaccagcatcggcaacccccctgtgtccctgctgcagcagtgcaccaacatcctgagccagggcgacaagattgaccggcggggcagcaagatccagaccagggtgggcctgctgatgctgctgtgcacctggctgagcaactgccccatcgctgtgacccacttcctgcacaacagcgccaacgtgcccttcctgaccggccagattgctgagaacctgggggaggaggagcagctggtgcagggcctgtgtgccctgctgctgggcatcagcatctacttcaatgacaacagcctggagagctacatgaaggagaagctgaagcagctgattgagaagagaattggcaaggagaacttcatcgagaagctgggcttcatcagcaagcatgagctgtacagccgggccagccagaagccccagcccaacttccccagccctgagtacatgatctttgaccacgagttcaccaagctggtgaaggagctggagggcgtcatcaccaaggccatctacaagagcagcgaggaggacaagaaggaggaggaggtgaagaagaccctggagcagcacgacaacatcgtgacccactacaagaacatgatccgggagcaggacctgcagctggaggagctgcggcagcaggtgtccaccctgaagtgccagaatgagcagctgcagacagctgtgacccagcaggtgtcccagatccagcagcacaaggaccagtacaacctgctgaagatccagctgggcaaggacaaccagcaccagggcagctacagcgagggcgcccagatgaatggcatccagcctgaggagatcggccgcctgcgggaggagattgaggagctgaagaggaaccaggagctgctgcagagccagctgacagagaaggacagcatgattgagaacatgaagagcagccagaccagcggcaccaatgagcagagcagcgccatcgtgtctgcccgggacagcgagcaggtggccgagctgaagcaggagctggccaccctgaagagccagctgaacagccagagcgtggagatcaccaagctgcagacagagaagcaggagctgctgcagaagacagaggcctttgccaagtctgtggaggtgcagggcgagacagagaccatcatcgccaccaagaccacagatgtggagggccgcctgagcgccctgctgcaggagaccaaggagctgaagaatgagatcaaggccctgtctgaggagaggacagccatcaaggagcagctggacagcagcaacagcaccatcgccatcctgcagacagagaaggacaagctggagctggagatcacagacagcaagaaggagcaggatgacctgctggtgctgctggccgaccaggaccagaagatcctgagcctgaagaacaagctgaaggacctgggccaccctgtggaggaggaggatgagctggagagcggggaccaggaggatgaagatgatgaaagtgaggaccccgggaaggacctggaccacatctag

SEQ ID NO: 108894 - DNA, 2916 bp, Artificial Sequence
  derived and/or modified sequence
atgaacttcctgcggggcgtgatgggcggccagagcgccggcccccagcataccgaggctgaaaccgtaaggggagccgccggcctcgggttgggcaaggggtccggccagggtaggggaagatctaccaggagaccagaagagtgtggactgaagttccgacacagttttcgtcttgttaaacatattctctatcacgtcacaatcaacgtctcagacagcgaaattattggttatgccttggacacgctctacaatatcatatcaaatgaggaggaggaggaggtggggggctcccaagaagagaacagcaccaggcagagcgaggatttgggtagtcagtttaccgaaatttttatcaaacaacaagaaaatgtgacactgctactctccctgctcgaagagtttgactttcacgttcggtggccgggggtgaagctgctgacttctttacttaagcagctagggcctcaggtgcaacagataattctggtctccccaatgggcgtgtccaggcttatggatcttcttgctgactcccgggaagtgatccgaaacgacggtgtgcttctgctgcaggccctcaccaggtcaaatggcgctatccaaaaaatagtggcctttgagaacgcctttgagcgcttacttgacatcatcagcgaagagggaaattctgatggcgggatagtcgtggaagattgcctcattttgctccagaacctgctcaaaaataacaactcgaaccaaaacttttttaaggagggaagttacattcagaggatgaagccctggttcgaggtcggagatgagaactcagggtggagcgctcaaaaagtaaccaacttgcatttaatgcttcaattagtaagggtgctcgtgtctcctaccaatccgcccggagcaacgtcctcctgtcagaaggctatgttccagtgcggactgttgcagcagctgtgtaccattcttatggcgactggggtgcctgcagacatccttaccgaaacaattaacaccgtgtcagaggtgattcgcggttgccaggttaaccaagattactttgcatctgtgaacgctccgtcgaaccccccgaggccggctatagttgtgctcctgatgagcatggtcaatgagcgacagcctttcgtcctccgttgcgccgttctgtactgcttccaatgtttcctgtacaaaaatcaaaagggacagggcgagattgtttcaacgcttctgccaagcacgattgatgctacaggcaattccgtatctgctggtcaacttctatgtggtggcctttttagtacggatagcctgagtaattggtgtgctgccgtggccttggcccatgctctgcaagagaacgcaactcagaaggaacaactgctcagggtccaactggcgacctccattggcaacccccctgtgtcccttctgcagcagtgcacaaacattttgagccaaggcgacaagatcgacaggcggggcagcaagatccagacacgcgtggggctgctcatgctgctatgtacatggttgtccaactgccctatcgcggttacccatttcctgcataattccgccaatgttccgtttttaacaggacaaatcgcagagaatttaggcgaggaagagcagctggtccagggactgtgcgcccttctgctgggcatttcaatatatttcaatgataatagtctggagtcatatatgaaagaaaagcttaaacagctgatcgagaagcgcatcggcaaagaaaacttcatcgagaagctggggtttatctcaaagcacgaattatacagtcgggcaagccagaaaccccagcctaactttcctagtcccgagtacatgatcttcgaccacgagtttaccaaacttgtgaaagaactcgagggggttattacaaaggccatctataagtctagcgaggaggataaaaaggaggaggaggtcaagaaaactttagaacagcacgataacatcgttacacactataagaacatgattcgggagcaagacctccagctggaggaactccgacagcaggtgtcaaccctgaaatgtcagaatgaacagctacagacagcggtgacacaacaagtgtctcagatccagcagcacaaggatcagtataatttactgaaaattcagcttggcaaggataaccagcaccagggctcatacagcgagggcgcccaaatgaatggcatccaaccagaggagatcggcaggctccgagaagaaatcgaggagcttaaacggaaccaggagttgctgcagtctcagttaacagagaaggattcaatgattgagaacatgaagtcctcacagacttcaggtacaaatgagcagtcttccgctattgtctccgccagagattcggagcaggtcgctgagcttaagcaagaactggcaacactcaagtcgcagttgaactctcagtctgtggaaattactaaattgcagacagagaagcaagagctgctccagaaaacagaggcctttgcgaagagtgtggaggttcagggtgaaaccgagacaatcatcgcaacaaaaactacagacgtggagggtcgcctttcagcgctgttgcaggagactaaggaactgaagaatgagattaaagcactgtccgaagagcgaacagccattaaggagcagctcgatagctctaatagcacgattgcaattctgcagaccgaaaaagacaaactcgagcttgaaatcactgactcaaaaaaggagcaggatgatcttctagtcttgctggctgatcaagatcaaaaaatcctgtcacttaaaaacaagctgaaggacctcggacatccagtggaggaggaggacgagttggagtctggagatcaggaagatgaagacgatgagagtgaagacccggggaaggaccttgaccacatttag

SEQ ID NO: 108895 - DNA, 2916 bp, Artificial Sequence
  derived and/or modified sequence
atgaatttccttagaggagtgatggggggacagtctgcgggaccacagcataccgaagctgaaaccgttcggggagcagccggtctggggttggggaaaggttccggccagggacgaggcagatctactcgccgtcccgaagagtgcggcctcaagtttcgacactcttttaggctggtcaaacacattctttatcacgtgaccatcaatgttagtgactccgagatcatagggtatgcgctggatacactctataacatcatcagcaacgaggaggaagaggaagttgggggttcgcaagaagaaaactccacgagacagagcgaggacttggggtcacagtttacagaaatttttattaagcaacaagagaacgtcaccttactcttgagtctcctcgaagaatttgatttccacgtgcgctggcccggtgttaaactgcttactagtctgctgaaacagcttggaccccaggttcaacaaatcatcctggtcagcccaatgggagtgagcagactgatggatctcctggccgattcaagggaagtgatcaggaacgatggggtgctacttctgcaggcgttgacaagaagtaacggagcgattcagaagattgtggcttttgaaaatgcgtttgagaggctcctggacattatttctgaggagggaaactctgacggtggaatcgtggtggaggactgccttatcctcctgcaaaacctactcaagaataacaattccaatcagaacttcttcaaagaaggatcttatattcagcgcatgaagccatggttcgaggtgggcgatgaaaacagtggatggtcggcccagaaagtcaccaatttgcatttgatgctccagctggtaagggtcctggtatcaccaacgaatccccctggggctacatcatcctgccaaaaagcaatgttccaatgtggcctgctgcaacagctttgcacgattctgatggccaccggtgtaccggctgatatcttgaccgagaccatcaacactgtttccgaggttattcggggatgccaagtaaatcaggattatttcgcctctgtcaatgctccctcaaatccaccccgtcccgcaatcgttgtgctgttaatgtctatggtcaacgagagacagccatttgtgctccgatgtgctgtgctctactgcttccaatgctttctttataaaaaccagaagggacagggcgagatcgtgagtactttactgccttcaactattgacgccaccgggaatagcgtctctgcaggacagctgttgtgtggagggttgttctccaccgactctctctctaattggtgcgctgccgttgcattagctcacgccctccaggaaaacgcaactcagaaggaacagttgctgcgcgtccagctcgctacatctattgggaaccccccagtctctttactccagcaatgtactaatatcctttcacagggagataagattgatcgacgaggaagtaaaatacagactcgcgtaggtttgctgatgctcctgtgcacatggctttcaaactgtcccattgcagtgacacattttctgcacaacagcgccaacgttccgttccttacaggccagattgccgagaacctaggggaagaggaacaactcgtgcagggcctttgcgccctcctcttagggatctcaatctatttcaacgacaatagcctggagtcttatatgaaagagaaactcaagcaactgattgaaaagcggatcggtaaagaaaattttatcgaaaaactaggttttatctctaagcatgaattgtacagtagagcttctcagaagcctcagcccaattttccaagtcccgagtacatgattttcgatcacgagtttacaaagctggtgaaagagctggagggagtcattacaaaagctatttacaagagcagcgaagaagacaaaaaagaagaggaagtgaaaaagaccctcgagcagcacgataatattgtgactcactacaagaacatgattagagagcaggatctccaactggaagaacttcggcaacaggttagtacactcaaatgtcagaacgagcagcttcagaccgctgtgactcagcaggtgagccaaatccagcagcataaggaccagtacaacttacttaagatccagctgggcaaggacaatcaacaccaggggtcgtactccgagggtgcccagatgaatgggatacaacccgaggagatcggcagactaagggaggagattgaagagctgaagcggaaccaagaactactgcagagccagttaactgaaaaggactccatgattgagaatatgaagagctcacaaacgagtggcaccaatgaacaaagcagcgccatcgtttcggcaagggatagtgagcaagttgccgagttgaagcaggaacttgctacgttaaagagtcagttaaattctcaatccgtcgaaataaccaaactgcagacagagaaacaagaattactgcagaagacagaagcattcgcaaagagcgtagaagtgcagggcgagaccgaaaccatcatcgcgactaagactacagacgtggaaggccgtctcagcgcactactgcaggaaacaaaagagctgaaaaacgaaattaaagccttgagtgaggagcgcaccgcaataaaagagcagcttgactcatctaatagtacaatcgctatactgcagacagagaaggacaagctcgagttggagattaccgactccaagaaggagcaagatgacttgctggtgctcctcgcagaccaggaccagaagattctttcgctgaagaataaactcaaggaccttggacaccccgtggaggaagaagatgagctggagtccggcgaccaggaagatgaggatgatgagtctgaggatcctgggaaagacctggaccacatctag

SEQ ID NO: 108896 - DNA, 2916 bp, Artificial Sequence
  derived and/or modified sequence
atgaatttcctccgcggggtaatggggggtcagagtgccggaccccagcacacagaagccgagacggtgagaggagcagcgggtctgggacttgggaaggggtccgggcagggacggggacggagcactcggagacccgaagagtgtggacttaaatttagacatagttttcgtttagtcaagcacattttataccatgttactataaatgtttcagattctgaaataataggttatgctttggacacactatataatataatatctaatgaagaagaagaagaagtaggcggatcacaagaagaaaattccacaagacagagtgaagatttgggaagccaatttacagaaattttcattaagcagcaggaaaatgtcactcttctgttatctttattggaggagtttgatttccatgtccgctggcctggtgtgaagcttcttacttctcttttaaaacaactagggcctcaggtgcaacaaattattttagtcagtcctatgggtgtttcaagattgatggacttactagcggattccagggaagttatacgtaatgatggcgtcttactactgcaggcactaacaagaagcaatggtgcaatccagaaaattgttgcttttgaaaatgctttcgagagactactggacattatttcagaggaggggaacagtgatggaggtatagtagttgaagattgtttgattttgctccaaaacttattaaaaaacaacaactccaatcaaaatttttttaaagaaggctcatatattcaacgtatgaaaccttggtttgaagttggagatgaaaattctggctggtctgcacagaaagtgaccaatctacatctaatgctacagcttgttcgtgtattggtatctcccaccaaccctcctggtgctaccagtagctgccagaaggctatgttccagtgtgggttattgcagcagctttgtactatcctaatggctactggggttcctgctgatatcctgactgagaccataaatactgtatcagaagttattcgaggctgccaagtaaaccaagactactttgcatctgtaaatgcaccttcaaacccaccaagaccggcaattgtagtacttctcatgtccatggttaatgaaaggcagccatttgttttgcgctgtgctgttctctattgtttccagtgtttcttgtataaaaaccaaaaaggacaaggagaaatcgtgtcaacacttttaccttctaccattgatgcaacaggtaattcagtttcagctggccagttattatgtggaggtttgttttctactgattcactttcaaactggtgtgctgctgtggcccttgcccatgcgttgcaagaaaatgccacccagaaagaacagttgctcagggttcaacttgctacaagtattggcaaccctccagtttctttacttcaacagtgcaccaatattctttcacagggtgataagatcgacagacggggaagcaaaatacaaacaagagttggattattaatgttgctttgtacctggctaagcaattgtcccattgcagtaacgcattttcttcacaattcagccaatgttccatttcttacaggacaaattgcagaaaatcttggagaagaagagcagttggtccaaggcttatgtgcccttttgttgggcatttcgatttatttcaatgataactcacttgagagctacatgaaagagaagctaaaacaactgattgagaagaggattggcaaagagaatttcatagagaaactaggatttattagcaaacatgagttgtattccagagcatctcagaaaccccagccaaactttcccagtccagaatacatgatatttgatcatgagtttacgaagctggtaaaagaacttgaaggtgttataactaaggctatttataagtccagtgaagaagataaaaaagaagaagaggtgaaaaaaacattagaacagcatgacaatattgtgactcactacaaaaatatgattcgagagcaggatctccaacttgaggaattaaggcagcaggtttctacattaaaatgtcaaaatgaacagctccagacggcagtcacacagcaagtatcacagatccagcagcacaaagaccagtataatcttcttaaaatacagctaggaaaagacaatcagcatcaaggttcttacagtgagggggctcagatgaatggcattcagccagaagaaattggtagattgcgagaagagatagaagaattaaaacgtaatcaggaacttttacaaagccagctgactgaaaaggactctatgattgaaaatatgaaatcttcccaaacatctggcacaaatgaacagtcttcagcaatagtttcagctagagattctgaacaagttgcagaattaaaacaggaactggcaactttaaagtctcagttaaactcacaatctgtggagatcaccaaactacagacagaaaagcaggaactgttacagaaaacagaagcgtttgcaaaatcagttgaggtacaaggagagaccgagactataatagccaccaaaactactgatgtagaaggaagactgtcagcattattacaagagaccaaagagttaaagaatgaaattaaagctctgtctgaggaaagaactgccattaaagagcagctggattcatctaatagtaccattgccattttacaaactgagaaagacaaactagagttggaaattacagattctaaaaaagaacaagatgatctcttggtgctcttggccgatcaagatcagaaaatactgtcattgaagaataaactcaaggatcttggtcatccagttgaagaagaggatgaacttgaatctggagaccaagaggatgaggatgatgaaagtgaagatcctggcaaggatctagatcatatctag

SEQ ID NO: 108897 - DNA, 2379 bp, Artificial Sequence
  derived and/or modified sequence
atgtggatccaggtgagaaccatggacggcagacagacccacaccgtggacagcctgagcagactgaccaaggtggaggagctgagaagaaagatccaggagctgttccacgtggagcccggcctgcagagactgttctacagaggcaagcagatggaggacggccacaccctgttcgactacgaggtgagactgaacgacaccatccagctgctggtgagacagagcctggtgctgccccacagcaccaaggagagagacagcgagctgagcgacaccgacagcggctgctgcctgggccagagcgagagcgacaagagcagcacccacggcgaggccgccgccgagaccgacagcagacccgccgacgaggacatgtgggacgagaccgagctgggcctgtacaaggtgaacgagtacgtggacgccagagacaccaacatgggcgcctggttcgaggcccaggtggtgagagtgaccagaaaggcccccagcagagacgagccctgcagcagcaccagcagacccgccctggaggaggacgtgatctaccacgtgaagtacgacgactaccccgagaacggcgtggtgcagatgaacagcagagacgtgagagccagagccagaaccatcatcaagtggcaggacctggaggtgggccaggtggtgatgctgaactacaaccccgacaaccccaaggagagaggcttctggtacgacgccgagatcagcagaaagagagagaccagaaccgccagagagctgtacgccaacgtggtgctgggcgacgacagcctgaacgactgcagaatcatcttcgtggacgaggtgttcaagatcgagagacccggcgagggcagccccatggtggacaaccccatgagaagaaagagcggccccagctgcaagcactgcaaggacgacgtgaacagactgtgcagagtgtgcgcctgccacctgtgcggcggcagacaggaccccgacaagcagctgatgtgcgacgagtgcgacatggccttccacatctactgcctggacccccccctgagcagcgtgcccagcgaggacgagtggtactgccccgagtgcagaaacgacgccagcgaggtggtgctggccggcgagagactgagagagagcaagaagaaggccaagatggccagcgccaccagcagcagccagagagactggggcaagggcatggcctgcgtgggcagaaccaaggagtgcaccatcgtgcccagcaaccactacggccccatccccggcatccccgtgggcaccatgtggagattcagagtgcaggtgagcgagagcggcgtgcacagaccccacgtggccggcatccacggcagaagcaacgacggcgcctacagcctggtgctggccggcggctacgaggacgacgtggaccacggcaacttcttcacctacaccggcagcggcggcagagacctgagcggcaacaagagaaccgccgagcagagctgcgaccagaagctgaccaacaccaacagagccctggccctgaactgcttcgcccccatcaacgaccaggagggcgccgaggccaaggactggagaagcggcaagcccgtgagagtggtgagaaacgtgaagggcggcaagaacagcaagtacgcccccgccgagggcaacagatacgacggcatctacaaggtggtgaagtactggcccgagaagggcaagagcggcttcctggtgtggagatacctgctgagaagagacgacgacgagcccggcccctggaccaaggagggcaaggacagaatcaagaagctgggcctgaccatgcagtaccccgagggctacctggaggccctggccaacagagagagagagaaggagaacagcaagagagaggaggaggagcagcaggagggcggcttcgccagccccagaaccggcaagggcaagtggaagagaaagagcgccggcggcggccccagcagagccggccccagaagaaccagcaagaagaccaaggtggagccctacagcctgaccgcccagcagagcagcctgatcagagaggacaagagcaacgccaagctgtggaacgaggtgctggccagcctgaaggacagacccgccagcggcagccccttccagctgttcctgagcaaggtggaggagaccttccagtgcatctgctgccaggagctggtgttcagacccatcaccaccgtgtgccagcacaacgtgtgcaaggactgcctggacagaagcttcagagcccaggtgttcagctgccccgcctgcagatacgacctgggcagaagctacgccatgcaggtgaaccagcccctgcagaccgtgctgaaccagctgttccccggctacggcaacggcagatag

SEQ ID NO: 108898 - DNA, 1224 bp, Artificial Sequence
  derived and/or modified sequence
atggccagcgccaccagcagcagccagagagactggggcaagggcatggcctgcgtgggcagaaccaaggagtgcaccatcgtgcccagcaaccactacggccccatccccggcatccccgtgggcaccatgtggagattcagagtgcaggtgagcgagagcggcgtgcacagaccccacgtggccggcatccacggcagaagcaacgacggcgcctacagcctggtgctggccggcggctacgaggacgacgtggaccacggcaacttcttcacctacaccggcagcggcggcagagacctgagcggcaacaagagaaccgccgagcagagctgcgaccagaagctgaccaacaccaacagagccctggccctgaactgcttcgcccccatcaacgaccaggagggcgccgaggccaaggactggagaagcggcaagcccgtgagagtggtgagaaacgtgaagggcggcaagaacagcaagtacgcccccgccgagggcaacagatacgacggcatctacaaggtggtgaagtactggcccgagaagggcaagagcggcttcctggtgtggagatacctgctgagaagagacgacgacgagcccggcccctggaccaaggagggcaaggacagaatcaagaagctgggcctgaccatgcagtaccccgagggctacctggaggccctggccaacagagagagagagaaggagaacagcaagagagaggaggaggagcagcaggagggcggcttcgccagccccagaaccggcaagggcaagtggaagagaaagagcgccggcggcggccccagcagagccggccccagaagaaccagcaagaagaccaaggtggagccctacagcctgaccgcccagcagagcagcctgatcagagaggacaagagcaacgccaagctgtggaacgaggtgctggccagcctgaaggacagacccgccagcggcagccccttccagctgttcctgagcaaggtggaggagaccttccagtgcatctgctgccaggagctggtgttcagacccatcaccaccgtgtgccagcacaacgtgtgcaaggactgcctggacagaagcttcagagcccaggtgttcagctgccccgcctgcagatacgacctgggcagaagctacgccatgcaggtgaaccagcccctgcagaccgtgctgaaccagctgttccccggctacggcaacggcagatag

SEQ ID NO: 108899 - DNA, 2379 bp, Artificial Sequence
  derived and/or modified sequence
atgtggattcaggttcgaacaatggatggccgacagacacacaccgtggatagcctgtcccgcctaactaaagtggaagagcttagaaggaaaatacaggaactgtttcacgtggaacctggactccagcggttgttctatagaggaaagcaaatggaagacgggcacactcttttcgactacgaggtgcggctgaatgacacaatccagttgctggtgaggcagtctctcgtgctcccccattccaccaaggagcgcgatagcgagctatcagatacggatagcggctgctgtctcgggcagagtgagtctgacaagagtagcacccacggggaggctgctgccgaaacggactctagaccagcagacgaggacatgtgggatgagacagagctgggactatataaggtgaatgagtatgttgacgcacgtgacaccaacatgggcgcttggttcgaagcgcaagtggtgagggttacacggaaggctcccagccgcgacgagccatgcagcagcacctcacgccccgctctggaggaggacgtgatctatcacgtgaaatatgatgattatcccgaaaacggtgtggtccaaatgaactcccgggacgtgcgagcacgcgctagaacgatcatcaagtggcaggacctggaagtgggtcaggtagtgatgctgaattataaccctgacaacccaaaagagcggggcttctggtatgacgctgaaatctcccggaaacgcgagacacgaactgctagggagttgtatgcgaatgtggtcctgggggacgatagtcttaatgattgcagaatcatcttcgtggatgaggtgttcaagatcgaaaggccaggggagggatctcctatggtggataatcccatgagacggaagagtgggccatcttgtaagcactgcaaggacgacgtaaatcgactctgccgcgtgtgcgcatgccacctgtgcggaggacggcaggacccagataagcagttgatgtgcgacgagtgtgacatggctttccacatctactgtctggatccccccctgtcatccgtcccatcggaagatgaatggtactgtcccgagtgtcgcaacgacgcatctgaggtggtgcttgctggcgaaagactgcgggagagtaaaaagaaggccaaaatggcatccgctacaagttcatctcagagggactggggcaaagggatggcctgtgtgggaaggacaaaagagtgtactatagtcccatccaatcattatggacccatccccggcatccccgtgggcaccatgtggagatttagggtgcaggtatccgagtcaggcgtacacagaccccatgtcgccggcatccatggcaggtcaaatgacggagcatactccctggtgctcgccggaggatacgaggacgatgttgatcacgggaacttcttcacatacaccggctccgggggacgtgatctcagcggaaataagaggacagccgaacaatcttgtgaccaaaagctcacaaatactaatagagccctcgccctgaactgctttgccccaattaacgatcaagagggcgctgaagccaaggattggcgatcaggaaagccagttcgcgtagtgcgcaacgttaagggggggaagaactcgaaatacgctcctgctgagggaaacaggtacgatgggatctacaaggtggtgaaatactggcctgaaaaagggaaaagcgggttccttgtgtggcgctacctactgagacgcgatgacgacgaacctggaccatggacgaaggagggcaaggatagaatcaaaaaactaggactgaccatgcagtacccagagggctacttggaagccctggcaaatagggagcgggaaaaagaaaactcaaagcgcgaagaggaagagcaacaggagggcggatttgcaagccctcgcactggcaagggtaaatggaaacgcaagtcagccgggggagggccaagtcgggcgggacctaggaggacctccaaaaaaaccaaggtggaaccatactctctaacagcccagcagagcagtttgatccgggaggataagtccaatgctaaattatggaacgaagtgctcgcgagcctaaaggaccgccccgcctcaggcagtccattccagctcttcctgtcaaaggtggaagagacttttcagtgtatttgttgccaggagctggtgttcagaccaattaccactgtctgtcagcataatgtctgtaaagactgtctggatcgaagttttcgggcgcaggtgtttagttgcccggcttgtcgttacgacctaggccgctcatacgccatgcaagtgaatcagcctcttcagaccgtgctgaaccagcttttcccaggctatggaaatggaagatag

SEQ ID NO: 108900 - DNA, 1224 bp, Artificial Sequence
  derived and/or modified sequence
atggcatctgctacctccagttcccaacgtgattggggaaagggtatggcatgcgtcggtagaactaaagagtgtaccatcgtaccttcaaatcactatggaccaattccaggaatccccgtggggacgatgtggaggtttcgcgtgcaggtgagcgagagcggagtgcacaggccacacgtggctggaatacacggacggtcaaatgacggcgcctactctttagtcctcgcaggcgggtatgaagacgacgttgatcacggtaatttttttacttataccggctcaggtggaagagatttgtctggaaacaagagaaccgcagagcagtcctgcgaccagaaactgacgaataccaaccgggccctcgcgctgaactgctttgcacccataaacgaccaggagggtgctgaagccaaagattggcgcagtggcaaaccagtgcgggtagtacggaacgtgaagggtggcaaaaatagtaagtacgctcccgcagaagggaaccggtacgacgggatctataaagtcgtcaaatactggcccgagaaggggaagagcggcttcctggtgtggcgatatttgttgaggagggatgacgatgagcctggaccctggaccaaagaggggaaagaccgcatcaagaaattaggacttacgatgcagtatcccgagggctatctggaagcacttgccaatagagagcgggagaaggaaaactcaaaaagggaagaggaagaacagcaggaaggcggcttcgcgtcccccaggacgggaaagggtaaatggaaaaggaagtctgccggcggcggccctagtagagccggacctaggaggacttcaaaaaagaccaaagttgagccgtattcattgacagcccagcagtcgagcctcataagagaggacaaaagtaatgctaagctctggaatgaggtccttgcctccctaaaagacagacccgcatcagggtctcctttccagttattcttgtctaaggtagaagagaccttccagtgtatatgttgccaggagctcgtcttcaggcccattaccacggtgtgtcagcataatgtttgcaaagattgcttggatcgttcattccgcgcgcaggttttttcctgtcctgcgtgcagatatgacctaggtagaagctacgcaatgcaggtcaatcagcccctccagactgtgctgaatcagttatttcccggatacggcaacggtcgatag

SEQ ID NO: 108901 - DNA, 2379 bp, Artificial Sequence
  derived and/or modified sequence
atgtggatacaggtgaggaccatggacggacggcagacccacacagtagattccctcagtcggctgactaaggttgaagagctgcgccgcaaaattcaggagcttttccacgtggaaccaggccttcagaggctattctatcgtggcaagcaaatggaagatggtcacactttgttcgattacgaagtccgtttgaatgacacaattcaattgcttgtgcgtcagtccctggttcttcctcactcaaccaaggaaagagacagcgagctgtcagataccgactccggctgctgtctcggccagtctgaaagcgataagtctagcacccacggtgaagccgccgctgagactgattctcgaccagccgacgaggatatgtgggacgagactgagctggggctctacaaagtcaacgagtatgtggacgctcgagatactaacatgggtgcctggtttgaggcccaggttgtgcgagtgacccgtaaggccccatcgagagacgagccttgttcttcgactagccgtcccgctctggaagaagatgtgatctatcacgttaagtatgacgactatccagagaatggggtcgtacaaatgaactccagagacgtaagggcccgagctagaactatcattaagtggcaggacctggaggtgggtcaggtggtgatgctgaactacaacccagacaaccccaaggagcgggggttctggtacgatgctgagatctcaagaaagcgtgaaactaggacagccagagagctttacgctaacgtcgtgcttggggacgattccctgaacgactgcaggataatttttgttgacgaggttttcaagatagagaggcccggagagggaagccctatggtggacaacccgatgaggcggaagtctggccctagttgcaaacactgcaaggacgacgtaaatcggctgtgtagggtttgtgcctgccacttatgtggcggccggcaggacccggacaagcagctgatgtgcgacgagtgtgacatggcctttcacatctattgcctggatccccccctttcctccgtgccttccgaggatgagtggtactgtccagagtgcagaaatgacgcctctgaggtggtattagccggcgagaggctgagagaatcaaagaagaaagccaaaatggctagtgcgacctcctctagtcagcgcgactggggcaaggggatggcctgtgttggacggaccaaggagtgcaccatcgttccctcaaatcattatgggcccatcccagggatacccgtcgggactatgtggcgattccgagtccaggtctcagagtcgggtgtacaccgaccccacgtggctgggatccatggtaggtctaatgatggagcatatagtctcgtacttgcagggggctatgaggacgatgtggaccatggaaatttcttcacctacacaggctccggaggaagagatctgagtggtaataagcggaccgccgagcaaagctgtgatcagaagcttaccaacaccaatcgggccctggctttgaactgtttcgcacctataaatgaccaagaaggggctgaggccaaggattggagatcagggaaacccgtgcgggtggtaagaaatgtgaaagggggaaaaaactcaaaatacgcaccggcagaaggcaaccgttacgatggcatatacaaggtggtgaagtactggcccgaaaaaggcaagtccgggtttttggtgtggcgttacctgcttcgacgagacgacgacgagcctggaccatggaccaaagaagggaaggacagaattaagaagctgggactgaccatgcagtatcctgagggctacctggaagccctagctaacagggaacgtgagaaggaaaattcaaagagggaagaagaagagcagcaggaaggggggtttgcctcaccacgaactgggaaaggaaaatggaagcggaaatcagctggcggaggaccatcccgcgccgggccaagacgcacgtccaaaaagaccaaagtcgaaccatacagccttaccgcacagcagtccagcctgattcgggaagacaaaagcaatgccaagttatggaatgaggttcttgccagtcttaaggatcggccggcttcaggaagtccctttcaactgtttctatctaaagtggaagagacatttcaatgtatatgttgtcaggagctcgtgttcaggcccatcaccacggtctgccagcacaatgtttgcaaggactgtctggataggagtttcagagctcaggtatttagttgtcctgcgtgtagatacgatcttgggaggagctatgctatgcaagttaatcagcctctccagacagtgcttaaccaactctttcctggctacggcaatgggcggtag

SEQ ID NO: 108902 - DNA, 2379 bp, Artificial Sequence
  derived and/or modified sequence
atgtggatccaggtcaggacaatggacgggcggcaaacacatacggtcgattctctgagccggctcaccaaggtggaggagctgaggaggaaaatccaagagcttttccacgtagagccaggactgcagagattgttctatagaggcaaacagatggaggacgggcatacgctattcgactatgaagtgcggctgaatgataccattcaactgctcgtcagacaatcgctggtgctgcctcattccaccaaggaacgggactctgagctgagcgacaccgactcaggatgttgtctgggccagagcgagtcagacaagtcttccactcacggggaagcagcggcggagactgactcccggccagcggacgaagacatgtgggatgaaaccgagctaggcctgtataaggttaacgagtatgtagacgcgcgcgacaccaacatgggagcctggttcgaggcgcaggtggttcgagtcactaggaaggccccatcacgagacgaaccgtgttcctctacaagcaggccggctctggaggaggatgtgatttaccacgtgaagtacgatgactacccagagaacggggtagttcaaatgaacagccgtgatgtaagagcccgcgcccgaaccatcattaaatggcaggatctggaggtggggcaggtagtgatgctaaactacaaccctgataaccctaaggaaagaggcttctggtatgatgcagagattagtaggaagagagaaacaaggacagcccgtgaactgtatgctaatgtggtactgggcgatgatagcctgaatgattgtcgaattatttttgtggacgaggtgtttaagatcgagcgacctggggaaggatccccaatggtcgacaatcccatgagaaggaagtccggaccctcctgtaagcactgcaaagatgacgtgaatcgactgtgccgtgtttgcgcctgccacctgtgtgggggcaggcaagaccccgacaagcagttgatgtgcgacgagtgcgatatggcttttcatatttattgcttggacccacccctttcctcagtacctagtgaagacgagtggtattgtcccgagtgcagaaatgatgcttccgaagtggtgctggctggggagaggctgcgagagtcaaaaaagaaggccaagatggcctcagccacttcatcaagtcagagggactgggggaagggtatggcttgtgtcggacgaacgaaggagtgtacgattgtgccctctaatcactacggcccaatccccggaattcctgtcggcacaatgtggcgctttagggtccaggtgagtgagtcaggagtgcaccgcccccatgtcgctggtattcacgggagatccaacgacggcgcatactccctcgtcctggccggtggatacgaggatgacgtagaccatggaaatttctttacatatacaggctctggagggagggaccttagcggcaataagcgtaccgcagaacagtcctgcgaccaaaagctgactaatacaaatagggctctggccctcaattgctttgcccctatcaacgaccaggagggcgcagaagccaaagactggcgatccggaaagcccgtgcgcgtggtcaggaacgtgaagggggggaagaacagcaaatatgcacctgctgaagggaatcgatacgatggtatctataaagtagtcaagtactggccagagaaaggcaagagtggatttctcgtgtggagatatctactgcggcgggatgatgatgaaccggggccctggacgaaagagggaaaggatagaataaaaaagctcggactaacaatgcagtatccagagggctatctggaggctctagccaacagagaacgagagaaggagaactccaagcgagaggaggaggaacagcaagagggcggctttgcctctcctagaacaggcaagggaaaatggaaaaggaagtcagccgggggtgggccctcgcgcgctggtcctagaaggactagtaagaagactaaagttgaaccgtattccttgaccgcccagcaaagttccctcattagagaagacaaaagtaatgcgaagctgtggaatgaagttttggcctcactgaaggaccgtccagcctccggcagcccattccagttgttcctcagcaaagttgaagaaacatttcagtgcatttgctgccaggagttggtgttccggccgatcaccacagtctgtcagcataacgtctgcaaggattgccttgacaggagttttcgggcccaggttttctcttgccccgcgtgtaggtatgacctaggtcgttcttatgccatgcaggttaaccaaccattgcagaccgtgttaaatcagttattccccggatacggcaacggccgatag

SEQ ID NO: 108903 - DNA, 2379 bp, Artificial Sequence
  derived and/or modified sequence
atgtggatccaggtgaggaccatggatggccggcagacccacacagtggacagcctgagccggctgaccaaggtggaggagctgcggaggaagatccaggagctgttccacgtggagcccggcctgcagaggctcttctaccggggcaagcagatggaggatggccacaccctgtttgattatgaggtgcggctgaatgacaccatccagctgctggtgcggcagagcctggtgctgccccacagcaccaaggagcgggacagcgagctgagtgacacagattctggctgctgcctgggccagagcgagagtgacaagagcagcacccacggggaggccgctgctgagacagacagcaggcctgcagatgaggacatgtgggatgaaacagagctgggcctgtacaaggtgaatgaatatgtggatgcccgggacaccaacatgggcgcctggtttgaggcccaggtggtgcgggtgaccaggaaggcccccagcagagatgagccctgcagcagcaccagcaggcctgccctggaggaggatgtgatctaccacgtgaagtatgatgactacccagaaaatggagtggtgcagatgaacagcagagatgtgcgggcccgggcccggaccatcatcaagtggcaggacctggaggtgggccaggtggtgatgctgaactacaacccagacaaccccaaggagcggggcttctggtatgatgctgagatcagcaggaagcgggagaccaggacagcccgggagctgtatgccaacgtggtgctgggagatgacagcctgaatgactgccgcatcatctttgtggatgaggtgttcaagattgaaagacctggagagggcagccccatggtggacaaccccatgaggaggaagagcggccccagctgcaagcactgcaaggatgatgtgaaccggctgtgccgggtgtgtgcctgccacctgtgtggcggccggcaggaccctgacaagcagctgatgtgtgatgaatgtgacatggccttccacatctactgcctggacccccccctgagctctgtgcccagtgaagatgagtggtactgcccagagtgcagaaatgatgccagcgaggtggtgctggccggggagcggctgcgggagagcaagaagaaggccaagatggccagcgccaccagcagcagccagagggactggggcaagggcatggcctgtgtgggccgcaccaaggaatgtaccatcgtgcccagcaaccactacggccccatccctggcatccctgtgggcaccatgtggaggttccgggtgcaggtgtctgagagcggcgtgcaccggccccacgtggccggcatccacggccgcagcaatgatggagcctacagcctggtgctggccggcggctatgaagatgatgtggaccacggcaacttcttcacctacacaggcagcggcggccgggacctgagcggcaacaagaggacagctgagcagagctgtgaccagaagctgaccaacaccaacagagccctggccctgaactgctttgcccccatcaatgaccaggagggcgctgaggccaaggactggaggtctgggaagcctgtgcgggtggtgagaaatgtgaagggcggcaagaacagcaaatatgccccagctgagggcaacagatatgatggcatctacaaggtggtgaagtactggccagagaagggcaagagcggcttcctggtgtggagatacctgctgcggagagatgatgatgagcccggcccctggaccaaggagggcaaggaccgcatcaagaagctgggcctgaccatgcagtacccagagggctacctggaggccctggccaaccgggagcgggagaaggagaacagcaagcgggaggaggaggagcagcaggagggcggctttgccagccccaggacaggcaagggcaagtggaagaggaagtctgctgggggcggccccagcagagctggccccaggaggaccagcaagaagaccaaggtggagccctacagcctgacagcccagcagagcagcctcatccgggaggacaagagcaatgccaagctgtggaatgaggtgctggccagcctgaaggacaggcctgccagcggcagccccttccagctgttcctgagcaaggtggaggagaccttccagtgcatctgctgccaggagctggtgttccggcccatcaccaccgtgtgccagcacaacgtgtgcaaggactgcctggacaggagcttccgggcccaggtgttcagctgcccagcctgccgctatgacctgggccgctcctatgccatgcaggtgaaccagcccctgcagacagtgctgaaccagctgtttcctggctatggaaatggccgctag

SEQ ID NO: 108904 - DNA, 1224 bp, Artificial Sequence
  derived and/or modified sequence
atggccagcgccaccagcagcagccagagggactggggcaagggcatggcctgtgtgggccgcaccaaggagtgcaccatcgtgcccagcaaccactacggccccatccctggcatccctgtgggcaccatgtggaggttccgggtgcaggtgtctgagagcggcgtgcaccggccccacgtggccggcatccacggccgcagcaatgatggagcctacagcctggtgctggccggcggctatgaagatgatgtggaccacggcaacttcttcacctacacaggcagcggcggccgggacctgagcggcaacaagaggacagctgagcagagctgtgaccagaagctgaccaacaccaacagagccctggccctgaactgctttgcccccatcaatgaccaggagggcgctgaggccaaggactggaggtctgggaagcctgtgcgggtggtgagaaatgtgaagggcggcaagaacagcaaatatgccccagctgagggcaacagatatgatggcatctacaaggtggtgaagtactggccagagaagggcaagagcggcttcctggtgtggagatacctgctgcggagagatgatgatgagcccggcccctggaccaaggagggcaaggaccgcatcaagaagctgggcctgaccatgcagtacccagagggctacctggaggccctggccaaccgggagcgggagaaggagaacagcaagcgggaggaggaggagcagcaggagggcggctttgccagccccaggacaggcaagggcaagtggaagaggaagtctgctgggggcggccccagccgggccggccccaggaggaccagcaagaagaccaaggtggagccctacagcctgacagcccagcagagcagcctcatccgggaggacaagagcaatgccaagctgtggaatgaggtgctggccagcctgaaggacaggcctgccagcggcagccccttccagctgttcctgagcaaggtggaggagaccttccagtgcatctgctgccaggagctggtgttccggcccatcaccaccgtgtgccagcacaacgtgtgcaaggactgcctggaccgctccttccgggcccaggtgttcagctgcccagcctgccgctatgacctgggccgctcctatgccatgcaggtgaaccagcccctgcagacagtgctgaaccagctgtttcctggctatggaaatggaagatag

SEQ ID NO: 108905 - DNA, 2379 bp, Artificial Sequence
  derived and/or modified sequence
atgtggatccaggtgcggaccatggacggccggcagacccacaccgttgactctctgagcaggcttaccaaagtcgaagaactgaggagaaagattcaggaactgttccacgtggaaccagggctgcagaggctgttttacagaggtaagcaaatggaggacggccatacattatttgactatgaggtgcgactgaatgataccattcagcttttggttcggcagagcctcgttcttccccatagcacaaaagaacgggactccgaactctccgataccgacagcgggtgttgtttggggcagagcgagtccgataagtcatcaacacatggagaggcggccgccgagactgactctaggcctgctgatgaggacatgtgggatgagactgagctaggactgtataaggtgaatgaatacgtcgatgcacgggacaccaatatgggggcctggtttgaggcccaggtcgtgagggtcacaaggaaggccccaagccgggacgaaccatgctcttcaacttcccggcccgccttagaagaggacgtgatttatcacgtgaaatatgacgattatccggagaacggggttgtgcaaatgaatagccgggatgtgagggctcgtgcccgaactatcattaaatggcaggacctcgaggtcggccaagtggtaatgctaaactataatcccgataatcccaaagaacgcggcttctggtacgatgctgagattagtcggaagagggaaacccgcacagccagggaactctacgcaaatgtggtgcttggagacgattcccttaacgattgtcgcataatcttcgttgatgaagtgtttaagattgagagaccaggggaggggtcgccaatggtggataaccccatgcgcaggaaatctggacctagttgcaaacactgcaaagacgatgtgaatcggctatgtcgcgtgtgcgcctgtcacctatgtggagggagacaggacccggataaacagctcatgtgtgacgagtgtgacatggcttttcacatctactgtctcgaccccccactcagcagcgtcccctccgaggatgagtggtactgcccagagtgtcgcaacgatgcctctgaggtggtcctggctggcgagcgtctgcgcgaatctaagaagaaggctaagatggcctcagccacttcctctagtcaacgcgattgggggaaaggtatggcttgcgtcggccgaaccaaagagtgcaccatcgttccatcaaaccactacggtccaatccctggaattcctgtgggcaccatgtggcgattccgagtacaggtgtcagaatccggcgtccacaggccccacgtggccggcattcatgggcgaagcaacgacggggcttactctctcgttttagccggcgggtatgaggatgacgtggaccacgggaatttctttacttacacagggtcaggtggaagggatctgtcaggcaacaagagaacggctgagcagtcctgtgatcagaagctgactaatactaacagagccctggccctgaattgctttgctcccatcaacgaccaagagggggccgaggctaaggactggcgctccggtaagccagtgagagtagtcagaaatgtaaaaggcggaaaaaacagcaagtacgcccctgcagaggggaaccgctatgatggcatttataaagtcgtcaagtactggccagaaaaaggtaaaagcggattcctagtgtggcgttatctgcttagacgggatgatgatgaacctggaccctggaccaaggaaggaaaggacagaatcaagaagctggggcttaccatgcagtatcctgagggttacttagaagcactggcgaacagagaaagagaaaaggagaacagcaagcgtgaggaagaggaacagcaggaaggaggtttcgctagccctaggacaggaaaaggcaagtggaagcgaaaatctgcgggcgggggaccttcccgagctggcccgcggcgaacgagcaaaaagacgaaagttgaaccatactcgctcaccgcacagcagagttcactgatacgggaagacaaaagcaacgctaagctctggaatgaggtcctggcctcgcttaaggaccgcccagcttcaggaagcccatttcagctgttcctttccaaagtggaggagactttccagtgcatttgttgtcaggagttggtgtttcggcctatcaccacagtctgtcagcataatgtttgcaaggactgtctagaccgctcgttcagagcgcaggtcttttcctgccccgcttgtcgctacgacttaggtaggtcatacgctatgcaggtgaatcaaccccttcagacggtgttgaatcagctgtttccaggctatgggaatggtcgctag

SEQ ID NO: 108906 - DNA, 1224 bp, Artificial Sequence
  derived and/or modified sequence
atggccagcgccaccagcagcagccagcgggactggggcaagggcatggcttgcgtcggtcggacaaaagagtgcactatcgttccttccaatcattatggccctatccctggaattccagtgggcactatgtggagatttagggtccaggtgagtgaaagcggggtgcacagaccacacgtggctggaatccacggcagaagcaatgacggtgcctattcactggtgctagcgggagggtacgaggacgacgtggatcacgggaatttcttcacatacactggctctggtggtagggatctgagcggcaataagcgcaccgcagaacagtcctgcgatcagaaactcacaaacacgaaccgggccctggcacttaattgctttgcaccaatcaatgatcaggaaggggcggaagctaaggactggaggagcgggaagcctgtccgcgttgtgcgaaacgtgaaaggcgggaaaaattcaaagtacgctccagccgaaggaaaccgatatgacggtatttacaaggtggtgaagtattggcctgaaaagggaaagtccggatttctagtctggcggtaccttctccgccgagacgatgacgaaccgggtccttggaccaaggagggaaaagatcgtattaagaaactggggctgactatgcagtaccccgagggatatctggaagcactggctaaccgagagagagaaaaagagaactctaagcgggaagaagaagaacagcaagagggcggctttgcttccccgaggaccggaaagggcaaatggaagcggaagtcggctggggggggcccgtcacgggcaggtccacgtaggaccagcaagaaaactaaggtggagccatactccctgaccgcccaacagtcctctctcatccgcgaagacaagtccaatgccaaactatggaatgaagtcttagcctcgctcaaggacagacctgcttcaggctctcctttccaactgttcctgagcaaagtcgaggagacctttcaatgcatatgctgccaggagctggtgttcaggcccatcaccaccgtttgtcagcataatgtttgtaaggactgtctggaccggagtttccgggcacaggtgttttcctgcccagcatgcagatacgatctggggcgctcttacgcaatgcaggtgaatcagcctctacagaccgtcttgaaccagctgttccccggatacggcaacgggcgctag

SEQ ID NO: 108907 - DNA, 2379 bp, Artificial Sequence
  derived and/or modified sequence
atgtggatccaggtgcggaccatggacggccggcagacccacaccgtcgacagcctgtcccgacttacaaaagtggaggaactgcgaagaaaaatacaggaactgttccatgtggaacctggtctgcagagattgttctaccgaggcaaacagatggaagatgggcataccctctttgactacgaagtcaggctcaacgacactattcagctgctggtcaggcagtctttggttcttcctcatagcaccaaggagcgagacagcgagctctccgacactgattccgggtgttgtctaggtcagtctgagagcgacaagagctccacgcatggagaagctgccgctgagaccgattctcgccctgccgacgaagatatgtgggacgagacagagttggggctctataaggtcaatgagtacgttgacgctcgcgatacgaacatgggcgcctggttcgaagcccaggtggtccgagtcacacgaaaggccccgagtagggatgaaccatgctcttctacctcacgccccgccctggaagaggacgtcatttaccacgtaaagtacgatgactacccagagaacggagtcgttcaaatgaatagcagggacgttcgtgcaagggcccggaccattatcaagtggcaggatctggaagtggggcaggtggtcatgctgaactacaaccccgataaccccaaagaaagaggattctggtatgacgccgagatttcccggaagagggagaccaggactgctagggagttatacgctaatgtagtgttaggagacgactcattaaacgactgtcgaataatctttgtagatgaggtgttcaagatcgaaagacccggggagggctctcctatggtggacaatcccatgaggagaaaaagtgggcccagctgcaagcattgtaaagatgatgtgaatagactgtgtagagtatgtgcgtgccacctatgcggaggtcgacaggatccggataagcagctgatgtgcgacgagtgcgacatggcgttccacatttactgtctggaccctcctctcagttctgtgcccagcgaggacgagtggtactgcccagagtgtagaaacgatgcgagcgaagtggtgctagctggtgagagacttagagagtctaagaagaaggcaaaaatggcgagcgccacgtcatcgagtcagcgcgattggggaaaagggatggcatgcgtcggcaggacaaaggagtgtacgatcgtgcccagcaaccactatggtccaattccaggcatcccagtgggaacaatgtggaggttcagggtgcaggtgagcgaatcgggagttcatagaccgcacgttgccggcattcacgggagatcaaacgacggcgcgtacagtctggtactggctggtgggtatgaagatgatgtcgatcacggcaacttctttacttacacagggtcaggggggcgagatttatctggaaataagcgtactgccgaacaatcatgcgaccaaaaactcacaaacactaaccgcgccctggcactaaactgttttgcccctataaatgaccaagagggcgctgaagctaaggactggagaagcgggaaaccagtgcgagtggtcaggaatgtgaagggaggtaagaacagtaaatatgcacctgcggagggcaatcgctatgacgggatatacaaggtggttaaatactggccagagaaaggtaaatcaggctttctggtgtggagatacttactccggcgcgacgacgatgagccaggaccctggactaaggagggtaaggatcggatcaaaaaattaggcctcacgatgcagtacccagaggggtacttggaagccctggccaatcgcgagcgggagaaggagaactctaaacgcgaagaggaggaacaacaggaaggtggcttcgccagtcctagaaccgggaaaggaaagtggaaacgaaagtccgccggaggaggaccttccagggcaggtccccgccggacatccaaaaagaccaaagtggagccatactcactgactgcacagcagagtagccttatcagggaagacaagtctaacgccaagctgtggaacgaggtactggcctcccttaaagaccggccagccagtggttcaccatttcagctctttttatccaaagtggaggaaaccttccagtgtatttgttgccaggaactggtgtttcgtcccatcaccaccgtgtgtcagcataacgtgtgcaaggactgcttagacaggtccttcagggctcaagtgttcagttgcccagcttgccggtatgacttggggagaagctacgcaatgcaagtgaaccagccactccagaccgtgcttaaccagctgtttccaggatacgggaatggtagatag

SEQ ID NO: 108908 - DNA, 2379 bp, Artificial Sequence
  derived and/or modified sequence
atgtggatccaggtgcggaccatggacggccggcagacccacaccgtcgacagcttgagccgcctgacaaaggtggaggaacttcggcgcaagatccaggagctgttccatgttgagcctggactgcagcgactgttttacagaggtaagcagatggaagacggacatacattattcgattatgaggttcgcctaaacgatacgattcaactgctcgtgaggcagtctctcgttctgccccactctaccaaagagagggacagcgaactgtcagatactgactctggctgttgtcttggacagtctgagtcagacaagtcctcgacccatggggaggcagcagccgaaactgattcaaggcccgcagatgaagacatgtgggacgagactgaactcggactttataaggtgaacgagtacgtcgatgctagagacactaatatgggagcctggttcgaagctcaggtcgtgagggtcactcggaaagcgccgtctcgcgatgagccatgctcaagtacatcacgtcctgccctggaagaggacgtgatctaccacgtaaagtatgatgactatcctgaaaacggtgtggtccaaatgaatagtcgggatgtaagggctagagccaggaccattattaagtggcaggacttggaagtcggccaggtggtgatgctgaactacaatccggacaatccaaaggagcgaggattttggtacgatgccgaaatctcccgtaaacgcgaaacccggactgcccgggagttatatgctaatgtggtgcttggtgacgactcattaaacgattgtaggatcatctttgtggacgaggtgtttaaaatagaacggcctggcgagggctccccaatggtggacaacccgatgcgcagaaagagcggccctagctgcaagcactgtaaagacgacgtgaatcgcctgtgccgggtgtgtgcttgccatctatgcggtggaagacaggatcccgacaaacagctgatgtgtgacgagtgtgacatggctttccatatctattgcctagacccccccctctcgtctgtgcccagcgaagatgaatggtattgccctgaatgtcggaacgatgcctcggaggtcgtgctggccggcgagcggctgcgggagtcaaagaagaaggcaaagatggctagcgctaccagcagtagccaaagggactgggggaagggcatggcctgcgtgggccggaccaaggagtgtacgattgttccttccaatcactatggcccaatccctggcattccagtgggtaccatgtggcgcttcagagtgcaggtgagtgagtcaggcgtacaccgaccccacgtggctggcattcacggaaggagcaatgatggagcatactcgctagtcttggccggaggatacgaggacgacgttgatcacgggaatttcttcacatatactggtagtggaggcagggacctgtcaggcaacaaaaggactgccgaacagagctgtgatcagaagcttaccaataccaaccgtgcacttgcactgaactgtttcgccccgattaatgaccaagaaggtgccgaggcaaaagattggaggtcaggaaagcctgtgcgtgtggtgcgtaacgtcaaaggcggtaagaacagcaagtacgcaccggcagaaggcaatcggtacgacggaatctataaagttgtaaaatattggcccgagaagggaaaaagcggtttcctggtgtggcgctacctgttgaggcgggatgacgacgagcccggaccatggacaaaagagggaaaagacagaataaaaaagctggggctcactatgcagtatcccgaaggctatcttgaagccttggccaacagagagcgcgagaaggagaattccaaacgagaagaggaggagcagcaggagggaggtttcgccagccctcggacaggtaagggtaagtggaaacgcaagagcgccggtgggggtccgtcaagggctggcccccgtcggacatctaagaagaccaaagtggaaccctactccctcacggcccagcagtcctcgctcatacgcgaagataagagcaatgctaagctgtggaatgaggtactggcgtcactcaaagaccgtcccgcatctgggtctccttttcagctgttcctctcaaaggtagaggaaacgttccagtgcatttgttgtcaagaacttgtgtttagaccgatcactacggtatgccagcacaacgtttgcaaggattgtctcgacagatctttccgcgcccaggtgttctcctgtccagcatgcagatacgacctgggccggtcttacgcgatgcaagttaatcagcccctccagaccgtcttgaaccagctgtttccagggtacggtaatgggagatag

SEQ ID NO: 108909 - DNA, 2379 bp, Artificial Sequence
  derived and/or modified sequence
atgtggattcaggtgaggaccatggatggccgtcagacacacacagtcgactcactatcaagactgaccaaggtggaggagctgagaaggaaaatacaagaactgtttcacgtggagcccggactgcaacgcttgttctaccggggaaaacagatggaggacggccacaccttgtttgactacgaggtgcgcctaaatgacacaattcagctgctcgtgaggcagtcccttgtcctaccccactccaccaaagagagagattcggaactcagtgacacggatagcggttgctgtcttggtcagtccgagagcgacaagtcatccacacatggcgaagcggctgccgaaaccgattcccgccctgccgacgaagacatgtgggatgagacggaactaggcctgtacaaagtgaatgagtacgtggatgccagggacactaatatgggcgcatggttcgaggcacaggtggtgagggtaacccggaaggctccctcccgcgatgaaccatgctcttcaacttctagaccagccctggaggaagatgtgatttaccacgttaagtatgacgactaccctgagaacggcgtcgtgcagatgaacagcagagatgtccgcgctagagctcggaccatcattaagtggcaggatctagaggtgggccaggtggtgatgttgaattacaatcccgacaaccctaaggagagaggattctggtacgatgccgaaattagccgcaaacgtgagaccagaaccgctcgagagctttacgctaatgtcgtactcggggacgatagtctaaatgattgcagaatcatattcgtcgatgaggtatttaagatcgaaagacctggagaggggtccccgatggtcgataacccgatgagacgcaagtctgggccaagctgtaagcattgtaaggatgacgtaaatcgcttatgtcgggtgtgtgcatgccatctgtgtggtgggcgtcaggatccggacaagcagctgatgtgcgatgagtgtgacatggctttccacatttactgcctggatcctccgttaagcagcgtaccctctgaagacgaatggtactgcccagaatgccgaaatgatgcctccgaagtagtgctggcaggcgagcggctccgggagagtaagaagaaagctaagatggcttcagctacaagcagttctcagagagactgggggaagggaatggcctgcgttggacgtaccaaagagtgcactatagttcccagcaaccattacggtcccattcctggcatccccgttggtaccatgtggcgttttagggtgcaggtaagcgaatctggggtccaccgccctcacgtggctggtatccacggaagatcaaatgatggcgcatattccctggtgctggcgggaggctacgaagatgatgtggaccatggaaacttcttcacatacaccggaagcgggggaagagacctttctggaaataaacggaccgcggagcagtcctgtgaccaaaaactcactaatacgaaccgcgctctcgccctcaactgtttcgccccaattaatgaccaggaaggcgcagaggcaaaggactggaggagcggtaagccggttcgggtagtgcggaacgttaagggtggtaagaactcgaaatatgcgccagccgaaggcaatagatatgacggaatctacaaagtggtcaagtattggccagagaaggggaagagcggtttcctggtgtggagatacctgcttcggagagacgatgatgagccgggtccatggactaaagagggcaaggaccgcattaagaagctgggtctcaccatgcaataccctgaaggatatctggaggcactcgccaacagggaaagagagaaagaaaactccaaacgagaagaagaggagcaacaggaaggtgggttcgcctcaccccgaactggaaaggggaagtggaagcggaagagcgctggaggcggtccttcccgcgcaggacctcgccgtacaagcaaaaagaccaaggttgagccgtattcgctcaccgcccagcagtcctcacttattagggaagataaatccaatgctaagctttggaatgaggtcttggcctctctgaaggaccgcccagcatctgggtctcctttccagctgtttctgagcaaggttgaagagaccttccagtgcatctgttgtcaagaacttgtattccggcctatcaccacagtgtgccagcataacgtctgcaaggattgtctggaccgtagctttagggctcaggtattttcctgcccggcatgcaggtatgaccttggcagaagctatgcaatgcaggtcaaccagccccttcagacagtcctgaatcagttattccccggttatggtaacgggagatag

SEQ ID NO: 108910 - DNA, 1224 bp, Artificial Sequence
  derived and/or modified sequence
atggctagtgcaacttccagcagtcagcgggactggggcaagggaatggcttgtgtggggaggactaaggagtgcacaattgtcccttccaatcattacggacccattccagggatccccgtgggaacgatgtggaggtttcgcgttcaggtaagtgagtcgggagtacacaggccacacgtggctggtattcacgggcgatccaatgatggagcttacagcctggttttggctggaggctatgaggacgatgtggatcacggcaactttttcacctatacgggctcaggtggacgggacttatccggcaacaaacgcacagccgaacagtcttgtgatcaaaagctaacaaacactaaccgcgcattggctttgaattgcttcgcgccaattaacgatcaggaaggtgccgaagcgaaggactggcgctcagggaaacccgttcgcgtggtgagaaacgtgaaaggcggaaagaatagtaagtatgccccagcagagggcaacagatatgatggtatttacaaagtcgtgaaatactggccggaaaaaggcaaatcaggattccttgtgtggagatatctgctccgcagggatgacgatgaacccggaccctggacaaaagaggggaaggacagaattaaaaaactgggattaactatgcagtaccctgaaggatacttggaggcactggctaatagagagcgggagaaggagaactccaagagggaggaagaagagcagcaggagggagggttcgcttctccacggaccggaaagggcaagtggaagcgaaaatcagcagggggagggccttccagagccggaccacgcagaacatcgaaaaaaaccaaggtcgaaccttattctctgactgctcagcaatcgagtctgattagagaggacaagagcaacgctaaactttggaacgaggtactagcaagcctgaaagaccgtccggcttccggcagccctttccagttgttcttgagtaaagtggaggaaacgtttcagtgcatctgttgtcaggaacttgttttcaggccaatcacaacagtatgtcagcataacgtttgcaaggattgcctcgaccggtccttcagggcgcaagtgtttagttgtccagcctgccggtatgatctgggacggtcttatgccatgcaggtgaatcagccattacagacagttctcaaccaactatttcccggttacggcaacggtcggtag

SEQ ID NO: 108911 - DNA, 2379 bp, Artificial Sequence
  derived and/or modified sequence
atgtggatccaggtaaggactatggatgggcgtcagacccacacagtggacagtttgagccggttgactaaagtggaggagcttcggcgaaaaatacaagagctctttcacgtggagcccggactgcaacgcctcttctaccgaggaaaacaaatggaggacggacacactttgttcgattacgaggtgcgcctgaatgatacaattcagctcctcgtgcgacagtcactggtgcttccccattccaccaaggaaagggactccgagctgagcgacaccgatagtgggtgttgcctcggacagtctgagtccgataaatcaagtactcacggtgaggctgccgctgaaaccgattctcggcctgcagacgaggatatgtgggacgaaactgaactagggctgtacaaggtgaatgagtacgttgatgctcgggatacaaacatgggagcatggtttgaggcacaggtggtccgcgttactcggaaagccccttcccgcgatgagccctgttctagcaccagtagacccgcactggaagaggatgtgatctaccatgtcaagtacgatgactatcccgaaaatggcgtggtgcagatgaactccagagacgtacgggcacgagcccgaacaattataaagtggcaagatcttgaagtgggacaggtggtcatgctgaactacaatccagacaatcccaaggagaggggcttttggtatgacgcagagatctcaagaaaaagggagacaaggactgccagagaactgtacgcaaatgtggtacttggcgatgactccctgaatgattgtcgcatcatctttgtggacgaggtctttaagattgagcggccaggcgaggggagtcccatggttgacaatcctatgcgcaggaaaagcgggcctagctgcaagcactgcaaggatgacgtgaacaggctgtgcagggtgtgcgcttgtcatctctgcggcggaaggcaggatccggataagcagcttatgtgtgacgaatgcgacatggcgttccatatctattgcctggatccaccattatccagcgtaccaagcgaagacgaatggtattgtccagaatgcaggaatgacgccagtgaggtcgtattggccggtgagcggcttcgggagagcaaaaagaaagctaaaatggcctccgctacctccagctcccagagagattggggcaagggcatggcatgcgtcggacgcacaaaagagtgtacaatcgtaccctctaatcattacggcccaattcctgggatcccagtaggcacaatgtggcgctttagggtccaggttagtgaaagcggagtgcaccgccctcacgtggccggaattcatgggcgaagcaatgatggcgcttatagtctcgtcctcgctggcggatatgaagacgacgtcgaccatggcaacttctttacctacaccggctccggagggcgagatttgtctggtaacaagcggaccgcggagcagagctgtgaccagaagcttaccaacacgaatagagccctcgcgctgaattgctttgcgcctattaatgaccaagaaggcgctgaggccaaggattggcgttcaggcaagccagtgcgcgtggtacgcaatgtgaagggcggaaaaaactcaaaatacgcaccggcagagggaaatagatatgacggaatctacaaggtcgtgaaatattggcctgagaagggcaaaagcggttttctggtatggagatacctactgcgtcgagacgacgacgagcctggaccttggacaaaagagggcaaggaccgaatcaagaaattgggccttaccatgcaatacccagagggctacttggaggccctggcaaatcgcgagcgggaaaaagagaactcaaagcgtgaagaagaggagcagcaggaagggggttttgcctctcccagaaccggcaagggaaagtggaagaggaagagcgccggaggcggacctagtcgcgctggtccgcgtcgtacctccaaaaaaactaaggtcgaaccatactcgctcacggcacagcaatcttccctgatccgtgaagacaagagcaatgcaaagctctggaacgaagttcttgcaagtctcaaagataggcccgctagtgggagcccatttcaactcttcctgtccaaggtggaagagaccttccaatgtatctgctgtcaggagctagtctttcgacctataacaaccgtctgtcaacacaacgtctgtaaagattgcttggatcgatctttccgagcccaagttttttcatgtcctgcctgccggtacgatttgggacgctcatacgctatgcaggtgaaccaacccctgcagactgttttgaatcaactattccctggctacggtaacggtaggtag

SEQ ID NO: 108912 - DNA, 2379 bp, Artificial Sequence
  derived and/or modified sequence
atgtggatccaagtccgcacaatggacgggcgtcagacccacacggtggactctctgagccggctgaccaaagtggaagaattaagacgtaagatacaggagttattccacgtggagccgggactccagaggctgttctatagaggaaaacagatggaggacggacataccttatttgactatgaggtcaggctcaatgacacaatacaactcttagtcaggcagtcgctggtgttgccccactccaccaaggagcgagacagcgaactttctgacacagattcaggatgttgcctgggccaaagtgagagtgataagtcatctacacacggggaggcggctgccgagacagacagcagacccgctgacgaggacatgtgggatgaaacagaattggggctgtataaagtcaatgagtacgtggatgcccgagacacaaacatgggtgcctggtttgaagcccaggtggttagggtgacccgcaaggccccatctcgggatgaaccatgtagtagcacaagcagaccagctcttgaagaggacgtgatttaccacgtgaagtatgacgactaccccgaaaatggcgtcgtgcagatgaactcccgagacgtgagagccagggcgagaaccatcattaaatggcaggatctagaggtgggacaggttgtgatgctcaactacaatcctgataaccctaaggagcgagggttttggtacgacgccgaaatcagtagaaaacgcgagacccggacggcacgcgaattgtacgctaacgtggttttaggcgacgattctctcaatgattgtagaattatcttcgtggacgaagtcttcaaaatcgagcgacctggtgagggcagcccaatggttgacaatcctatgcgcaggaagtctgggcctagctgtaagcactgtaaagacgacgtgaatcggctctgccgcgtgtgcgcctgccatctctgtggtggtagacaggacccggacaagcagctaatgtgcgatgagtgcgatatggccttccacatctactgcctcgatcccccactgagtagcgtgccatcagaggacgagtggtactgtccagagtgtcgtaatgacgcctccgaggtggttctggctggggaaaggctgagagaatcgaaaaaaaaagccaaaatggccagcgctacttccagctcacaacgcgattggggaaagggaatggcatgtgttgggagaacaaaggagtgtacaattgttcctagcaaccattacgggccaatcccgggaataccagtggggacgatgtggcggtttagagtgcaggtatcagaatcaggggttcacagaccccacgtcgccggaatacacggtagaagtaacgatggcgcttacagtcttgtgctagccggaggatatgaggatgacgtcgaccatggaaatttcttcacttataccggaagcggaggcagggacttatctgggaacaaaagaaccgccgaacagtcgtgtgatcagaaactaacaaacacgaacagagccctggctctaaactgttttgccccaattaacgatcaggaaggtgccgaagcgaaggactggagatccggaaagcctgttcgagtggttcgtaatgtgaaaggcggtaagaattctaagtatgcaccagccgagggcaacagatatgacggtatttacaaggttgtcaagtactggcccgagaagggcaaatccggtttcctagtctggagatacctgctacggcgagatgatgatgaaccgggtccctggacgaaggaggggaaagacagaattaagaagttgggcctgactatgcaataccctgaaggatatcttgaggcccttgctaaccgtgagagggaaaaggagaattctaaacgggaagaggaggaacagcaggagggcggttttgcctcgccaaggacgggtaagggaaagtggaagaggaagagcgccggaggaggtccttcccgtgctggacctagacgaacaagcaagaagacaaaggtggaaccatacagtctgactgctcagcaatccagcctcattcgggaggataaatcaaatgccaagctatggaacgaggtgctcgcctcgctgaaggacaggcccgcatccggctctccctttcagctctttctaagcaaagttgaggagaccttccagtgtatctgctgccaagagctggtgtttcggccaattaccactgtctgccagcacaatgtgtgcaaagactgtctggaccgctctttcagagcccaggttttctcatgtcccgcttgcaggtacgacctgggcaggagttatgccatgcaggtaaatcagcccctgcagaccgttctgaatcagttgtttccaggctacggaaatggcaggtag

SEQ ID NO: 108913 - DNA, 1856 bp, Artificial Sequence
  derived and/or modified sequence
atcagagcagctggcagcgcggcgggcagcgtttgccgagcgggcgctccgggtcgcacgcaagtccgcgcggggtccgggccacgcacgcggtttcatcgccatccccagccgggccacgcgcgcaggcagacaagctgttcgcggcgaccggagagcagtgttcccagcgaggacgagtggtactgccctgagtgccggaatgatgccagcgaggtggtactggcgggagagcggctgagagagagcaagaagaaggcgaagatggcctcggccacatcgtcctcacagcgggactggggcaagggcatggcctgtgtgggccgcaccaaggaatgtaccatcgtcccgtccaaccactacggacccatcccggggatccccgtgggcaccatgtggcggttccgagtccaggtcagcgagtcgggtgtccatcggccccacgtggctggcatacacggccggagcaacgacggagcgtactccctagtcctggcggggggctatgaggatgatgtggaccatgggaattttttcacatacacgggtagtggtggtcgagatctttccggcaacaagaggaccgcggaacagtcttgtgatcagaaactcaccaacaccaacagggcgctggctctcaactgctttgctcccatcaatgaccaagaaggggccgaggccaaggactggcggtcggggaagccggtcagggtggtgcgcaatgtcaagggtggcaagaatagcaagtacgcccccgctgagggcaaccgctacgatggcatctacaaggttgtgaaatactggcccgagaaggggaagtccgggtttctcgtgtggcgctaccttctgcggagggacgatgatgagcctggcccttggacgaaggaggggaaggaccggatcaagaagctggggctgaccatgcagtatccagaaggctacctggaagccctggccaaccgagagcgagagaaggagaacagcaagagggaggaggaggagcagcaggaggggggcttcgcgtcccccaggacgggcaagggcaagtggaagcggaagtcggcaggaggtggcccgagcagggcgggtccccgccggacatccaagaaaaccaaggtggagccctacagtctcacggcccagcagagcagcctcatcagagaggacaagagcaacgccaagctgtggaatgaggtcctggcgtcactcaaggaccggccggcgagcggcagcccgttccagttgttcctgagtaaagtggaggagacgttccagtgtatctgctgtcaggagctggtgttccggcccatcacgaccgtgtgccagcacaacgtgtgcaaggactgcctggacagatcctttcgggcacaggtgttcagctgccctgcctgccgctacgacctgggccgcagctatgccatgcaggtgaaccagcctctgcagaccgtcctcaaccagctcttccccggctacggcaatggccggtgatctccaagcacttctcgacaggcgttttgctgaaaacgtgtcggagggctcgttcatcggcactgattttgttcttagtgggcttaacttaaacaggtagtgtttcctccgttccctaaaaaggtttgtcttcctttttttttttatttttatttttcaaatctatacattttcaggaatttatgtattctggctaaaagttggacttctcagtattgtgtttagttctttgaaaacataaaagcctgcaatttctcgacaaaacaacacaagattttttaaagatggaatcagaaactacgtggtgtggaggctgttgatgtttctggtgtcaagttctcagaagttgctgccaccaactctttaag

SEQ ID NO: 108914 - protein, 748 aa, Artificial Sequence
  derived and/or modified sequence
MGRAGAAAVIPGLALLWAVGLGSAAPPPRLRLSFQELQAWHGLQTFSLERTCCYQALLVDEERGRLFVGAENHVASLNLDNISKRAKKLAWPAPVEWREECNWAGKDIGTECMNFVKLLHAYNRTHLLACGTGAFHPTCAFVEVGHRAEEPVLRLDPGRIEDGKGKSPYDPRHRAASVLVGEELYSGVAADLMGRDFTIFRSLGQRPSLRTEPHDSRWLNEPKFVKVFWIPESENPDDDKIYFFFRETAVEAAPALGRLSVSRVGQICRNDVGGQRSLVNKWTTFLKARLVCSVPGVEGDTHFDQLQDVFLLSSRDHRTPLLYAVFSTSSSIFQGSAVCVYSMNDVRRAFLGPFAHKEGPMHQWVSYQGRVPYPRPGMCPSKTFGTFSSTKDFPDDVIQFARNHPLMYNSVLPTGGRPLFLQVGANYTFTQIAADRVAAADGHYDVLFIGTDVGTVLKVISVPKGSRPSAEGLLLEELHVFEDSAAVTSMQISSKRHQLYVASRSAVAQIALHRCAAHGRVCTECCLARDPYCAWDGVACTRFQPSAKRRFRRQDVRNGDPSTLCSGDSSRPALLEHKVFGVEGSSAFLECEPRSLQARVEWTFQRAGVTAHTQVLAEERTERTARGLLLRRLRRRDSGVYLCAAVEQGFTQPLRRLSLHVLSATQAERLARAEEAAPAAPPGPKLWYRDFLQLVEPGGGGSANSLRMCRPQPALQSLPLESRRKGRNRRTHAPEPRAERGPRSATHW

SEQ ID NO: 108915 - protein, 456 aa, Artificial Sequence
  derived and/or modified sequence
MGRAGAAAVIPGLALLWAVGLGSAAPSPHLRLSFQELQAWHGLQTFSLERTCCYQALLVDEERGRLFVGAENHVASLNLDNISKRAKKLAWPAPVEWREECNWAGKDIGTECMNFVKLLHAYNRTHLLACGTGAFHPTCAFVEVGHRAEEPVLRLDPGRIEDGKGKSPYDPRHRAASVLVGEELYSGVAADLMGRDFTIFRSLGQRPSLRTEPHDSRWLNEPKFVKVFWIPESENPDDDKIYFFFRETAVEAAPALGRLSVSRVGQICRNDVGGQRSLVNKWTTFLKARLVCSVPGVEGDTHFDQLQDVFLLSSRDHRTPLLYAVFSTSSSIFQGSAVCVYSMNDVRRAFLGPFAHKEGPMHQWVSYQGRVPYPRQACAPARPLAPSVPPRTSQTMSSSLRGTTPSCTTLSCPLGGALFSYKLEPITPSLKLPRTGLQPLTDTMTSSSLAQTLARC

SEQ ID NO: 108916 - protein, 749 aa, Artificial Sequence
  derived and/or modified sequence
MGRAGAAAVIPGLALLWAVGLGSAAPSPPRLRLSFQELQAWHGLQTFSLERTCCYQALLVDEERGRLFVGAENHVASLNLDNISKRAKKLAWPAPVEWREECNWAGKDIGTECMNFVKLLHAYNRTHLLACGTGAFHPTCAFVEVGHRAEEPVLRLDPGRIEDGKGKSPYDPRHRAASVLVGEELYSGVAADLMGRDFTIFRSLGQRPSLRTEPHDSRWLNEPKFVKVFWIPESENPDDDKIYFFFRETAVEAAPALGRLSVSRVGQICRNDVGGQRSLVNKWTTFLKARLVCSVPGVEGDTHFDQLQDVFLLSSRDHRTPLLYAVFSTSSSIFQGSAVCVYSMNDVRRAFLGPFAHKEGPMHQWVSYQGRVPYPRPGMCPSKTFGTFSSTKDFPDDVIQFARNHPLMYNSVLPTGGRPLFLQVGANYTFTQIAADRVAAADGHYDVLFIGTDVGTVLKVISVPKGSRPSAEGLLLEELHVFEDSAAVTSMQISSKRHQLYVASRSAVAQIALHRCAAHGRVCTECCLARDPYCAWDGVACTRFQPSAKRRFRRQDVRNGDPSTLCSGDSSRPALLEHKVFGVEGSSAFLECEPRSLQARVEWTFQRAGVTAHTQVLAEERTERTARGLLLRRLRRRDSGVYLCAAVEQGFTQPLRRLSLHVLSATQAERLARAEEAAPAAPPGPKLWYRDFLQLVEPGGGGSANSLRMCRPQPALQSLPLESRRKGRNRRTHAPEPRAERGPRSATHW

SEQ ID NO: 108917 - DNA, 2247 bp, Artificial Sequence
  derived and/or modified sequence
atggggagggcaggagcggctgctgttattcccggtttggcactgctgtgggccgtagggctgggatctgctgccccaccgcctagattgagactctcattccaagagctgcaggcatggcatggccttcaaaccttctctttagagcgcacctgctgctatcaagccctgctggtcgacgaagagcgcggtcgcctgttcgtcggggctgaaaaccacgtcgccagcctaaacctggacaatatcagtaaaagagcaaaaaagctggcgtggccagcacctgtagagtggcgggaggagtgcaattgggcgggaaaagacattggcacagaatgcatgaactttgttaagctgcttcacgcatacaatcggactcacctgttagcttgtggcacgggcgctttccatccaacctgtgcttttgtggaggtgggccacagagcagaggaaccagtgctcaggcttgatcccggtaggattgaagatggtaaaggcaaatccccttacgacccacgccacagagccgcatctgtcctggtgggcgaagaactatactcaggggtggctgcagacctgatgggcagagacttcaccatcttcaggagtctaggccagaggccatcgctaaggaccgagccgcacgactctcgatggctcaacgagccaaagttcgtcaaggtgttctggatccccgagagcgaaaaccctgatgacgataagatatactttttctttcgagagaccgcagtcgaggccgctcctgcccttgggaggctgtctgtgtctagggtgggacagatttgccggaatgacgttggcggacagagatcactggtgaataagtggacaacattcttgaaagccagactggtttgtagtgtgcctggggtggagggggacacccactttgatcagttgcaagatgtctttcttctaagcagtagggaccataggacccctctgctgtacgccgtgttctccacttctagctcaatctttcaggggtcagccgtttgcgtgtactccatgaatgatgtgcgcagggccttcttgggccctttcgcacacaaagagggaccaatgcaccagtgggtgagctaccaggggcgagtgccatatccaaggcctgggatgtgcccttctaagaccttcggtacattctcctcaaccaaagatttccccgatgatgtaattcagtttgctcgtaaccacccactgatgtacaacagcgtgctgcccactggaggtaggccactgtttctacaggtgggtgccaattacacatttacccaaatcgcggctgacagggtcgccgcagccgatggacattacgatgtcctgttcattggaaccgacgtaggcaccgtgctgaaggtgatttccgttcccaagggctccagacccagcgctgaaggactcctgctagaagagcttcacgtgttcgaagactccgccgcagtcactagcatgcaaatcagctcaaagcgccatcagttatatgtggctagtcggtcagctgtcgcccagattgccctacatcggtgtgccgctcacggtcgtgtgtgcacagaatgctgcctcgcacgcgacccttactgtgcctgggatggggtagcttgtacgagattccagcccagcgccaagagaaggttccggagacaagacgtgaggaatggtgatcccagcaccctgtgcagcggagatagttcccggcctgcattgctagagcataaggtgttcggggtggagggctcttccgccttcttggaatgtgagcctaggtctctccaggccagggttgagtggacttttcagcgcgcaggagtcaccgcacacacccaggtcctggcagaagagcggacggaacggaccgcgagaggcctgttgcttcgccgactccgacggcgtgacagtggcgtttacctgtgcgcggcagtcgaacagggattcacccaaccactccgtaggctttccctgcacgtgttgagtgctacccaggccgaaaggctggccagggccgaagaagccgctccagctgcgcctcctggcccaaaactgtggtacagggactttttgcaattggtggagccaggtggagggggatcagcaaactcactccggatgtgccgccctcagccagcattgcaatccctccccctggaatctcggaggaagggacgaaacagacgcactcacgcacccgaacctcgggcagaacgcggtcctagatcagcgacgcattggtag

SEQ ID NO: 108918 - DNA, 1371 bp, Artificial Sequence
  derived and/or modified sequence
atgggacgcgcaggagcggcagcggtcatcccgggactggcgctcctatgggccgtggggttggggagcgcagcacccagcccgcacctgcggctttcatttcaggagttgcaggcctggcatggcttgcaaactttttccctggagcgtacttgttgctatcaagcactgctcgtagacgaagaacgaggaagactgttcgtgggtgctgagaatcatgttgccagcctcaacctcgataacatttcgaaaagggccaaaaagttggcgtggcctgctccggtggagtggcgggaggaatgcaactgggcgggtaaagatatcggcactgaatgtatgaattttgttaagcttttgcatgcttataacagaacacacctcctggcctgtgggacaggcgcattccaccctacatgtgccttcgtggaggttggtcaccgggcagaggaacctgtgcttcgtctggacccaggtcgcatagaggacggtaaggggaaatctccatacgatccacgccaccgggctgcctccgtactggtcggggaagagctgtattctggagtggccgcagacttgatgggtcgcgattttacgatttttcgatccctgggtcagcgaccctcactacgtacagagccccatgatagtcggtggctcaacgaacctaaattcgtgaaagtcttttggataccagaatctgaaaatcccgacgacgataagatctatttcttctttagagagactgcggtggaggctgctccagctctcgggagactgtctgtgagcagagtgggacagatctgtcgcaacgacgtgggagggcagagatcattggttaacaagtggaccacatttctgaaagcccgactagtgtgttccgtccccggtgtcgaaggcgatacccactttgatcagctccaggatgtgttcttactgagttcccgagatcatcgaacgcccctgctctacgctgtctttagcactagcagctcgatatttcaggggagcgccgtttgcgtctactctatgaacgacgtgaggagagccttcctcggaccatttgcccataaagaggggccaatgcatcagtgggtttcgtaccaaggtcgggtgccttacccgagacaagcctgcgcacccgctcgcccactggcaccgtctgtgccacctaggaccagccagacaatgtcctcatcgctgcggggaacaacacctagctgtactaccctgtcatgtcccctgggtggggctctcttctcttacaagctcgagcctatcacccccagcctgaaacttcctcggacgggcttgcagcctctgacagatacgatgacaagcagcagcctcgcgcagactctagcgagatgttag

SEQ ID NO: 108919 - DNA, 2735 bp, Artificial Sequence
  derived and/or modified sequence
ctcaaggctcctccacacacacacccgctgaaccctgagcaccctgagctgctgagatggggcgggccggggctgccgccgtgatcccgggcctggccctgctctgggcagtggggctggggagtgccgcccccagcccccaccttcggctctccttccaagagctccaggcctggcatggtctccagactttcagcctggagcgaacctgctgctaccaggccttgctggtggatgaggagcgtggacgcctgtttgtgggtgccgagaaccatgtggcctccctcaacctggacaacatcagcaagcgggccaagaagctggcctggccggcccctgtggaatggcgagaggagtgcaactgggcagggaaggacattggtactgagtgcatgaacttcgtgaagttgctgcatgcctacaaccgcacccatttgctggcctgtggcacgggagccttccacccaacctgtgcctttgtggaagtgggccaccgggcagaggagcccgtcctccggctggacccaggaaggatagaggatggcaaggggaagagtccttatgaccccaggcatcgggctgcctccgtgctggtgggggaggagctatactcaggggtggcagcagacctcatgggacgagactttaccatctttcgcagcctagggcaacgtccaagtctccgaacagagccacacgactcccgctggctcaatgagcccaagtttgtcaaggtattttggatcccggagagcgagaacccagacgacgacaaaatctacttcttctttcgtgagacggcggtagaggcggcgccggcactgggacgcctgtccgtgtcccgcgttggccagatctgccggaacgacgtgggcggccagcgcagcctggtcaacaagtggacgacgttcctgaaggcgcggctggtgtgctcggtgcccggcgtcgagggcgacacccacttcgatcagctccaggatgtgtttctgttgtcctcgcgggaccaccggaccccgctgctctatgccgtcttctccacgtccagcagcatcttccagggctctgcggtgtgcgtgtacagcatgaacgacgtgcgccgggccttcttgggaccctttgcacacaaggaggggcccatgcaccagtgggtgtcataccagggtcgcgtcccctacccgcggcaggcatgtgccccagcaagacctttggcaccttcagttccaccaaggacttcccagacgatgtcatccagtttgcgcggaaccaccccctcatgtacaactctgtcctgcccactggggggcgccctcttttcctacaagttggagccaattacaccttcactcaaattgccgcggaccgggttgcagccgctgacggacactatgacgtcctcttcattggcacagacgttggcacggtgctgaaggtgatctcggtccccaagggcagtaggcccagcgcagaggggctgctcctggaggagctgcacgtgtttgaggactcggccgctgtcaccagcatgcaaatttcttccaagaggcaccagctgtacgtagcctcgcggagcgcggtggcccagatcgcgttgcaccgctgcgctgcccacggccgcgtctgcaccgaatgctgtctggcgcgtgacccctactgcgcctgggacggggtcgcgtgcacgcgcttccagcccagtgccaagaggcggttccggcggcaagacgtaaggaatggcgaccccagcacgttgtgctccggagactcgtctcgtcccgcgctgctggaacacaaggtgttcggcgtggagggcagcagcgcctttctggagtgtgagccccgctcgctgcaggcgcgcgtggagtggactttccagcgcgcaggggtgacagcccacacccaggtgctggcagaggagcgcaccgagcgcaccgcccggggactactgctgcgcaggctgcggcgccgggactcgggcgtgtacttgtgcgccgccgtcgagcagggctttacgcaaccgctgcgtcgcctgtcgctgcacgtgttgagtgctacgcaggccgaacgactggcgcgggccgaggaggctgcgcccgccgcgccgccgggccccaaactctggtaccgggactttctgcagctggtggagccgggcggaggtggcagcgcgaactccctgcgcatgtgccgcccgcagcctgcgctgcagtcactgcccctggagtcgcggagaaagggccgtaaccggaggacccacgcccctgagcctcgcgctgagcgggggccgcgcagcgcaacgcactggtgaccagactgtccccacgccgggaaccaagcaggagacgacaggcgagagaggagccagacagaccctgaaaagaaggacgggttggggccgggcacattgggggtcaccggccgatggagacaccaaccgacaggccctggctgagggcagctgcgcgggcttatttattaacaggataacccttgaatgtagcagccccgggagggcggcacaggtcgggcgcaggattcagccggagggaagggacggggaagccgagctccagagcaacgaccagggccgaggaggtgcctggagtgcccaccctgggagacagaccccacctccttgggtagtgagcagtgagcagaaagctgtgaacaggctgggctgctggaggtggggcgaggcaggccgactgtactaaagtaacgcaataaacgcattatcagcc

SEQ ID NO: 108920 - DNA, 2247 bp, Artificial Sequence
  derived and/or modified sequence
atgggacgggctggcgctgcagccgtcatacctggcctggctctcctatgggcggtggggctggggtcggccgcccctcctccgaggttgcgcctgtcttttcaagaactgcaagcctggcacgggctacagacattctctttggagcgtacttgctgttaccaggccctgcttgtggatgaggagagggggcgcttatttgtgggcgctgaaaaccacgtcgccagtctgaacctggacaatattagcaagcgagccaaaaagctggcatggccagcaccggtcgaatggcgcgaagagtgcaactgggcgggcaaagacattggaactgagtgcatgaacttcgtcaagttgctccacgcctacaacagaacacacctgcttgcgtgcggaacgggtgcttttcaccccacctgcgcctttgtcgaggtgggacacagagccgaagaacccgtgctgaggttggatccaggaaggatcgaggacgggaaaggaaaatccccatacgaccccagacacagagccgcgagtgttctagtgggtgaagagctgtattcgggtgtagctgccgatttaatgggcagggacttcacaatcttcaggtcactagggcaacggccttctttgcgaactgagcctcatgatagtaggtggctcaacgagcctaagttcgttaaagtgttctggattcctgagtctgagaatccagatgacgacaagatctatttttttttcagagagactgcagtggaagctgctccagcgctgggcaggctgtctgttagtcgtgtcggccaaatttgcagaaatgatgtaggtggacaaaggtccctggtgaacaagtggacaacattcctcaaagcacggctcgtgtgttcagtacccggtgtggaaggagacacgcattttgatcagcttcaggacgttttcttgctgtccagcagggaccaccgcacacccctcttatacgcagttttttcgacctcttcctcgattttccaagggtcagccgtctgcgtgtactctatgaatgacgtgcgccgagcctttctggggccttttgctcataaagaaggtcccatgcaccagtgggtctcctaccagggaagggtgccatatccacgccctgggatgtgcccttctaagaccttcggcacattctcatccaccaaggacttcccagatgacgttattcaatttgctagaaatcaccctctcatgtacaatagcgttttgcctaccggcgggcggcctctctttttgcaggtgggcgcaaattatacttttacgcaaatcgcagcagatcgtgtagcagctgccgacggtcattatgacgtgctgtttatcggaactgatgtcggcaccgttttgaaggtgattagcgtccctaaaggcagtcggccatctgccgagggactcctgttagaagaattgcacgttttcgaagattccgcagctgtgacctctatgcaaatttcttctaaaagacatcagctgtacgtcgcaagtaggtcagctgtagctcagatcgccctgcatcgctgcgcagctcacggacgggtgtgcacggagtgctgtcttgcacgagacccctactgtgcttgggacggcgtggcatgcaccagatttcagccctctgccaagaggcgcttcagaagacaggacgttcggaatggcgatccatcgactctttgctctggcgacagttcacgccccgccctgttagaacacaaggtgttcggcgttgagggatcgtcagctttcttggaatgcgaacccagatctctgcaggcaagagttgaatggaccttccagcgggcgggtgtcaccgcacatactcaggtgttggccgaggaaaggacagagagaacagcccggggcctgctgttgcgaaggctgcgacgaagagattccggagtatacttgtgtgccgctgtggagcaaggattcacccaacccctgcggcgattaagccttcacgtgctctcagccactcaagccgaacgtctcgcccgagccgaagaagccgcccctgccgcgcccccgggtccaaagctgtggtaccgagatttcctccagttagtggagcccgggggcggggggtcagccaatagcttacgcatgtgccgtcctcaaccagccttgcagagccttccactagagagccgacgcaagggccgcaatagaagaacccacgccccagaaccaagggcagagagagggcctcgctccgcaacccactggtag

SEQ ID NO: 108921 - DNA, 1371 bp, Artificial Sequence
  derived and/or modified sequence
atgggcagggcaggcgcagccgctgtaatccctggtcttgcactgctgtgggccgtgggtcttggctcagcagcaccatccccgcatcttaggttgtcatttcaggaactgcaggcctggcacggtctccagaccttttctctggaaaggacttgctgctaccaggcactgttggttgacgaggagaggggccgactatttgtgggtgcggaaaaccatgtagctagcctgaacctcgacaacatttcgaaacgcgcaaagaagctcgcctggcccgccccagtggagtggagggaggaatgcaactgggccggtaaggatataggtacagaatgcatgaatttcgtgaagctgctgcacgcctataatcggacgcacttgctggcatgcgggacaggcgcctttcacccaacctgtgcattcgtggaggtgggccatcgagctgaggagcctgtgttaagactcgatcccgggagaattgaggatggcaaaggaaaaagtccctacgaccccaggcaccgggctgccagcgttctggtcggcgaagaactgtacagcggagtggccgcagacctcatggggcgggattttactatattccgttccctcgggcagaggcccagcttacgcaccgagccgcacgactccaggtggctcaacgagcctaagtttgttaaagtgttctggatacctgagagtgagaatccagatgacgataaaatctacttctttttccgcgaaactgcagtcgaagctgcgcccgcactcggccgtttatccgtctctcgcgttggccaaatttgtaggaatgacgtgggcggtcagagatctcttgtgaataagtggactacatttctgaaagctaggcttgtgtgttctgtacctggcgtcgaaggcgacacacactttgatcagctccaggacgtttttctgctctcctctcgtgatcatcgtacacccttattgtacgcggtctttagtaccagtagctcgatcttccaggggagcgccgtgtgcgtgtattccatgaatgacgttcgcagggcctttctgggcccattcgcacacaaagagggcccaatgcaccagtgggtcagctaccagggtcgcgttccatatccgaggcaagcctgtgcccccgctagacccctggctccatctgttcccccgaggactagccaaacaatgtcctcaagcttgcgcggaactacccctagttgtacaactctgtcgtgccctctcggcggcgccttgttttcgtacaaactcgagcctatcacaccgtccctcaagctgcctagaaccggacttcaaccgttgactgatacaatgacctcctctagtcttgctcagaccctggctcgatgctag

SEQ ID NO: 108922 - DNA, 2247 bp, Artificial Sequence
  derived and/or modified sequence
atgggccgcgccggagccgccgccgttatccccgggctcgccttgctctgggcagtcggccttggatcagctgcccctcctccccggctgagactgagttttcaggagctccaggcgtggcatgggctgcaaaccttctctttggagcggacctgttgctatcaagctttacttgttgatgaagaacgcgggcgcctgttcgttggagcggaaaatcacgttgcctccctgaaccttgataatatatccaaaagggcaaagaaactcgcttggcccgctccagtagagtggcgagaggagtgcaactgggctggaaaggatattgggactgaatgtatgaacttcgtgaagctgctccacgcatacaataggacccacctgcttgcctgtggcacgggggcttttcacccaacatgcgcttttgtggaagtggggcatagagctgaggaaccagtgctgcgactagatccagggagaattgaggacggaaaaggaaaatcaccgtacgaccctagacatagagccgcctccgttctggtcggagaggaactgtatagtggggtagctgccgaccttatgggacgagatttcactatatttaggagtttggggcagaggccaagcttacgcactgagccccatgacagccgctggctgaacgaacctaaatttgtaaaagtgttttggatccctgaaagtgagaaccccgacgacgataagatttatttttttttcagagaaacagccgtggaggcggctcccgcactcgggcgactatcagtgtcccgcgtcggtcaaatatgcagaaacgatgtcggcgggcagaggtctctagtcaataagtggacaacattcttgaaagctcgcttagtttgttccgttccaggggtggagggcgacacacattttgatcaactgcaggacgtgtttctgttaagcagccgagaccacaggactcccttgttgtacgcagtgttttccacttccagctcaatcttccaaggatccgcagtctgcgtgtattccatgaacgacgttagaagagccttcctgggccctttcgcacataaggaaggtcccatgcaccaatgggtgtcttaccagggccgggtcccgtacccacggcccggaatgtgcccatcaaagacatttggaacctttagttcaaccaaagattttcccgacgacgtcattcagtttgcccggaatcaccccctaatgtataattctgtgctgccaacaggtggacgacccctgtttctccaagtgggagccaattacaccttcactcaaatcgctgcagatagggtggccgctgcggacgggcactacgatgtgctatttataggcacagatgtgggaacagtccttaaagttatttccgtacccaagggatctcggccttctgcagaagggttgctgttagaagagctccatgttttcgaagatagcgcggcggtaacctcgatgcagatatcctcaaaacgacatcaactgtatgtcgcaagtaggtcagctgtagctcagatcgccctgcatcgctgcgcagctcacggacgggtgtgcacggagtgctgtcttgcacgagacccctactgtgcttgggacggcgtggcatgcaccagatttcagccctctgccaagaggcgcttcagaagacaggacgttcggaatggcgatccatcgactctttgctctggcgacagttcacgccccgccctgttagaacacaaggtgttcggcgttgagggatcgtcagctttcttggaatgcgaacccagatctctgcaggcaagagttgagtggacatttcaacgcgctggcgtcactgcccacacacaggtactggctgaggaacggacggaacgcaccgccaggggcctcctgttacgaagactgcgccggagagactctggagtgtacctttgcgccgccgtggagcagggcttcacacaaccccttaggcgcctcagcctgcacgtgcttagcgccacccaagccgagagattggcccgggctgaagaggccgcccccgctgcccctcctggtcccaagctgtggtatagggattttcttcaactagtcgagcctggcgggggaggttctgcaaacagcttgagaatgtgccgaccccaaccagccttgcagtctttacccttggagtcccgcagaaaggggaggaatagacggacccacgctcctgaaccaagagccgaaagggggccaagatcagctacacattggtag

SEQ ID NO: 108923 - DNA, 1371 bp, Artificial Sequence
  derived and/or modified sequence
atgggcagagcgggagccgcggcagtgataccgggtctcgcactcttgtgggccgtaggattagggtcagccgcaccttctccccacctccggctatcctttcaagaactgcaagcttggcacgggctccagactttctccttggagcgaacttgctgttatcaggccctgctggtggatgaagaacggggcaggctgttcgtgggggccgaaaaccatgtcgcttctctcaaccttgacaatatttccaagagagccaaaaaacttgcctggccagcccctgtagagtggcgtgaggaatgcaattgggcaggaaaagacattggaacagagtgtatgaacttcgtcaaattactgcacgcctacaatcgtactcacctactggcttgtggcaccggcgcattccacccaacatgcgcctttgtggaggttggccacagagccgaggagcccgtcctccgtctggacccagggcgaattgaggatggcaaaggtaagtctccgtatgaccccaggcatcgggccgctagcgttcttgtgggggaagagctgtacagtggagtcgccgccgatctgatgggcagagatttcaccatttttcgtagcttagggcagagaccctctctaagaacagagccacacgactcccgctggcttaacgagccaaaatttgttaaagttttctggatacctgaaagcgagaaccccgatgacgacaaaatctactttttttttcgagaaacagccgtcgaggccgcccctgctctcggaagactctctgtgtctagagtagggcaaatctgtcgcaatgatgtaggagggcagcgaagtctagtcaataaatggacgacctttttaaaggctcgattggtctgttctgtccccggcgtggaaggcgatacacacttcgatcagctgcaggatgtattccttctctcatcaagggatcatagaactccactcctctacgccgtatttagcacctctagcagcatcttccagggcagcgccgtatgcgtctactccatgaacgatgtacgtcgggctttcctggggccgttcgcacacaaagaaggccccatgcaccagtgggtatcctatcagggccgtgtaccctatccccgtcaagcctgcgcacccgcccgtcctcttgccccttctgtaccacctcgaactagtcagactatgagtagctcactgcgcggtaccactccaagttgcactaccctttcttgtcccttaggcggggccctatttagctacaaactggaacccataaccccttccctgaaactgccacgtactggtctccagcccttaactgatacaatgacgagctcctccttggcccagacactggctcggtgttag

SEQ ID NO: 108924 - DNA, 2247 bp, Artificial Sequence
  derived and/or modified sequence
atgggcagagccggcgccgccgccgtgatccccggcctggccctgctgtgggccgtgggcctgggcagcgccgcccccccccccagactgagactgagcttccaggagctgcaggcctggcacggcctgcagaccttcagcctggagagaacctgctgctaccaggccctgctggtggacgaggagagaggcagactgttcgtgggcgccgagaaccacgtggccagcctgaacctggacaacatcagcaagagagccaagaagctggcctggcccgcccccgtggagtggagagaggagtgcaactgggccggcaaggacatcggcaccgagtgcatgaacttcgtgaagctgctgcacgcctacaacagaacccacctgctggcctgcggcaccggcgccttccaccccacctgcgccttcgtggaggtgggccacagagccgaggagcccgtgctgagactggaccccggcagaatcgaggacggcaagggcaagagcccctacgaccccagacacagagccgccagcgtgctggtgggcgaggagctgtacagcggcgtggccgccgacctgatgggcagagacttcaccatcttcagaagcctgggccagagacccagcctgagaaccgagccccacgacagcagatggctgaacgagcccaagttcgtgaaggtgttctggatccccgagagcgagaaccccgacgacgacaagatctacttcttcttcagagagaccgccgtggaggccgcccccgccctgggcagactgagcgtgagcagagtgggccagatctgcagaaacgacgtgggcggccagagaagcctggtgaacaagtggaccaccttcctgaaggccagactggtgtgcagcgtgcccggcgtggagggcgacacccacttcgaccagctgcaggacgtgttcctgctgagcagcagagaccacagaacccccctgctgtacgccgtgttcagcaccagcagcagcatcttccagggcagcgccgtgtgcgtgtacagcatgaacgacgtgagaagagccttcctgggccccttcgcccacaaggagggccccatgcaccagtgggtgagctaccagggcagagtgccctaccccagacccggcatgtgccccagcaagaccttcggcaccttcagcagcaccaaggacttccccgacgacgtgatccagttcgccagaaaccaccccctgatgtacaacagcgtgctgcccaccggcggcagacccctgttcctgcaggtgggcgccaactacaccttcacccagatcgccgccgacagagtggccgccgccgacggccactacgacgtgctgttcatcggcaccgacgtgggcaccgtgctgaaggtgatcagcgtgcccaagggcagcagacccagcgccgagggcctgctgctggaggagctgcacgtgttcgaggacagcgccgccgtgaccagcatgcagatcagcagcaagagacaccagctgtacgtggccagcagaagcgccgtggcccagatcgccctgcacagatgcgccgcccacggcagagtgtgcaccgagtgctgcctggccagagacccctactgcgcctgggacggcgtggcctgcaccagattccagcccagcgccaagagaagattcagaagacaggacgtgagaaacggcgaccccagcaccctgtgcagcggcgacagcagcagacccgccctgctggagcacaaggtgttcggcgtggagggcagcagcgccttcctggagtgcgagcccagaagcctgcaggccagagtggagtggaccttccagagagccggcgtgaccgcccacacccaggtgctggccgaggagagaaccgagagaaccgccagaggcctgctgctgagaagactgagaagaagagacagcggcgtgtacctgtgcgccgccgtggagcagggcttcacccagcccctgagaagactgagcctgcacgtgctgagcgccacccaggccgagagactggccagagccgaggaggccgcccccgccgccccccccggccccaagctgtggtacagagacttcctgcagctggtggagcccggcggcggcggcagcgccaacagcctgagaatgtgcagaccccagcccgccctgcagagcctgcccctggagagcagaagaaagggcagaaacagaagaacccacgcccccgagcccagagccgagagaggccccagaagcgccacccactggtag

SEQ ID NO: 108925 - DNA, 2922 bp, Artificial Sequence
  derived and/or modified sequence
gggcgggggctgcttcttaaaggagccgtcagagggtccccagcggccccagggtgggaaggggccagagtggagagatgctgctgcggaagtcctcggtggagtgtgagaaggcagccagtgttggcctggaagacctctagaacctgagaagaggcagcgatcctggggcagagtccagggcagctcaaggctcctccacacacacacccgctgaaccctgagcaccctgagctgctgagatggggcgggccggggctgccgccgtgatcccgggcctggccctgctctgggcagtggggctggggagtgccgccccccccccacgccttcggctctccttccaagagctccaggcctggcatggtctccagactttcagcctggagcgaacctgctgctaccaggccttgctggtggatgaggagcgtggacgcctgtttgtgggtgccgagaaccatgtggcctccctcaacctggacaacatcagcaagcgggccaagaagctggcctggccggcccctgtggaatggcgagaggagtgcaactgggcagggaaggacattggtactgagtgcatgaacttcgtgaagttgctgcatgcctacaaccgcacccatttgctggcctgtggcacgggagccttccacccaacctgtgcctttgtggaagtgggccaccgggcagaggagcccgtcctccggctggacccaggaaggatagaggatggcaaggggaagagtccttatgaccccaggcatcgggctgcctccgtgctggtgggggaggagctatactcaggggtggcagcagacctcatgggacgagactttaccatctttcgcagcctagggcaacgtccaagtctccgaacagagccacacgactcccgctggctcaatgagcccaagtttgtcaaggtattttggatcccggagagcgagaacccagacgacgacaaaatctacttcttctttcgtgagacggcggtagaggcggcgccggcactgggacgcctgtccgtgtcccgcgttggccagatctgccggaacgacgtgggcggccagcgcagcctggtcaacaagtggacgacgttcctgaaggcgcggctggtgtgctcggtgcccggcgtcgagggcgacacccacttcgatcagctccaggatgtgtttctgttgtcctcgcgggaccaccggaccccgctgctctatgccgtcttctccacgtccagcagcatcttccagggctctgcggtgtgcgtgtacagcatgaacgacgtgcgccgggccttcttgggaccctttgcacacaaggaggggcccatgcaccagtgggtgtcataccagggtcgcgtcccctacccgcggccaggcatgtgccccagcaagacctttggcaccttcagttccaccaaggacttcccagacgatgtcatccagtttgcgcggaaccaccccctcatgtacaactctgtcctgcccactggggggcgccctcttttcctacaagttggagccaattacaccttcactcaaattgccgcggaccgggttgcagccgctgacggacactatgacgtcctcttcattggcacagacgttggcacggtgctgaaggtgatctcggtccccaagggcagtaggcccagcgcagaggggctgctcctggaggagctgcacgtgtttgaggactcggccgctgtcaccagcatgcaaatttcttccaagaggcaccagctgtacgtagcctcgcggagcgcggtggcccagatcgcgttgcaccgctgcgctgcccacggccgcgtctgcaccgaatgctgtctggcgcgtgacccctactgcgcctgggacggggtcgcgtgcacgcgcttccagcccagtgccaagaggcggttccggcggcaagacgtaaggaatggcgaccccagcacgttgtgctccggagactcgtctcgtcccgcgctgctggaacacaaggtgttcggcgtggagggcagcagcgcctttctggagtgtgagccccgctcgctgcaggcgcgcgtggagtggactttccagcgcgcaggggtgacagcccacacccaggtgctggcagaggagcgcaccgagcgcaccgcccggggactactgctgcgcaggctgcggcgccgggactcgggcgtgtacttgtgcgccgccgtcgagcagggctttacgcaaccgctgcgtcgcctgtcgctgcacgtgttgagtgctacgcaggccgaacgactggcgcgggccgaggaggctgcgcccgccgcgccgccgggccccaaactctggtaccgggactttctgcagctggtggagccgggcggaggtggcagcgcgaactccctgcgcatgtgccgcccgcagcctgcgctgcagtcactgcccctggagtcgcggagaaagggccgtaaccggaggacccacgcccctgagcctcgcgctgagcgggggccgcgcagcgcaacgcactggtgaccagactgtccccacgccgggaaccaagcaggagacgacaggcgagagaggagccagacagaccctgaaaagaaggacgggttggggccgggcacattgggggtcaccggccgatggagacaccaaccgacaggccctggctgagggcagctgcgcgggcttatttattaacaggataacccttgaatgtagcagccccgggagggcggcacaggtcgggcgcaggattcagccggagggaagggacggggaagccgagctccagagcaacgaccagggccgaggaggtgcctggagtgcccaccctgggagacagaccccacctccttgggtagtgagcagtgagcagaaagctgtgaacaggctgggctgctggaggtggggcgaggcaggccgactgtactaaagtaacgcaataaacgcattatcagcc

SEQ ID NO: 108926 - DNA, 1371 bp, Artificial Sequence
  derived and/or modified sequence
atgggcagagccggcgccgccgccgtgatccccggcctggccctgctgtgggccgtgggcctgggcagcgccgcccccagcccccacctgagactgagcttccaggagctgcaggcctggcacggcctgcagaccttcagcctggagagaacctgctgctaccaggccctgctggtggacgaggagagaggcagactgttcgtgggcgccgagaaccacgtggccagcctgaacctggacaacatcagcaagagagccaagaagctggcctggcccgcccccgtggagtggagagaggagtgcaactgggccggcaaggacatcggcaccgagtgcatgaacttcgtgaagctgctgcacgcctacaacagaacccacctgctggcctgcggcaccggcgccttccaccccacctgcgccttcgtggaggtgggccacagagccgaggagcccgtgctgagactggaccccggcagaatcgaggacggcaagggcaagagcccctacgaccccagacacagagccgccagcgtgctggtgggcgaggagctgtacagcggcgtggccgccgacctgatgggcagagacttcaccatcttcagaagcctgggccagagacccagcctgagaaccgagccccacgacagcagatggctgaacgagcccaagttcgtgaaggtgttctggatccccgagagcgagaaccccgacgacgacaagatctacttcttcttcagagagaccgccgtggaggccgcccccgccctgggcagactgagcgtgagcagagtgggccagatctgcagaaacgacgtgggcggccagagaagcctggtgaacaagtggaccaccttcctgaaggccagactggtgtgcagcgtgcccggcgtggagggcgacacccacttcgaccagctgcaggacgtgttcctgctgagcagcagagaccacagaacccccctgctgtacgccgtgttcagcaccagcagcagcatcttccagggcagcgccgtgtgcgtgtacagcatgaacgacgtgagaagagccttcctgggccccttcgcccacaaggagggccccatgcaccagtgggtgagctaccagggcagagtgccctaccccagacaggcctgcgcccccgccagacccctggcccccagcgtgccccccagaaccagccagaccatgagcagcagcctgagaggcaccacccccagctgcaccaccctgagctgccccctgggcggcgccctgttcagctacaagctggagcccatcacccccagcctgaagctgcccagaaccggcctgcagcccctgaccgacaccatgaccagcagcagcctggcccagaccctggccagatgctag

SEQ ID NO: 108927 - DNA, 2247 bp, Artificial Sequence
  derived and/or modified sequence
atgggacgagccggcgccgccgccgtgataccagggctggcgctgctatgggccgtgggccttgggtctgctgccccacctcccagactgcgcctctctttccaagaattgcaagcctggcacggactacagaccttctccctggaacgcacctgctgctatcaagctcttttagtggatgaggaacgaggtcggctgttcgttggggccgagaatcacgttgcttccttgaacctggacaacatctcaaaaagggccaaaaagttggcatggcccgctccggtggagtggagggaggaatgcaactgggcaggcaaggacattgggacggaatgcatgaatttcgtgaagctgctccacgcgtataacagaacccatctgttggcttgcggtactggtgccttccacccaacctgcgcctttgtcgaagtgggtcatcgcgctgaggagcctgtattgcgtctggaccccggaagaatcgaggacggaaaaggaaagagtccgtatgacccacgccaccgggcagcctccgtgctggtaggggaagaactctattctggcgttgcagctgacctcatgggacgagattttactatcttccgatccctaggccagcggcctagtctgcgaacggaacctcacgactcccgctggttaaatgagcctaaattcgtgaaggttttttggatacctgaatcagagaatccagacgatgataagatttacttcttttttagggagaccgccgttgaagcggcccctgctctcggcaggcttagcgtgtctcgggtggggcaaatttgcagaaacgacgtgggcggacagagatcccttgttaacaagtggaccacatttctgaaagccagattggtctgttccgtgcctggagttgaaggtgacacacattttgaccaactccaagatgttttcctcctttcctccagggaccaccgaactcccctgctgtatgccgtgttttcaacctccagtagtatttttcaaggcagcgccgtgtgcgtctactccatgaatgacgttcgacgtgcctttttggggccattcgcccacaaggagggtccaatgcaccagtgggtgtcttaccaggggcgtgtaccctatccccgacccgggatgtgcccgtctaaaactttcgggacattctctagcacaaaggattttcccgacgacgtgatccagtttgcccggaaccaccccttgatgtacaacagtgtgctgcccactggcgggagacccctcttcctgcaggtgggagctaactacaccttcacccagatcgccgctgaccgtgtcgctgccgcggacgggcactatgatgtgctctttatcgggacggacgtgggtacagttctgaaggtaatttccgtcccaaaaggcagccgccctagcgccgaaggcctgctcttagaggagcttcacgtgtttgaggactctgctgcggttactagtatgcaaatctcatctaagcgtcatcagctttacgtggcctcccggtccgcagtggcacagatcgccctccatcgttgtgccgcgcacggccgagtgtgtaccgagtgttgcctggcacgggacccgtactgcgcctgggatggtgttgcatgcactaggttccaaccttctgcaaaacgaagatttcgacggcaggatgtccgcaatggtgatccgagtacactgtgctccggcgacagcagtagacctgctttattagaacacaaagtttttggagtagaaggttcatcggcctttctggaatgtgagcctcgctctctgcaggcccgcgtggagtggacatttcagagagccggcgtgaccgctcacactcaggtcctggcagaggagaggactgagcgaaccgctcgcggcttacttcttcgacgactgcgcaggcgtgattctggtgtctacctttgcgctgcggtggaacagggctttacacagccactgagacgactatccttacacgtcttatcagctacacaggccgaacggctagcccgcgccgaggaagcagccccagccgcccctccagggccaaagctctggtatagagacttcctccagctggtggaacctggtggcggcggctccgccaactccctaaggatgtgccgcccccagcccgcactgcaatccttgccacttgagagtcgaaggaaaggtagaaatcggcgcacccacgctcccgagcccagggccgagagaggaccgcgctcggccactcactggtag

SEQ ID NO: 108928 - DNA, 1371 bp, Artificial Sequence
  derived and/or modified sequence
atgggtagagcaggggccgccgcagtcatccccggacttgcgttactttgggccgtggggcttggtagcgcagcccctagtccccatctaaggctgtcctttcaggagctgcaggcctggcatgggctgcagaccttctctctagaaagaacatgctgttatcaggctctgctagttgatgaggaacgaggacgcctgttcgtgggcgccgagaaccacgtcgccagtctgaatttagataatattagtaaacgagcgaagaagttggcctggccagcaccagtcgagtggagagaagagtgcaactgggccgggaaagacattggaaccgagtgtatgaactttgttaaacttttgcacgcctacaatcgcacccacctcctcgcttgtgggactggagctttccatcccacatgcgcctttgtggaagtcgggcatagagcagaagaacccgttctgcgcctggaccccggaaggattgaagatggtaagggaaagtccccctacgatcctagacaccgcgcagccagcgtgctggttggagaagaactgtacagcggggtggcggctgacttgatgggccgagatttcacgatttttagatcactggggcagcgaccgagcctgcgaaccgaaccccatgattccagatggttaaacgagcctaagttcgtgaaagtgttctggatcccagaaagcgagaatcccgatgacgacaaaatttacttcttctttagggaaaccgccgtcgaggctgccccagcactcggccgcttatccgtgagtcgggtggggcagatctgtcgtaatgatgtagggggacaaaggtctctggtaaacaagtggaccactttccttaaggcacggctagtctgctcagttccaggtgtagagggtgacacacacttcgaccagctccaggacgtgtttctcctgagtagccgagaccatagaactcccctgctctacgctgtgttcagcacgtctagctccatcttccagggttcggccgtgtgcgtttattctatgaatgacgtccggagggcctttcttggcccctttgcccacaaagagggaccaatgcaccagtgggtgtcttaccagggccgggtcccctatcccagacaggcatgtgcacccgcgagaccactcgcaccatctgtaccccctcgaacatctcagaccatgtcttcttctctcagaggtaccaccccaagctgcaccactctcagctgccccctgggtggtgccctgttcagttataaactggagcctataaccccctctctgaagttaccacggacggggttgcagcccttgacagatacaatgacctcatccagcttagctcagactctggccagatgttag

SEQ ID NO: 108929 - DNA, 2247 bp, Artificial Sequence
  derived and/or modified sequence
atgggccgggccggggctgctgctgtgattcctggcctggccctgctgtgggccgtgggcctgggcagcgctgcccccccaccccggctgcggctgtccttccaggagctgcaggcctggcacggcctgcagaccttcagcctggagaggacctgctgctaccaggccctgctggtggatgaggagcggggccgcctgtttgtgggcgcagaaaatcatgtggccagcctgaacctggacaacatcagcaagagggccaagaagctggcctggccagcccctgtggagtggagggaggagtgcaactgggccggcaaggacatcggcacagagtgcatgaactttgtgaagctgctgcacgcctacaacagaacccacctgctggcctgtggcaccggggccttccaccccacctgtgcctttgtggaggtgggccacagagctgaggagcctgtgctgcggctggaccccggcagaattgaagatggcaagggcaagagcccctatgaccccaggcacagagctgcctctgtgctggtgggggaggagctgtacagcggcgtggccgctgacctgatgggccgggacttcaccatcttccgcagcctgggccagaggcccagcctgaggacagagccccatgacagccgctggctgaatgagcccaagtttgtgaaggtgttctggatccctgagagcgagaacccagatgatgacaagatctacttcttcttccgggagacagctgtggaggccgccccagccctgggccgcctgtctgtgtcccgggtgggccagatctgcagaaatgatgtgggcggccagaggagcctggtgaacaagtggaccaccttcctgaaggcccggctggtgtgcagcgtgcctggggtggagggggacacccactttgaccagctgcaggatgtgttcctgctgagcagccgggaccacaggacccccctgctgtatgctgtgttcagcaccagcagcagcatcttccagggcagcgctgtgtgtgtgtacagcatgaatgatgtgagaagagccttcctgggcccctttgcccacaaggagggccccatgcaccagtgggtgtcctaccagggccgggtgccctacccccggcccggcatgtgccccagcaagaccttcggcaccttcagcagcaccaaggacttcccagatgatgtgatccagtttgccaggaaccaccccctgatgtacaacagcgtgctgcccaccggcggccggcccctcttcctgcaggtgggcgccaactacaccttcacccagattgctgctgacagagtggccgctgctgatggccactatgatgtgctcttcatcggcacagatgtgggcaccgtgctgaaggtgatctctgtgcccaagggcagccggcccagcgctgagggcctgctgctggaggagctgcacgtgtttgaggacagcgctgctgtgacctccatgcagatcagcagcaagaggcaccagctgtatgtggccagccgctctgctgtggcccagatcgccctgcaccgctgtgccgcccacggccgggtgtgcacagagtgctgcctggcccgggacccctactgtgcctgggatggagtggcctgcacccgcttccagcccagcgccaagaggcgcttccggcggcaggatgtgagaaatggagaccccagcaccctgtgcagcggggacagcagcaggcctgccctgctggagcacaaggtgtttggagtggagggcagcagcgccttcctggagtgtgagcccaggagcctgcaggcccgggtggagtggaccttccagagagctggggtgacagcccacacccaggtgctggccgaggagaggacagagaggacagcccggggcctgctgctgcggcggctgcggcggcgggacagcggcgtgtacctgtgtgccgctgtggagcagggcttcacccagcccctgcggcggctgagcctgcacgtgctgagcgccacccaggccgagcggctggcccgggcagaggaggccgccccagctgcccctcctggccccaagctgtggtacagagacttcctgcagctggtggagcccggcggcggcggcagcgccaacagcctgaggatgtgccggccccagcctgccctgcagagcctgcccctggagagcagaagaaaaggaagaaacagaaggacccacgcccctgagcccagggctgagcggggccccaggtctgccacccactggtag

SEQ ID NO: 108930 - DNA, 1371 bp, Artificial Sequence
  derived and/or modified sequence
atgggccgggccggggctgctgctgtgattcctggcctggccctgctgtgggccgtgggcctgggcagcgctgcccccagcccccacctgcggctgtccttccaggagctgcaggcctggcacggcctgcagaccttcagcctggagaggacctgctgctaccaggccctgctggtggatgaggagcggggccgcctgtttgtgggcgcagaaaatcatgtggccagcctgaacctggacaacatcagcaagagggccaagaagctggcctggccagcccctgtggagtggagggaggagtgcaactgggccggcaaggacatcggcacagagtgcatgaactttgtgaagctgctgcacgcctacaacagaacccacctgctggcctgtggcaccggggccttccaccccacctgtgcctttgtggaggtgggccacagagctgaggagcctgtgctgcggctggaccccggcagaattgaagatggcaagggcaagagcccctatgaccccaggcacagagctgcctctgtgctggtgggggaggagctgtacagcggcgtggccgctgacctgatgggccgggacttcaccatcttccgcagcctgggccagaggcccagcctgaggacagagccccatgacagccgctggctgaatgagcccaagtttgtgaaggtgttctggatccctgagagcgagaacccagatgatgacaagatctacttcttcttccgggagacagctgtggaggccgccccagccctgggccgcctgtctgtgtcccgggtgggccagatctgcagaaatgatgtgggcggccagaggagcctggtgaacaagtggaccaccttcctgaaggcccggctggtgtgcagcgtgcctggggtggagggggacacccactttgaccagctgcaggatgtgttcctgctgagcagccgggaccacaggacccccctgctgtatgctgtgttcagcaccagcagcagcatcttccagggcagcgctgtgtgtgtgtacagcatgaatgatgtgagaagagccttcctgggcccctttgcccacaaggagggccccatgcaccagtgggtgtcctaccagggccgggtgccctacccccggcaggcctgtgccccagcccggcccctggcccccagcgtgccccccaggaccagccagaccatgagcagcagcctgcggggcaccacccccagctgcaccaccctgagctgccccctgggcggggccctcttctcctacaagctggagcccatcacccccagcctgaagctgcccaggacaggcctgcagcccctgacagacaccatgaccagcagcagcctggcccagaccctggcccgctgctag

SEQ ID NO: 108931 - DNA, 2247 bp, Artificial Sequence
  derived and/or modified sequence
atgggccgggccggcgccgccgccgtgatccccggcctggccctgctctgggctgttgggttgggcagcgcggctccacctccccgcctccggctctctttccaagaactgcaggcgtggcacggtctgcagaccttttccctggagcgcacctgttgctatcaggctctgttggtagacgaggaaagaggcaggctttttgtcggagctgaaaatcacgtggcatctctcaatttggacaatatttctaagcgcgcaaagaagctcgcttggcccgcccccgtggagtggcgcgaggagtgtaattgggccggaaaggatattggcaccgaatgcatgaacttcgttaaactactccatgcctataatcgaacccatttgctcgcctgtggcacaggagctttccacccaacctgtgccttcgtggaggttggtcaccgggccgaggagcccgtgctccgcctagatccaggtagaattgaggacggaaaaggcaagtccccctatgaccctcgccaccgcgcagcgagcgtcctggtcggggaggaactttactccggcgttgccgcagatctaatggggagggactttacaatcttccggtcgttgggacagagaccctctctccggaccgagccccacgactctcgctggctgaatgagcccaagtttgtaaaggtcttttggattccagaatccgagaatcctgatgatgataagatatacttcttctttcgggagacagctgtggaggcagcacctgccttgggccgactgagtgtcagccgcgttgggcaaatttgtcgcaatgatgtgggagggcagcgaagcctggtgaacaaatggacaaccttcctgaaagcaaggctggtctgcagcgtccccggggtggaaggcgatactcacttcgaccagcttcaggatgtgttcctgctttcctctcgagaccatcgcactcccctgctgtatgcggtgttctctacctctagttcaatttttcaaggatcggccgtctgtgtttactcaatgaatgacgtccgccgtgctttccttggcccatttgcacacaaagagggccctatgcaccagtgggtctcctatcagggccgtgtcccctaccctcggcccggcatgtgccccagtaagactttcggtacattcagttctaccaaggattttcctgacgacgtcattcagtttgctcggaatcacccactgatgtacaattcagtgcttcccaccggcggtcggcccctgttccttcaggtgggcgcgaattacacctttactcagatcgcagcagaccgggtcgccgccgcggatggccattatgatgtgctctttatcggaaccgacgtaggcactgtgctcaaagtaattagtgtgcctaaagggtccagacctagtgcagagggcctcctgcttgaggaactgcacgtattcgaggacagtgccgccgttacatcaatgcagatcagtagtaaacgccatcaactgtatgtcgctagtagatcggctgtagcccagattgctttgcaccggtgtgccgctcatgggcgggtctgtacagaatgttgtctggcccgagacccttactgtgcctgggacggtgtggcctgtactcggtttcagcctagtgctaaacgacgattcaggaggcaggatgttcggaatggagacccctccacgctgtgctcaggggatagctccagacccgccctgctggagcataaggtttttggggtcgagggaagctccgctttcctcgagtgcgagcccagatcgctgcaagccagggtagaatggactttccagcgggcaggggtcacagcccacacacaagtgctcgctgaggagcggacagagcgaacagccaggggcctccttctacgtcggctgcgcaggcgggatagcggtgtgtacctttgtgctgcggtggagcaaggtttcacccagccccttagaagactgtccctccacgtgctgagtgctacgcaggctgaaaggttggctcgcgcggaagaagccgctccagccgctcccccgggccccaaactctggtatcgagattttttacaactggtggagcccggagggggcgggtccgctaactcactccgcatgtgccgcccacagccagcattacaaagtctccctctggagtccaggaggaaaggccgcaatcggcggacccacgcccctgaacctagggctgagagggggccaaggagtgcaactcattggtag

SEQ ID NO: 108932 - DNA, 1371 bp, Artificial Sequence
  derived and/or modified sequence
atgggccgggccggcgccgccgccgtgatccccggcctggccctgctgtgggcggtgggcctgggatctgccgcacccagccctcatctcagactgagttttcaggagttgcaggcttggcacggcctgcagacattcagtctcgaacggacgtgttgttaccaggcgttattggtggacgaagagagaggtaggctgttcgtcggagcggagaaccatgtagcgagtctcaacctagataacatctccaagcgagctaagaaactggcctggccagcacctgttgagtggcgtgaggaatgtaattgggctgggaaagatatcggaaccgagtgcatgaacttcgttaagcttttgcatgcttacaatcgcacgcatctgctggcatgtggaacaggcgcgtttcaccccacctgtgccttcgtagaggtagggcatagagcagaagagcctgtgttaagactggacccaggtaggatcgaggatggtaagggcaagagtccctatgatcctagacaccgcgccgcttccgtcctggtgggggaagaactgtatagcggtgtagccgcagatcttatgggccgcgacttcacaatattcaggtctctagggcaacgcccatctctgagaaccgagcctcatgactcaagatggctgaatgaacctaaattcgtcaaagtgttctggatccccgagtccgaaaatcctgatgacgataagatctactttttctttagggagactgctgtggaggcagctcccgcattggggagattatccgtatctagagtagggcagatatgtaggaacgatgttggtgggcagcgatccctggtgaacaaatggactaccttcctgaaggccagactggtctgttccgttcctggcgtagagggtgatacccatttcgatcaacttcaggatgttttcttactctcatcccgcgatcaccgtactccattgctgtatgccgtattcagtacgagcagctcgatctttcaaggctctgcagtgtgcgtatactctatgaatgacgtccgccgggcatttttgggccctttcgcgcacaaggaaggacccatgcatcagtgggtgtcctaccaggggcgggtgccctacccacgtcaggcttgcgctccagctcggccgctggccccctccgtacctccacgtactagccagactatgtcgtctagccttagggggacaacaccttcttgcaccaccctgagctgtccattgggaggtgcactattctcctacaagcttgagccaattacaccgtccctgaaactgccgcggacgggactacagcccctgacagataccatgacaagctcgagcctggcccagaccttagcaaggtgctag

SEQ ID NO: 108933 - DNA, 2250 bp, Artificial Sequence
  derived and/or modified sequence
atgggcagagccggcgccgccgccgtgatccccggcctggccctgctgtgggccgtgggcctgggcagcgccgcccccagcccccccagactgagactgagcttccaggagctgcaggcctggcacggcctgcagaccttcagcctggagagaacctgctgctaccaggccctgctggtggacgaggagagaggcagactgttcgtgggcgccgagaaccacgtggccagcctgaacctggacaacatcagcaagagagccaagaagctggcctggcccgcccccgtggagtggagagaggagtgcaactgggccggcaaggacatcggcaccgagtgcatgaacttcgtgaagctgctgcacgcctacaacagaacccacctgctggcctgcggcaccggcgccttccaccccacctgcgccttcgtggaggtgggccacagagccgaggagcccgtgctgagactggaccccggcagaatcgaggacggcaagggcaagagcccctacgaccccagacacagagccgccagcgtgctggtgggcgaggagctgtacagcggcgtggccgccgacctgatgggcagagacttcaccatcttcagaagcctgggccagagacccagcctgagaaccgagccccacgacagcagatggctgaacgagcccaagttcgtgaaggtgttctggatccccgagagcgagaaccccgacgacgacaagatctacttcttcttcagagagaccgccgtggaggccgcccccgccctgggcagactgagcgtgagcagagtgggccagatctgcagaaacgacgtgggcggccagagaagcctggtgaacaagtggaccaccttcctgaaggccagactggtgtgcagcgtgcccggcgtggagggcgacacccacttcgaccagctgcaggacgtgttcctgctgagcagcagagaccacagaacccccctgctgtacgccgtgttcagcaccagcagcagcatcttccagggcagcgccgtgtgcgtgtacagcatgaacgacgtgagaagagccttcctgggccccttcgcccacaaggagggccccatgcaccagtgggtgagctaccagggcagagtgccctaccccagacccggcatgtgccccagcaagaccttcggcaccttcagcagcaccaaggacttccccgacgacgtgatccagttcgccagaaaccaccccctgatgtacaacagcgtgctgcccaccggcggcagacccctgttcctgcaggtgggcgccaactacaccttcacccagatcgccgccgacagagtggccgccgccgacggccactacgacgtgctgttcatcggcaccgacgtgggcaccgtgctgaaggtgatcagcgtgcccaagggcagcagacccagcgccgagggcctgctgctggaggagctgcacgtgttcgaggacagcgccgccgtgaccagcatgcagatcagcagcaagagacaccagctgtacgtggccagcagaagcgccgtggcccagatcgccctgcacagatgcgccgcccacggcagagtgtgcaccgagtgctgcctggccagagacccctactgcgcctgggacggcgtggcctgcaccagattccagcccagcgccaagagaagattcagaagacaggacgtgagaaacggcgaccccagcaccctgtgcagcggcgacagcagcagacccgccctgctggagcacaaggtgttcggcgtggagggcagcagcgccttcctggagtgcgagcccagaagcctgcaggccagagtggagtggaccttccagagagccggcgtgaccgcccacacccaggtgctggccgaggagagaaccgagagaaccgccagaggcctgctgctgagaagactgagaagaagagacagcggcgtgtacctgtgcgccgccgtggagcagggcttcacccagcccctgagaagactgagcctgcacgtgctgagcgccacccaggccgagagactggccagagccgaggaggccgcccccgccgccccccccggccccaagctgtggtacagagacttcctgcagctggtggagcccggcggcggcggcagcgccaacagcctgagaatgtgcagaccccagcccgccctgcagagcctgcccctggagagcagaagaaagggcagaaacagaagaacccacgcccccgagcccagagccgagagaggccccagaagcgccacccactggtag

SEQ ID NO: 108934 - DNA, 2250 bp, Artificial Sequence
  derived and/or modified sequence
atgggtagggccggggcagccgctgtaattccagggttggccctgctgtgggcagtagggcttggctctgcagccccatccccaccgcgtctgagacttagcttccaagagctgcaagcatggcacggattacagacattttccctggagcgcacgtgttgctaccaggctcttctggtggacgaggagaggggacgcttatttgtcggggccgagaaccacgtcgccagccttaacttagataatatctcaaaacgggccaaaaaactggcgtggccagcccccgtcgagtggcgggaagagtgcaattgggctggcaaggacattgggactgaatgcatgaacttcgtgaagctgcttcacgcctacaacagaacacacttgctcgcctgcggcaccggtgcttttcatcctacgtgcgctttcgtcgaagtaggacatagggcagaggagccagtccttcgactggacccaggccggatcgaggacggaaagggaaagtcaccctacgatcctcgccatagagcagcttcagtactggttggcgaggagctttacagcggtgtggcggcggacctgatgggacgcgattttaccattttcaggtctctgggacagcgccccagccttcggaccgaaccccatgattcccggtggttaaacgagcccaagttcgtgaaggttttctggatcccagaatccgaaaaccctgacgacgataagatttactttttttttagagaaaccgccgttgaggccgctcccgcattggggaggctgagtgtgtctcgtgttgggcaaatttgccgcaatgatgtgggcggacagaggagtctcgtcaacaagtggacgacatttctcaaggcacgactagtgtgttctgttccaggcgtcgaaggggatacccactttgatcagttgcaggatgtgtttctgctgtcctctcgggatcacaggacacccctgctgtacgccgtgttcagtacgtcatcttcgatcttccaaggtagcgcagtctgtgtttactccatgaatgatgtcagaagagctttcctaggaccttttgcccacaaggaaggccccatgcatcagtgggtttcttatcaggggagagtgccctacccccgcccggggatgtgtccctccaaaacatttggcaccttcagctccaccaaggatttcccagacgatgttatacagttcgctcggaaccacccgctaatgtataatagtgtgctgcccaccggcgggaggccgttattcctgcaggtcggggcaaactataccttcacacagattgctgcagatcgcgtggccgccgccgacggccactatgatgtgctttttatcggcactgatgtggggaccgtgctgaaggttattagcgtgcccaaaggatcacgcccctctgcagagggcctcttgctcgaggagctccacgtgttcgaggattctgcagccgttacttccatgcagatctcttcaaaaagacatcagctttacgtggcaagcagatcagccgtagcccagatcgcgctgcatagatgtgctgctcatggacgcgtctgcaccgaatgctgcctagcccgagatccctattgtgcatgggacggtgtggcatgcacacggttccaaccatcagcgaaacgcaggtttcggcgccaagacgttagaaacggtgatccaagtactctttgttccggggacagctcacggccagccttgttagagcacaaggtgttcggagtcgaagggtcttctgcgtttctggagtgtgagccccggagcctacaagcaagagtcgagtggaccttccagagagcaggagtgactgctcacacccaggtactggcggaggagaggacggagcgcacagcccgcgggctattactgcggaggctgcgccggcgagacagcggtgtctacctgtgtgcagctgtggaacaagggttcacgcagcctctcaggagactatccctccatgtcctgagtgccacccaagccgagaggctggcccgtgccgaagaagccgcccctgcagctccacccgggcccaaactatggtaccgcgattttcttcagttggtggagcccggcgggggcggaagtgccaacagccttcggatgtgccgtccgcagccagccctgcagtctctccccctcgagtcgcgtaggaaaggcaggaacaggagaacgcacgcgcccgaaccaagagcagagcgggggccccgatcagctactcactggtag

SEQ ID NO: 108935 - DNA, 2250 bp, Artificial Sequence
  derived and/or modified sequence
atgggccgggccggggctgctgctgtgattcctggcctggccctgctgtgggccgtgggcctgggcagcgctgcccccagccccccccggctgcggctgtccttccaggagctgcaggcctggcacggcctgcagaccttcagcctggagaggacctgctgctaccaggccctgctggtggatgaggagcggggccgcctgtttgtgggcgctgagaaccacgtggccagcctgaacctggacaacatcagcaagagggccaagaagctggcctggccagcccctgtggagtggagggaggagtgcaactgggccggcaaggacattggaacagagtgcatgaactttgtgaagctgctgcacgcctacaacagaacccacctgctggcctgtggcactggagccttccaccccacctgtgcctttgtggaggtgggccacagagctgaggagcctgtgctgcggctggaccccggcagaattgaagatggcaagggcaagagcccctatgaccccaggcaccgggccgcctctgtgctggtgggggaggagctgtacagcggcgtggccgctgacctgatgggccgggacttcaccatcttccgcagcctgggccagaggcccagcctgaggacagagccccatgacagccgctggctgaatgagcccaagtttgtgaaggtgttctggatccctgagagtgaaaatccagatgatgacaagatctacttcttcttccgggagacagctgtggaggccgccccagccctgggccgcctgtctgtgtcccgggtgggccagatctgcagaaatgatgtgggcggccagaggagcctggtgaacaagtggaccaccttcctgaaggcccggctggtgtgcagcgtgcctggggtggagggggacacccactttgaccagctgcaggatgtgttcctgctgagcagccgggaccacaggacccccctgctgtatgctgtgttcagcaccagcagcagcatcttccagggcagcgctgtgtgtgtgtacagcatgaatgatgtgcggcgggccttcctgggcccctttgcccacaaggagggccccatgcaccagtgggtgtcctaccagggccgggtgccctaccccaggcctggcatgtgccccagcaagaccttcggcaccttcagcagcaccaaggacttcccagatgatgtgatccagtttgccaggaaccaccccctgatgtacaacagcgtgctgcccactggaggccggcccctcttcctgcaggtgggcgccaactacaccttcacccagattgctgctgacagagtggccgctgctgatggccactatgatgtgctcttcatcggcacagatgtgggcaccgtgctgaaggtgatctctgtgcccaagggcagccggcccagcgctgagggcctgctgctggaggagctgcacgtgtttgaagattctgctgctgtgacctccatgcagatcagcagcaagaggcaccagctgtatgtggccagccgctctgctgtggcccagatcgccctgcaccgctgtgccgcccacggccgggtgtgcacagagtgctgcctggcccgggacccctactgtgcctgggatggagtggcctgcacccgcttccagcccagcgccaagaggcgcttccggcggcaggatgtgagaaatggagaccccagcaccctgtgcagcggggacagcagcaggcctgccctgctggagcacaaggtgtttggagtggagggcagcagcgccttcctggagtgtgagcccaggagcctgcaggcccgggtggagtggaccttccagagagctggggtgacagcccacacccaggtgctggccgaggagaggacagagaggacagcccggggcctgctgctgcggcggctgcggcggcgggacagcggcgtgtacctgtgtgccgctgtggagcagggcttcacccagcccctgcggcggctgagcctgcacgtgctgagcgccacccaggccgagcggctggcccgggcagaggaggccgccccagctgcccctcctggccccaagctgtggtacagagacttcctgcagctggtggagcccggcggcggcggcagcgccaacagcctgaggatgtgccggccccagcctgccctgcagagcctgcccctggagagcaggaggaagggcaggaacagaaggacccacgcccctgagcccagggctgagcggggccccaggtctgccacccactggtag

SEQ ID NO: 108936 - DNA, 2250 bp, Artificial Sequence
  derived and/or modified sequence
atgggccgggccggcgccgccgccgtgatccccggcctggccctgctttgggcagttggcctaggatcggcggcccccagccctcctagattgcgattatcctttcaggagctgcaagcatggcacgggctacaaacgttctccctagagaggacctgctgttatcaggcgctgctcgtagacgaggagcgcggccggctgttcgttggtgccgaaaatcacgttgccagcttaaacctggacaacatatccaaaagagccaagaagcttgcgtggccagctcctgtggagtggcgagaggaatgtaactgggccggcaaggatattgggacagagtgcatgaactttgttaaactcctgcacgcctacaatagaacccatttactcgcttgtggaacaggggccttccaccccacatgtgccttcgtggaggttggacacagagctgaagaacccgtgttgcgactggatccgggccggattgaagacggcaaaggcaaatccccgtatgatcccagacaccgggctgctagcgtgttagtgggcgaggagctgtattctggggtagccgcagacctaatgggcagagacttcactattttccgctccttgggacagcgcccatctctacgcacagagccccatgacagccggtggctcaacgagccgaaatttgtgaaagtcttctggattcccgagtccgaaaatccagacgacgacaagatatattttttttttagggagaccgccgtggaggcggcacctgctctcgggcgactctctgtgagcagggtggggcagatctgtagaaacgatgtgggcggacagcgatccctagtgaataaatggaccacgttcctcaaagcgagactagtttgttccgttccgggagtggaaggagacacacatttcgatcaactgcaggatgtgtttctgctgtcctctcgggatcatcggacaccattactctatgccgtcttttcaacctccagctccatctttcaaggctccgctgtatgtgtatactctatgaacgatgtccgtagggcatttctgggcccattcgctcataaagaagggcctatgcaccaatgggtttcataccagggacgagtgccttacccacggcccgggatgtgcccctccaagacctttggcaccttctcttccacaaaggacttccctgacgatgtgattcaattcgctcgtaatcaccccctcatgtacaactcagtgttgcctacgggaggacgacctttattcctgcaggtcggcgctaactatacattcacgcagatcgccgctgacagagttgcagcggcagatggccactacgacgttctgtttataggcacggacgtcgggaccgtcctgaaagttatttcggtccctaaaggcagtcgaccctcagcagagggactgctcttggaggagctgcacgtttttgaagactccgccgccgttacttccatgcaaatcagtagcaagcgacaccagctctatgtagcgtcccgttccgctgttgcccagatcgccctccacaggtgcgccgctcatggccgcgtgtgcaccgagtgttgtctagccagagacccctattgcgcctgggacggggtcgcgtgcacgcggttccaaccatctgcaaagagaaggtttaggaggcaagacgttcgaaatggcgaccccagtacactctgctcaggggactcgagccgtcccgctctgttagagcataaggtatttggcgtggagggctctagcgctttcctcgagtgcgagcccagaagcctccaagcaagggttgaatggacattccaacgtgccggcgtcactgctcacacacaggtgctggcagaagagaggaccgagcggaccgcacggggactattgctcagaagactacgccgccgcgattccggcgtgtacctgtgcgccgccgtggagcaggggtttacccagcctctccgccgcctgtctctgcacgtgctgagcgccacgcaggccgagcggcttgcccgggcagaggaggccgcaccagcagctccccccggtccaaagctctggtatagggattttctccagctggtggagcccggcggcggcgggagcgcaaactcgttgcggatgtgtcgccctcagcccgctctacagagcctgccattagaatccaggagaaaggggcgaaaccgccggacgcatgctcccgaacctcgcgcggagcgcggcccccgctctgccacccactggtag

SEQ ID NO: 108937 - DNA, 2250 bp, Artificial Sequence
  derived and/or modified sequence
atgggcagggctggtgcagcagctgtcattcccggtcttgcgctattgtgggctgtgggcctgggctccgctgctccttccccccctcgcctgagattgagtttccaggagctgcaagcctggcatggtctgcagacctttagcttggagagaacatgctgctaccaggcgttacttgtcgacgaggagcggggacgtctgtttgttggggcagaaaatcacgtagcctcactcaatctcgacaatatttccaaaagggcaaagaagcttgcttggcccgctcctgtggaatggcgagaagagtgtaactgggccggaaaggacatcggaactgagtgcatgaactttgtcaagcttttacacgcctataataggactcacctactcgcgtgcggcacgggcgcatttcatccaacttgtgcttttgttgaagttggccaccgcgctgaagagccagttttgcgcctagatccagggaggatagaggatggcaaggggaagagcccctacgatccaaggcatcgcgctgcaagcgtgctggtcggagaggaattgtattctggtgtggcagctgacttgatgggtcgggattttacgatttttagaagtttagggcagaggcctagcctgaggacggaacctcacgacagtagatggctgaatgagcccaaatttgtcaaggttttctggatccctgaatctgagaatcccgatgacgacaagatctatttcttcttccgggagaccgctgttgaggctgccccagcacttggacgcttgtcagtcagtcgagtggggcagatctgcagaaatgacgtgggcggacaacgatcattggtgaacaagtggactacatttttaaaggccagacttgtctgtagcgtgcccggagtggagggcgacacacacttcgatcaactgcaggatgtgtttttgctgtccagtagggaccatcgtacacctctgctgtacgcggtgttttcaacaagtagttcgatcttccagggctcagctgtgtgcgtatacagcatgaacgatgttaggagagccttcttgggcccttttgctcacaaagaaggtccaatgcatcagtgggtgtcctatcagggaagagtcccctacccgaggccaggcatgtgtccaagcaaaacttttggaacgttttccagcacaaaggattttcccgatgacgtgatccagttcgccagaaatcacccactgatgtataacagcgtgcttccaaccgggggacggcctctgtttctacaggtgggggcaaactacacttttacgcagattgctgctgatcgggtggcagctgcggatggccattacgacgtcctgttcattggcacggatgttggcaccgtgctcaaggtaatctcggtgcccaagggatcaaggccttctgcagaaggattgcttctggaagaactacacgtctttgaagattctgctgccgttacctcgatgcagatatcttctaaacggcaccaattgtatgtagctagtcggtcagctgtcgcacaaattgccctccatcgctgcgctgcacacgggagagtgtgcacggaatgttgcttagctcgtgatccatactgcgcgtgggatggcgtcgcctgcactaggttccagccttctgctaagcggaggtttagacgccaagacgtccggaacggcgatccatctactctgtgttctggcgattcgagtagaccagcactgttggagcacaaagttttcggcgtagagggcagctcagccttcttggaatgcgaacctagatccctccaggctagagtagagtggacattccagcgtgctggagtgacagcccatactcaggtgcttgccgaggagagaaccgagcgcaccgccaggggcctcttattgaggaggcttcgcagacgcgattccggggtgtacctgtgtgccgctgtggagcaaggcttcacccagccactgaggcgactgtctctgcacgttttgtccgctacacaggcagaaaggttagctcgggctgaggaggcggctccagctgctccacctggacctaaattgtggtacagggatttccttcagctggtggagccaggtggcggaggaagcgctaactcacttcgcatgtgccgcccacagcctgcactacagagcctaccactcgagtccagaaggaagggtcggaatagaaggactcacgccccagaacctagagctgaacgagggcctcgatctgccacacattggtag

SEQ ID NO: 108938 - DNA, 2919 bp, Artificial Sequence
  derived and/or modified sequence
tctgtgattgtggccaggcggggcaccctcggaggggagggttcggaagtggaatgcgaccccccagcctctttcccctaggggctgtaatctgatccctggggactccccccctagcctcccgccctcgccctcactgctgactcctcttccagatcctggggcagagtccagggcagctcaaggctcctccacacacacacccgctgaaccctgagcaccctgagctgctgagatggggcgggccggggctgccgccgtgatcccgggcctggccctgctctgggcagtggggctggggagtgccgcccccagccccccacgccttcggctctccttccaagagctccaggcctggcatggtctccagactttcagcctggagcgaacctgctgctaccaggccttgctggtggatgaggagcgtggacgcctgtttgtgggtgccgagaaccatgtggcctccctcaacctggacaacatcagcaagcgggccaagaagctggcctggccggcccctgtggaatggcgagaggagtgcaactgggcagggaaggacattggtactgagtgcatgaacttcgtgaagttgctgcatgcctacaaccgcacccatttgctggcctgtggcacgggagccttccacccaacctgtgcctttgtggaagtgggccaccgggcagaggagcccgtcctccggctggacccaggaaggatagaggatggcaaggggaagagtccttatgaccccaggcatcgggctgcctccgtgctggtgggggaggagctatactcaggggtggcagcagacctcatgggacgagactttaccatctttcgcagcctagggcaacgtccaagtctccgaacagagccacacgactcccgctggctcaatgagcccaagtttgtcaaggtattttggatcccggagagcgagaacccagacgacgacaaaatctacttcttctttcgtgagacggcggtagaggcggcgccggcactgggacgcctgtccgtgtcccgcgttggccagatctgccggaacgacgtgggcggccagcgcagcctggtcaacaagtggacgacgttcctgaaggcgcggctggtgtgctcggtgcccggcgtcgagggcgacacccacttcgatcagctccaggatgtgtttctgttgtcctcgcgggaccaccggaccccgctgctctatgccgtcttctccacgtccagcagcatcttccagggctctgcggtgtgcgtgtacagcatgaacgacgtgcgccgggccttcttgggaccctttgcacacaaggaggggcccatgcaccagtgggtgtcataccagggtcgcgtcccctacccgcggccaggcatgtgccccagcaagacctttggcaccttcagttccaccaaggacttcccagacgatgtcatccagtttgcgcggaaccaccccctcatgtacaactctgtcctgcccactggggggcgccctcttttcctacaagttggagccaattacaccttcactcaaattgccgcggaccgggttgcagccgctgacggacactatgacgtcctcttcattggcacagacgttggcacggtgctgaaggtgatctcggtccccaagggcagtaggcccagcgcagaggggctgctcctggaggagctgcacgtgtttgaggactcggccgctgtcaccagcatgcaaatttcttccaagaggcaccagctgtacgtagcctcgcggagcgcggtggcccagatcgcgttgcaccgctgcgctgcccacggccgcgtctgcaccgaatgctgtctggcgcgtgacccctactgcgcctgggacggggtcgcgtgcacgcgcttccagcccagtgccaagaggcggttccggcggcaagacgtaaggaatggcgaccccagcacgttgtgctccggagactcgtctcgtcccgcgctgctggaacacaaggtgttcggcgtggagggcagcagcgcctttctggagtgtgagccccgctcgctgcaggcgcgcgtggagtggactttccagcgcgcaggggtgacagcccacacccaggtgctggcagaggagcgcaccgagcgcaccgcccggggactactgctgcgcaggctgcggcgccgggactcgggcgtgtacttgtgcgccgccgtcgagcagggctttacgcaaccgctgcgtcgcctgtcgctgcacgtgttgagtgctacgcaggccgaacgactggcgcgggccgaggaggctgcgcccgccgcgccgccgggccccaaactctggtaccgggactttctgcagctggtggagccgggcggaggtggcagcgcgaactccctgcgcatgtgccgcccgcagcctgcgctgcagtcactgcccctggagtcgcggagaaagggccgtaaccggaggacccacgcccctgagcctcgcgctgagcgggggccgcgcagcgcaacgcactggtgaccagactgtccccacgccgggaaccaagcaggagacgacaggcgagagaggagccagacagaccctgaaaagaaggacgggttggggccgggcacattgggggtcaccggccgatggagacaccaaccgacaggccctggctgagggcagctgcgcgggcttatttattaacaggataacccttgaatgtagcagccccgggagggcggcacaggtcgggcgcaggattcagccggagggaagggacggggaagccgagctccagagcaacgaccagggccgaggaggtgcctggagtgcccaccctgggagacagaccccacctccttgggtagtgagcagtgagcagaaagctgtgaacaggctgggctgctggaggtggggcgaggcaggccgactgtactaaagtaacgcaataaacgcattatcagcca

SEQ ID NO: 108939 - RNA, 2247 nt, Artificial Sequence
  derived and/or modified sequence
augggacgggcuggcgcugcagccgucauaccuggccuggcucuccuaugggcgguggggcuggggucggccgccccuccuccgagguugcgccugucuuuucaagaacugcaagccuggcacgggcuacagacauucucuuuggagcguacuugcuguuaccaggcccugcuuguggaugaggagagggggcgcuuauuugugggcgcugaaaaccacgucgccagucugaaccuggacaauauuagcaagcgagccaaaaagcuggcauggccagcaccggucgaauggcgcgaagagugcaacugggcgggcaaagacauuggaacugagugcaugaacuucgucaaguugcuccacgccuacaacagaacacaccugcuugcgugcggaacgggugcuuuucaccccaccugcgccuuugucgaggugggacacagagccgaagaacccgugcugagguuggauccaggaaggaucgaggacgggaaaggaaaauccccauacgaccccagacacagagccgcgaguguucuagugggugaagagcuguauucggguguagcugccgauuuaaugggcagggacuucacaaucuucaggucacuagggcaacggccuucuuugcgaacugagccucaugauaguagguggcucaacgagccuaaguucguuaaaguguucuggauuccugagucugagaauccagaugacgacaagaucuauuuuuuuuucagagagacugcaguggaagcugcuccagcgcugggcaggcugucuguuagucgugucggccaaauuugcagaaaugauguagguggacaaaggucccuggugaacaaguggacaacauuccucaaagcacggcucguguguucaguacccgguguggaaggagacacgcauuuugaucagcuucaggacguuuucuugcuguccagcagggaccaccgcacaccccucuuauacgcaguuuuuucgaccucuuccucgauuuuccaagggucagccgucugcguguacucuaugaaugacgugcgccgagccuuucuggggccuuuugcucauaaagaaggucccaugcaccagugggucuccuaccagggaagggugccauauccacgcccugggaugugcccuucuaagaccuucggcacauucucauccaccaaggacuucccagaugacguuauucaauuugcuagaaaucacccucucauguacaauagcguuuugccuaccggcgggcggccucucuuuuugcaggugggcgcaaauuauacuuuuacgcaaaucgcagcagaucguguagcagcugccgacggucauuaugacgugcuguuuaucggaacugaugucggcaccguuuugaaggugauuagcgucccuaaaggcagucggccaucugccgagggacuccuguuagaagaauugcacguuuucgaagauuccgcagcugugaccucuaugcaaauuucuucuaaaagacaucagcuguacgucgcaaguaggucagcuguagcucagaucgcccugcaucgcugcgcagcucacggacgggugugcacggagugcugucuugcacgagaccccuacugugcuugggacggcguggcaugcaccagauuucagcccucugccaagaggcgcuucagaagacaggacguucggaauggcgauccaucgacucuuugcucuggcgacaguucacgccccgcccuguuagaacacaagguguucggcguugagggaucgucagcuuucuuggaaugcgaacccagaucucugcaggcaagaguugaauggaccuuccagcgggcgggugucaccgcacauacucagguguuggccgaggaaaggacagagagaacagcccggggccugcuguugcgaaggcugcgacgaagagauuccggaguauacuugugugccgcuguggagcaaggauucacccaaccccugcggcgauuaagccuucacgugcucucagccacucaagccgaacgucucgcccgagccgaagaagccgccccugccgcgcccccggguccaaagcugugguaccgagauuuccuccaguuaguggagcccgggggcggggggucagccaauagcuuacgcaugugccguccucaaccagccuugcagagccuuccacuagagagccgacgcaagggccgcaauagaagaacccacgccccagaaccaagggcagagagagggccucgcuccgcaacccacugguag

SEQ ID NO: 108940 - RNA, 1371 nt, Artificial Sequence
  derived and/or modified sequence
augggcagggcaggcgcagccgcuguaaucccuggucuugcacugcugugggccgugggucuuggcucagcagcaccauccccgcaucuuagguugucauuucaggaacugcaggccuggcacggucuccagaccuuuucucuggaaaggacuugcugcuaccaggcacuguugguugacgaggagaggggccgacuauuugugggugcggaaaaccauguagcuagccugaaccucgacaacauuucgaaacgcgcaaagaagcucgccuggcccgccccaguggaguggagggaggaaugcaacugggccgguaaggauauagguacagaaugcaugaauuucgugaagcugcugcacgccuauaaucggacgcacuugcuggcaugcgggacaggcgccuuucacccaaccugugcauucguggaggugggccaucgagcugaggagccuguguuaagacucgaucccgggagaauugaggauggcaaaggaaaaagucccuacgaccccaggcaccgggcugccagcguucuggucggcgaagaacuguacagcggaguggccgcagaccucauggggcgggauuuuacuauauuccguucccucgggcagaggcccagcuuacgcaccgagccgcacgacuccagguggcucaacgagccuaaguuuguuaaaguguucuggauaccugagagugagaauccagaugacgauaaaaucuacuucuuuuuccgcgaaacugcagucgaagcugcgcccgcacucggccguuuauccgucucucgcguuggccaaauuuguaggaaugacgugggcggucagagaucucuugugaauaaguggacuacauuucugaaagcuaggcuuguguguucuguaccuggcgucgaaggcgacacacacuuugaucagcuccaggacguuuuucugcucuccucucgugaucaucguacacccuuauuguacgcggucuuuaguaccaguagcucgaucuuccaggggagcgccgugugcguguauuccaugaaugacguucgcagggccuuucugggcccauucgcacacaaagagggcccaaugcaccagugggucagcuaccagggucgcguuccauauccgaggcaagccugugcccccgcuagaccccuggcuccaucuguucccccgaggacuagccaaacaauguccucaagcuugcgcggaacuaccccuaguuguacaacucugucgugcccucucggcggcgccuuguuuucguacaaacucgagccuaucacaccgucccucaagcugccuagaaccggacuucaaccguugacugauacaaugaccuccucuagucuugcucagacccuggcucgaugcuag

SEQ ID NO: 108941 - RNA, 2247 nt, Artificial Sequence
  derived and/or modified sequence
augggccgcgccggagccgccgccguuauccccgggcucgccuugcucugggcagucggccuuggaucagcugccccuccuccccggcugagacugaguuuucaggagcuccaggcguggcaugggcugcaaaccuucucuuuggagcggaccuguugcuaucaagcuuuacuuguugaugaagaacgcgggcgccuguucguuggagcggaaaaucacguugccucccugaaccuugauaauauauccaaaagggcaaagaaacucgcuuggcccgcuccaguagaguggcgagaggagugcaacugggcuggaaaggauauugggacugaauguaugaacuucgugaagcugcuccacgcauacaauaggacccaccugcuugccuguggcacgggggcuuuucacccaacaugcgcuuuuguggaaguggggcauagagcugaggaaccagugcugcgacuagauccagggagaauugaggacggaaaaggaaaaucaccguacgacccuagacauagagccgccuccguucuggucggagaggaacuguauagugggguagcugccgaccuuaugggacgagauuucacuauauuuaggaguuuggggcagaggccaagcuuacgcacugagccccaugacagccgcuggcugaacgaaccuaaauuuguaaaaguguuuuggaucccugaaagugagaaccccgacgacgauaagauuuauuuuuuuuucagagaaacagccguggaggcggcucccgcacucgggcgacuaucagugucccgcgucggucaaauaugcagaaacgaugucggcgggcagaggucucuagucaauaaguggacaacauucuugaaagcucgcuuaguuuguuccguuccagggguggagggcgacacacauuuugaucaacugcaggacguguuucuguuaagcagccgagaccacaggacucccuuguuguacgcaguguuuuccacuuccagcucaaucuuccaaggauccgcagucugcguguauuccaugaacgacguuagaagagccuuccugggcccuuucgcacauaaggaaggucccaugcaccaaugggugucuuaccagggccgggucccguacccacggcccggaaugugcccaucaaagacauuuggaaccuuuaguucaaccaaagauuuucccgacgacgucauucaguuugcccggaaucacccccuaauguauaauucugugcugccaacagguggacgaccccuguuucuccaagugggagccaauuacaccuucacucaaaucgcugcagauaggguggccgcugcggacgggcacuacgaugugcuauuuauaggcacagaugugggaacaguccuuaaaguuauuuccguacccaagggaucucggccuucugcagaaggguugcuguuagaagagcuccauguuuucgaagauagcgcggcgguaaccucgaugcagauauccucaaaacgacaucaacuguaugucgcaaguaggucagcuguagcucagaucgcccugcaucgcugcgcagcucacggacgggugugcacggagugcugucuugcacgagaccccuacugugcuugggacggcguggcaugcaccagauuucagcccucugccaagaggcgcuucagaagacaggacguucggaauggcgauccaucgacucuuugcucuggcgacaguucacgccccgcccuguuagaacacaagguguucggcguugagggaucgucagcuuucuuggaaugcgaacccagaucucugcaggcaagaguugaguggacauuucaacgcgcuggcgucacugcccacacacagguacuggcugaggaacggacggaacgcaccgccaggggccuccuguuacgaagacugcgccggagagacucuggaguguaccuuugcgccgccguggagcagggcuucacacaaccccuuaggcgccucagccugcacgugcuuagcgccacccaagccgagagauuggcccgggcugaagaggccgcccccgcugccccuccuggucccaagcugugguauagggauuuucuucaacuagucgagccuggcgggggagguucugcaaacagcuugagaaugugccgaccccaaccagccuugcagucuuuacccuuggagucccgcagaaaggggaggaauagacggacccacgcuccugaaccaagagccgaaagggggccaagaucagcuacacauugguag

SEQ ID NO: 108942 - RNA, 1371 nt, Artificial Sequence
  derived and/or modified sequence
augggcagagcgggagccgcggcagugauaccgggucucgcacucuugugggccguaggauuagggucagccgcaccuucuccccaccuccggcuauccuuucaagaacugcaagcuuggcacgggcuccagacuuucuccuuggagcgaacuugcuguuaucaggcccugcugguggaugaagaacggggcaggcuguucgugggggccgaaaaccaugucgcuucucucaaccuugacaauauuuccaagagagccaaaaaacuugccuggccagccccuguagaguggcgugaggaaugcaauugggcaggaaaagacauuggaacagaguguaugaacuucgucaaauuacugcacgccuacaaucguacucaccuacuggcuuguggcaccggcgcauuccacccaacaugcgccuuuguggagguuggccacagagccgaggagcccguccuccgucuggacccagggcgaauugaggauggcaaagguaagucuccguaugaccccaggcaucgggccgcuagcguucuugugggggaagagcuguacaguggagucgccgccgaucugaugggcagagauuucaccauuuuucguagcuuagggcagagacccucucuaagaacagagccacacgacucccgcuggcuuaacgagccaaaauuuguuaaaguuuucuggauaccugaaagcgagaaccccgaugacgacaaaaucuacuuuuuuuuucgagaaacagccgucgaggccgccccugcucucggaagacucucugugucuagaguagggcaaaucugucgcaaugauguaggagggcagcgaagucuagucaauaaauggacgaccuuuuuaaaggcucgauuggucuguucuguccccggcguggaaggcgauacacacuucgaucagcugcaggauguauuccuucucucaucaagggaucauagaacuccacuccucuacgccguauuuagcaccucuagcagcaucuuccagggcagcgccguaugcgucuacuccaugaacgauguacgucgggcuuuccuggggccguucgcacacaaagaaggccccaugcaccaguggguauccuaucagggccguguacccuauccccgucaagccugcgcacccgcccguccucuugccccuucuguaccaccucgaacuagucagacuaugaguagcucacugcgcgguaccacuccaaguugcacuacccuuucuugucccuuaggcggggcccuauuuagcuacaaacuggaacccauaaccccuucccugaaacugccacguacuggucuccagcccuuaacugauacaaugacgagcuccuccuuggcccagacacuggcucgguguuag

SEQ ID NO: 108943 - protein, 888 aa, Artificial Sequence
  derived and/or modified sequence
MEGDDCEFRYGDGTNEAQDNDFPTVERSRLQEMLSLLGLETYQVQKLSLQDSLQISFDSMKNWAPQVPKDLPWNFLRKLQALNADARNTTMVLDVLPDARPVEKESQMEEEIIYWDPADDLAADIYSFSELPTPDTPVNPLDLLCALLLSSDSFLQQEIALKMALCQFALPLVLPDSENHYHTFLLWAMRGIVRTWWSQPPRGMGSFREDSVVLSRAPAFAFVRMDVSSNSKSQLLNAVLSPGHRQWDCFWHRDLNLGTNAREISDGLVEISWFFPSGREDLDIFPEPVAFLNLRGDIGSHWLQFKLLTEISSAVFILTDNISKKEYKLLYSMKESTTKYYFILSPYRGKRNTNLRFLNKLIPVLKIDHSHVLVKVSSTDSDSFVKRIRAIVGNVLRAPCRRVSVEDMAHAARKLGLKVDEDCEECQKAKDRMERITRKIKDSDAYRRDELRLQGDPWRKAAQVEKEFCQLQWAVDPPEKHRAELRRRLLELRMQQNGHDPSSGVQEFISGISSPSLSEKQYFLRWMEWGLARVAQPRLRQPPETLLTLRPKHGGTTDVGEPLWPEPLGVEHFLREMGQFYEAESCLVEAGRLPAGQRRFAHFPGLASELLLTGLPLELIDGSTLSMPVRWVTGLLKELHVRLERRSRLVVLSTVGVPGTGKSTLLNTMFGLRFATGKSCGPRGAFMQLITVAEGFSQDLGCDHILVIDSGGLIGGALTSAGDRFELEASLATLLMGLSNVTVISLAETKDIPAAILHAFLRLEKTGHMPNYQFVYQNLHDVSVPGPRPRDKRQLLDPPGDLSRAAAQMEKQGDGFRALAGLAFCDPEKQHIWHIPGLWHGAPPMAAVSLAYSEAIFELKRCLLENIRNGLSNQNKNIQQLIELVRRL

SEQ ID NO: 108944 - DNA, 2667 bp, Artificial Sequence
  derived and/or modified sequence
atggagggagatgattgcgagttccgctacggggacggtaccaacgaagcccaggacaacgactttcccacagtggagaggagccggctccaggaaatgctgtcgctgctaggcctggaaacataccaggttcagaaactgtccctgcaggatagtcttcagattagctttgattctatgaagaattgggcgccacaggttccaaaagatcttccatggaatttcctacgcaagctgcaagctctgaacgccgacgcccgtaacaccactatggtcctggacgtgctgcccgatgccagaccagttgagaaggagtctcagatggaagaggaaataatctattgggatcccgcagatgaccttgcagcagacatttatagttttagcgaactcccaacccccgatacccctgtcaaccctctggacctgctctgtgcactgttgctttcgtctgatagtttccttcaacaggagattgcgctgaagatggccctttgtcagttcgccctgcctctggtgctgcctgatagcgaaaatcactaccatacttttttactttgggcaatgagagggattgtccgcacatggtggtcccagcccccacgcggtatgggatcctttcgggaggactctgtagttctgagtcgagccccagcctttgcctttgtgcggatggacgtaagctccaactcgaagtctcagttattgaacgccgtactcagccccggtcaccggcagtgggactgcttttggcatcgcgatctgaatttaggtactaatgctcgagagatctccgacgggttggtggaaatttcatggtttttcccctcaggtagggaagacctggatatcttcccagagcctgttgcgtttttaaacctacgcggtgatatcggctcgcactggctccagtttaaactcctcaccgagattagctccgctgtctttatcctgacagacaacatctctaagaaagaatacaagcttttatacagcatgaaagaaagcactacaaagtactacttcattctcagtccataccgcggaaagcgtaacaccaacttgaggtttctgaacaagctcattcccgttctgaagattgaccacagccacgtactggttaaggtctcctcaacagactccgattccttcgttaagaggataagggcaattgtgggaaacgtgctgagggcaccctgtagacgagtcagtgtggaagatatggcccatgctgctaggaagctggggctgaaagttgacgaagattgcgaggaatgtcaaaaagcaaaagatagaatggagcgcatcactcgcaaaatcaaggacagtgacgcctacagaagggatgagctacgcctgcaaggggatccttggagaaaggccgctcaagtggaaaaagaattttgtcagctgcagtgggcagtcgatcctcctgagaagcacagggctgagttgagacgccgactgctggagctgagaatgcagcaaaacgggcacgatccatcaagcggggtacaggagtttatcagcggaatttcatcaccctcactgtcagaaaaacaatactttctgcgatggatggagtggggacttgctagggttgcacagcctcggctacgccagcccccagaaaccctcctcacactgagacccaaacatggtggcacaaccgacgtcggtgagcccttatggcctgaacctctgggggtggagcatttcctccgggagatgggtcaattttatgaggctgaaagttgcctcgtggaggccggacggctccctgccggacagcgtcgattcgcacacttcccgggtctggcgagtgagttattgctaacaggattaccacttgagctgattgatggctcaactctgtcaatgcctgttcgctgggtcacgggcctcctcaaggagctccatgtgcggctggagcgacgctcacggttggtggtgctgtccaccgttggggtgcccggaaccggtaaatctaccttgctgaatacaatgttcggcctccggttcgcgactggcaaatcatgcgggccacggggagcttttatgcagctgatcaccgtcgcagagggattttctcaggatctgggctgcgatcatatcctggtgatagacagcggcggactaattggcggagccctcacttcagcaggggatagattcgaactagaggcctcattggcaacacttctgatgggtctctccaacgtcaccgtcatctcccttgccgagacgaaagatattcccgctgccatcctgcacgcgtttctgcgcctggagaagaccggccacatgccaaattatcagttcgtgtatcagaatctgcacgacgtttcagttcccggtccacgaccacgggataagcgccaattactcgatccacccggtgatctgagcagagcggcagcccaaatggagaaacaaggcgacggcttcagagctctggctggactggccttctgcgatccagagaaacagcatatttggcacatcccaggtctctggcacggcgcacctcccatggccgcagtaagcttggcctactctgaggctatattcgaacttaagcggtgcctgttggaaaacatccgtaatggactgtctaatcagaacaaaaatatacaacagctgatagagctggttagaagactgtag

SEQ ID NO: 108945 - DNA, 2667 bp, Artificial Sequence
  derived and/or modified sequence
atggagggcgacgactgcgagttcagatacggcgacggcaccaacgaggcccaggacaacgacttccccaccgtggagagaagcagactgcaggagatgctgagcctgctgggcctggagacctaccaggtgcagaagctgagcctgcaggacagcctgcagatcagcttcgacagcatgaagaactgggccccccaggtgcccaaggacctgccctggaacttcctgagaaagctgcaggccctgaacgccgacgccagaaacaccaccatggtgctggacgtgctgcccgacgccagacccgtggagaaggagagccagatggaggaggagatcatctactgggaccccgccgacgacctggccgccgacatctacagcttcagcgagctgcccacccccgacacccccgtgaaccccctggacctgctgtgcgccctgctgctgagcagcgacagcttcctgcagcaggagatcgccctgaagatggccctgtgccagttcgccctgcccctggtgctgcccgacagcgagaaccactaccacaccttcctgctgtgggccatgagaggcatcgtgagaacctggtggagccagccccccagaggcatgggcagcttcagagaggacagcgtggtgctgagcagagcccccgccttcgccttcgtgagaatggacgtgagcagcaacagcaagagccagctgctgaacgccgtgctgagccccggccacagacagtgggactgcttctggcacagagacctgaacctgggcaccaacgccagagagatcagcgacggcctggtggagatcagctggttcttccccagcggcagagaggacctggacatcttccccgagcccgtggccttcctgaacctgagaggcgacatcggcagccactggctgcagttcaagctgctgaccgagatcagcagcgccgtgttcatcctgaccgacaacatcagcaagaaggagtacaagctgctgtacagcatgaaggagagcaccaccaagtactacttcatcctgagcccctacagaggcaagagaaacaccaacctgagattcctgaacaagctgatccccgtgctgaagatcgaccacagccacgtgctggtgaaggtgagcagcaccgacagcgacagcttcgtgaagagaatcagagccatcgtgggcaacgtgctgagagccccctgcagaagagtgagcgtggaggacatggcccacgccgccagaaagctgggcctgaaggtggacgaggactgcgaggagtgccagaaggccaaggacagaatggagagaatcaccagaaagatcaaggacagcgacgcctacagaagagacgagctgagactgcagggcgacccctggagaaaggccgcccaggtggagaaggagttctgccagctgcagtgggccgtggacccccccgagaagcacagagccgagctgagaagaagactgctggagctgagaatgcagcagaacggccacgaccccagcagcggcgtgcaggagttcatcagcggcatcagcagccccagcctgagcgagaagcagtacttcctgagatggatggagtggggcctggccagagtggcccagcccagactgagacagccccccgagaccctgctgaccctgagacccaagcacggcggcaccaccgacgtgggcgagcccctgtggcccgagcccctgggcgtggagcacttcctgagagagatgggccagttctacgaggccgagagctgcctggtggaggccggcagactgcccgccggccagagaagattcgcccacttccccggcctggccagcgagctgctgctgaccggcctgcccctggagctgatcgacggcagcaccctgagcatgcccgtgagatgggtgaccggcctgctgaaggagctgcacgtgagactggagagaagaagcagactggtggtgctgagcaccgtgggcgtgcccggcaccggcaagagcaccctgctgaacaccatgttcggcctgagattcgccaccggcaagagctgcggccccagaggcgccttcatgcagctgatcaccgtggccgagggcttcagccaggacctgggctgcgaccacatcctggtgatcgacagcggcggcctgatcggcggcgccctgaccagcgccggcgacagattcgagctggaggccagcctggccaccctgctgatgggcctgagcaacgtgaccgtgatcagcctggccgagaccaaggacatccccgccgccatcctgcacgccttcctgagactggagaagaccggccacatgcccaactaccagttcgtgtaccagaacctgcacgacgtgagcgtgcccggccccagacccagagacaagagacagctgctggacccccccggcgacctgagcagagccgccgcccagatggagaagcagggcgacggcttcagagccctggccggcctggccttctgcgaccccgagaagcagcacatctggcacatccccggcctgtggcacggcgccccccccatggccgccgtgagcctggcctacagcgaggccatcttcgagctgaagagatgcctgctggagaacatcagaaacggcctgagcaaccagaacaagaacatccagcagctgatcgagctggtgagaagactgtag

SEQ ID NO: 108946 - DNA, 2667 bp, Artificial Sequence
  derived and/or modified sequence
atggaaggggatgattgcgagtttagatatggggatggcacaaacgaggcccaggataacgatttccccactgtggagaggtcccgcttgcaggagatgctgagtctgcttggcctggagacatatcaagttcagaaacttagccttcaggacagcttacagatatcctttgactccatgaaaaactgggccccacaggtgccaaaagaccttccctggaactttcttcgaaagctccaagctctcaatgccgatgcgaggaacactactatggtactcgatgtgctcccagacgcacggccagttgagaaggaaagccagatggaagaagaaattatctattgggatccagccgacgatctggcggcggacatttatagcttttcggagctgcccacacccgacacgccagttaacccactggacctgttgtgtgccttactgctatcttcagactcctttttgcagcaagagatagccctcaaaatggctttatgccagttcgcactgcccctcgtgctgcccgatagtgagaaccattatcatacctttttgctgtgggccatgagaggcatagttcgcacctggtggtcccagcctcctcgcggaatgggtagctttcgagaagatagtgtggtactttcaagagctcccgcattcgcattcgtgcggatggacgtttctagcaatagcaagagccaattgctgaacgccgtcctctcgcctggccaccgacagtgggactgcttctggcaccgagatttgaatttaggcacaaacgcccgggagatttcagatggcctggtcgaaattagctggttctttccctctgggagagaagacctggatatttttcctgaacccgtggccttcctaaaccttcggggagatatcggcagtcactggcttcagttcaagctgttgaccgaaatcagttctgccgtttttattctgactgataatatttccaagaaggagtacaaactactgtactcgatgaaggagagcactactaagtactatttcatactctccccataccgaggcaaaaggaacacaaacctcagatttctgaacaagctgattcccgtactcaagattgatcattcccacgtgctggtcaaagtctcatcgacagattctgacagttttgtgaagagaattcgcgcaatagtcggtaatgtgctccgcgctccgtgtcgacgtgtttctgtcgaggatatggcacacgccgcccgaaaactgggcctcaaggtagatgaggactgtgaggagtgtcagaaagccaaggatcgcatggagcggataacgcgtaaaattaaggacagcgatgcatatcgacgcgacgaactgcgtctgcagggagatccttggaggaaagcggcccaagtggagaaggaattttgccaactccagtgggctgtggaccctccagagaagcatcgtgcagagctgcggaggaggctgttagagctgaggatgcaacagaacggtcatgacccctccagcggcgtacaggagtttattagcggcataagcagcccgtctctgtctgaaaagcagtatttcctgcgatggatggagtggggactggcccgggtggcccagccgagactcaggcaaccccccgagacccttctgacccttcgtcccaagcacggtggcacaactgacgttggcgaacctctctggccagagccattgggggtagaacattttctacgagaaatgggccagttctacgaggccgaaagctgcctcgttgaagccggacgcctgccagccggccagaggcgtttcgcccactttcctggtctagccagtgagctgctccttaccggcttgcccctggagttgattgatggcagtacgcttagtatgcctgtgcgctgggtgacggggttgctgaaagagctgcatgtccgtctggagaggcgcagcagactcgtggtgcttagcaccgtaggtgtgccagggacaggcaagagcaccttgctgaataccatgtttggcctgcgttttgcaaccggtaagagctgtggaccccgcggcgcctttatgcagctgatcaccgtggccgagggattctcccaggacctgggatgtgatcacatcttagtgatcgacagcgggggactgatcggcggcgcccttaccagcgccggagatagattcgaattggaggcatccctagcgactttactgatgggactctctaacgtgaccgtgatctctctggccgagacgaaggacattccagccgctatattgcatgcctttctacggctggagaaaactggacacatgcctaattatcagtttgtctaccagaacctccatgatgtgagcgtgcccggcccacgaccacgcgataagcgccagctgctcgatccaccaggggacctttcccgtgcggctgcccagatggaaaaacagggggatggatttcgagccctcgcaggcctggctttctgcgatcctgaaaagcagcatatctggcatattccaggtctctggcatggagccccgcctatggctgccgtttctctggcgtacagcgaggccatattcgagctcaagagatgcctcctggaaaatatccgcaacggactgtccaatcagaacaaaaatatccaacagcttatcgagctggttagacgcttgtag

SEQ ID NO: 108947 - DNA, 2667 bp, Artificial Sequence
  derived and/or modified sequence
atggagggagatgactgtgagttccgctatggagatggcaccaatgaggcccaggacaatgacttccccaccgtggagaggagccggctgcaggagatgctgagcctgctgggcctggagacctaccaggtgcagaagctgagcctgcaggacagcctgcagatcagctttgacagcatgaagaactgggccccccaggtgcccaaggacctgccctggaacttcctgaggaagctgcaggccctgaatgctgatgccaggaacaccaccatggtgctggatgtgctgcctgatgcccggcctgtggagaaggagagccagatggaggaggagatcatctactgggaccctgcagatgacctggccgctgacatctacagcttcagcgagctgcccaccccagacacccctgtgaaccccctggacctgctgtgtgccctgctgctgagcagtgacagcttcctgcagcaggagatcgccctgaagatggccctgtgccagtttgccctgcccctggtgctgcctgattctgagaaccactaccacaccttcctgctgtgggccatgaggggcatcgtgaggacctggtggagccagcccccccggggcatgggcagcttcagagaagattctgtggtgctgagccgggccccagcctttgcctttgtgaggatggatgtgagcagcaacagcaagagccagctgctgaatgctgtgctgagccctggccaccggcagtgggactgcttctggcaccgggacctgaacctgggcaccaatgcccgggagatcagtgatggcctggtggagatctcctggttcttccccagcggccgggaggacctggacatcttccctgagcctgtggccttcctgaacctgcggggggacatcggcagccactggctgcagttcaagctgctgacagagatcagcagcgctgtgttcatcctgacagacaacatcagcaagaaggagtacaagctgctgtacagcatgaaggagagcaccaccaagtactacttcatcctgagcccctaccggggcaagaggaacaccaacctgcgcttcctgaacaagctgatccctgtgctgaagattgaccacagccacgtgctggtgaaggtgagcagcacagacagcgacagctttgtgaagaggatccgggccatcgtgggcaatgtgctgcgggccccctgcagaagagtgtctgtggaggacatggcccatgctgccaggaagctgggcctgaaggtggatgaggactgtgaggagtgccagaaggccaaggacaggatggagcgcatcaccaggaagatcaaggacagtgatgcctacagaagagatgagctgcggctgcagggcgacccctggaggaaggccgcccaggtggagaaggagttctgccagctgcagtgggccgtggaccccccagagaagcacagagctgagctgcggcggcggctgctggagctgaggatgcagcagaatggacatgaccccagcagtggagtgcaggagttcatcagcggcatcagcagccccagcctgtctgagaagcagtacttcctgcgctggatggagtggggcctggcccgggtggcccagccccggctgcggcagcccccagagaccctgctgaccctgcggcccaagcatggaggcaccacagatgtgggggagcccctgtggccagagcccctgggcgtggagcacttcctgcgggagatgggccagttctatgaagctgagagctgcctggtggaggccggccgcctgcctgctggccagaggagatttgcccacttccctggcctggccagcgagctgctgctgaccggcctgcccctggagctgattgatggcagcaccctgtccatgcctgtgcgctgggtgacaggcctgctgaaggagctgcacgtgcggctggagaggaggagccggctggtggtgctgagcacagtgggcgtgcccggcaccgggaagagcaccctgctgaacaccatgtttggcctgcgctttgccaccgggaagagctgtggccccaggggggccttcatgcagctgatcaccgtggccgagggcttcagccaggacctgggctgtgaccacatcctggtgattgacagcggcggcctcatcggcggggccctgaccagcgctggggacagatttgagctggaggccagcctggccaccctgctgatgggcctgagcaatgtgaccgtcatcagcctggccgagaccaaggacatcccagctgccatcctgcacgccttcctgcggctggagaagacaggccacatgcccaactaccagtttgtgtaccagaacctgcatgatgtgtctgtgcccggcccccggccccgggacaagaggcagctgctggaccccccaggggacctgagcagagctgctgcccagatggagaagcagggagatggcttccgggccctggccggcctggccttctgtgaccctgagaagcagcacatctggcacatccctggcctgtggcacggggccccacccatggctgctgtgtccctggcctacagcgaggccatctttgagctgaagcgctgcctgctggagaacatcagaaatggcctgagcaaccagaacaagaacatccagcagctgattgagctggtgcggcggctgtag

SEQ ID NO: 108948 - DNA, 2667 bp, Artificial Sequence
  derived and/or modified sequence
atggagggcgacgactgcgagttccggtacggcgacggcaccaacgaagctcaggataatgattttccgaccgtggagcgcagccgcttgcaggagatgctgagcctcttaggactggagacttaccaagtgcaaaagctctctctgcaagatagcttgcagattagcttcgatagcatgaagaattgggcgccccaggttcctaaggatctgccctggaatttcttacgcaaactgcaggctcttaatgctgacgctagaaatactaccatggtactggatgtgctgccagatgctagaccggtggagaaggagagccagatggaggaagagataatctactgggaccctgccgacgatctagccgcggacatctactccttttcagagctgcccacccctgacactcctgttaatcctcttgacctgttatgtgcactgctgctgagcagcgactcattcctgcagcaggagattgcattgaagatggccctatgccagtttgctcttcctctggtgctccccgatagtgaaaaccattaccataccttccttctgtgggcaatgaggggcattgtcaggacctggtggtcacagcccccacgcggcatggggtccttccgagaagacagtgtggtcctgtcacgggccccggccttcgcgttcgtgaggatggatgtgtcgtccaacagcaaatctcaattgcttaatgcggtcttgtcccctggacaccggcaatgggactgcttctggcacagagacctgaacttaggcacaaacgccagagagatttcagacggcctcgtggagatcagctggttttttcccagcggccgagaggaccttgacatattccccgagcctgtagccttcctgaacttgcgaggagatatcggctcacattggctccagttcaagttactcaccgagatctcaagcgcggttttcatactgactgataatatatcgaagaaagagtacaagctcctctactccatgaaggaaagtacaaccaaatactattttatcttatcaccataccgtggcaagaggaacacaaatttacgctttttgaacaagctgattcccgtgttgaagatcgatcactcacatgttctagttaaggtgtcttctaccgatagcgatagcttcgtgaagcgtatccgcgccattgtggggaacgtgctgcgcgcaccatgtcgaagggtgtcagtggaagatatggcacacgccgcccggaaactggggctgaaagttgacgaagattgcgaggagtgccagaaggccaaggatcggatggagcggataactagaaaaattaaagattctgatgcataccgccgtgatgaactcaggttacagggtgacccttggaggaaggccgcccaagtggagaaggagttctgccagctccagtgggcagtggacccacctgagaaacatcgcgccgagctcagacgtcgtctgctggaacttaggatgcaacagaacggccatgacccatcctcaggcgttcaagaatttatcagcggaattagcagtcccagtctgtccgaaaaacagtactttctgcggtggatggagtggggacttgccagagttgcccagccacgtctgcgtcagcctcccgagactctcttgacgctgcggcctaaacacggcggaaccaccgacgttggtgagcccctgtggccagagccattaggcgtggaacattttctccgcgaaatgggccagttttacgaggctgagtcttgtctggtcgaggctggcagacttccagcaggccagcggcggtttgcgcattttcccggattggcatccgaactattgttaacgggcttgccactggaactcattgacggctccacactgtccatgcctgtgcggtgggtgacaggcctgctgaaagagttgcacgtgagactggagcgaagatctcgcctggtggtcctatcaaccgttggcgtgccagggaccggcaagagcactctgctcaataccatgttcggccttcggttcgccactggaaaatcttgcggcccacgtggcgcttttatgcagttgatcactgtagcagaaggcttttcgcaagaccttggatgtgatcacatactagtgatcgacagtgggggtcttatcgggggagccctcacttcagccggagatcgattcgaactggaggctagtctggctacactgctcatgggcctcagcaacgtcactgtgatttcacttgccgaaacaaaggatattcctgccgccattctccacgcctttttaaggttagagaagacaggtcacatgccaaactatcagttcgtgtatcagaacctgcacgacgtgagcgttccaggacctcgcccaagagacaagcgccagcttctcgacccgcccggcgatctcagccgggctgctgcccaaatggaaaagcagggtgacggtttcagggctcttgccgggctcgccttttgtgaccccgagaaacagcacatatggcacattcctggactgtggcatggagccccacctatggccgctgtctcattggcgtacagcgaggctatcttcgagcttaaacgatgcctcctcgaaaacatccgcaacgggctgagcaatcagaataaaaacatccagcagctgatcgagctggtccgccgtttgtag

SEQ ID NO: 108949 - DNA, 492 bp, Artificial Sequence
  derived and/or modified sequence
atggagggcgacgactgcgagttcagatacggcgacggcaccaacgaggcccaggacaacgacttccccaccgtggagagaagcagactgcaggagatgctgagcctgctgggcctggagacctaccaggtgcagaagctgagcctgcaggacagcctgcagatcagcttcgacagcatgaagaactgggccccccaggtgcccaaggacctgccctggaacttcctgagaaagctgcaggccctgaacgccgacgccagaaacaccaccatggtgctggacgtgctgcccgacgccagacccgtggagaaggagagccagatggaggaggagatcatctactgggaccccgccgacgacctggccgccgacatctacagcttcagcgagctgcccacccccgacacccccgtgaaccccctggacctgctgtgcgccctgctgctgagcagcgacagcttcctgcagcaggagatcgccctgaagatgtag

SEQ ID NO: 108950 - DNA, 369 bp, Artificial Sequence
  derived and/or modified sequence
atggagggcgacgactgcgagttcagatacggcgacggcaccaacgaggcccaggacaacgacttccccaccgtggagagaagcagactgcaggagatgctgagcctgctgggcctggagacctaccaggtgcagaagctgagcctgcaggacagcctgcagatcagcttcgacagcatgaagaactgggccccccaggtgcccaaggacctgccctggaacttcctgagaaagctgcaggccctgaacgccgacgccagaaacaccaccatggtgctggacgtgctgcccgacgccagacccgtggagaaggagagccagatggaggaggagatcatctactgggaccccgccgacgacctggcctag

SEQ ID NO: 108951 - DNA, 2667 bp, Artificial Sequence
  derived and/or modified sequence
atggaaggtgatgactgtgagttccgctatggcgacgggacaaatgaagcccaagataatgacttccccacagtggaacgcagccgcctgcaggagatgttgtcactcttggggctggagacgtaccaggttcagaagcttagcctgcaagattccctccagatatcctttgactctatgaaaaactgggccccccaggtaccaaaagacttaccctggaatttcctgagaaaacttcaagcactcaacgccgatgcgcggaatacaacaatggtcctagacgtgttacctgacgctagaccagtggagaaggaatctcaaatggaggaagaaataatctattgggacccagccgacgacctggctgcagatatttatagctttagcgagctccctactcccgacacccccgtcaatccgctggacctcttatgcgctttgctgctgtcatcagattcttttttacaacaggagatcgctttaaaaatggccctatgtcagttcgccctaccgcttgtgctaccagatagcgagaatcattaccacacatttcttttgtgggccatgcggggtattgtgagaacttggtggtcccagccccctaggggaatgggctcttttcgtgaggattctgtcgtgttgtcacgcgcccccgcgttcgcatttgtgcggatggatgtttctagcaacagcaaatcccagttgctgaacgctgttctgtcccccggacaccgtcagtgggactgtttttggcacagagacctgaatctcggcacgaacgcgagggagatttctgatgggctggtggaaatcagttggttttttccctctggaagggaggacctagacatcttccccgagccagtcgcttttctgaatttaagaggcgacatcggcagccactggttacagtttaagcttctgacggaaattagtagcgcagtctttatcctgaccgataatatttccaaaaaagagtataagctcctgtattcgatgaaggagagtactacaaaatactacttcatccttagcccataccggggcaaaaggaatacaaaccttcggtttctaaataagcttatccctgtactcaagatcgaccactcccatgttctagtgaaagtcagcagcactgatagcgactccttcgtgaagagaataagggccatagtgggaaatgtccttcgagccccttgccgacgggtgagcgtggaggatatggctcatgcagccagaaagctcggtctgaaagtggatgaggattgcgaggagtgtcagaaagcgaaggacaggatggaaagaataacgcgaaaaattaaagatagtgacgcctatcggcgcgacgaattgcgccttcagggggacccatggcgtaaggcggctcaagttgaaaaggaattttgccagttgcagtgggcagtggatccaccagaaaaacatagagctgaactgcgcaggcggttattagaacttcgaatgcaacaaaatggtcacgaccccagctccggagtccaagagttcattagcggcatcagtagtcctagtctatctgagaaacagtattttcttcgatggatggaatggggccttgcccgagtggcgcagcctcgactccgccagccccctgagactctgctgaccctgcgccccaaacacggcgggacaacagatgtaggtgagccactgtggccagagccactgggagttgagcacttcctgcgcgaaatgggtcagttctacgaggcagagtcgtgcctcgttgaggcaggcaggcttcctgcaggccaacggcggtttgctcatttccctgggctggcctctgaacttcttctgaccgggttgccactcgaactaattgatggtagcaccctgagcatgcccgtgcgatgggttactggattacttaaggagctgcacgtgaggcttgaaaggcgtagcaggctcgttgtattgagtactgtgggcgtgcctggcacaggtaaaagcaccctcctcaataccatgtttgggctgaggttcgccacagggaaatcgtgcggacctcgaggggccttcatgcagctgatcaccgtggcagagggttttagccaggatttgggctgcgatcacatactggttattgatagcggcggcctcataggaggcgcccttacaagcgccggagatagatttgagctagaggcctcactggccaccctgttgatgggtctgtccaacgtcacggtgatctctctcgctgaaaccaaggacatcccggcagctattctgcacgccttcctgcggctcgagaagacaggacatatgcccaactaccagtttgtgtaccagaatctgcatgacgtttcggtacccggcccaagaccgcgcgataaaagacagctgttagaccctccaggtgacctgagccgtgctgcggcccagatggaaaaacaaggcgatggttttcgggccctggccggcttagccttttgcgatccggagaaacagcacatctggcacattccaggactgtggcacggagctcctcctatggctgcggtttctctggcatactccgaggctattttcgagctcaagcgctgcctcctcgagaatattagaaacgggctcagcaaccaaaacaaaaatatccagcagctcatcgagttggtgagaaggctctag

SEQ ID NO: 108952 - DNA, 492 bp, Artificial Sequence
  derived and/or modified sequence
atggagggtgacgattgtgaattcagatacggtgatggtactaacgaggcacaagataatgactttcccactgtggagcgatctcggcttcaggagatgcttagtttactggggctggagacgtatcaggtccaaaagctctctctgcaggattcactccaaatatcttttgactcgatgaagaattgggcaccgcaggttcctaaggacctgccctggaactttttacgtaagctgcaagccctcaacgctgacgcccggaacacaactatggtccttgatgtcctgcccgacgcgcgcccagtggaaaaggagtcccagatggaagaagagatcatttattgggacccagcagatgacttagccgcagacatttactctttctcagaacttcccactcccgacacccccgtcaaccctcttgacctcctctgcgccctgttgctgtccagcgacagttttctgcagcaggagatcgcactgaagatgtag

SEQ ID NO: 108953 - DNA, 2667 bp, Artificial Sequence
  derived and/or modified sequence
atggagggtgacgattgcgaatttcgttacggcgacgggacaaatgaagctcaggataacgacttccctacagtagaaagaagccggctgcaggaaatgctgtctctgctggggttggagacctaccaggtccagaaactgtccctgcaggactccctgcagatctcatttgactcgatgaagaattgggccccacaggtcccaaaagatttaccctggaattttctcaggaaactgcaggctttaaatgccgacgcccgaaacacgaccatggtgttggacgttctcccagacgccagacccgtggaaaaggagtcccagatggaagaagaaattatctactgggaccctgctgatgacttagccgctgacatttattctttcagcgagttacctactccagatactccagtcaaccccctcgatttactctgcgccctgttgttatcctctgactcatttcttcagcaggaaatcgcactgaagatggccttatgtcagttcgccctccctctagtcctaccagacagtgagaaccattaccatacctttctgctgtgggcaatgaggggaattgttagaacctggtggagccaaccacctcggggcatggggtccttccgcgaggattccgtggtgttatctcgggccccggccttcgccttcgttcgcatggatgtatcttcgaactccaaatcccaattgctgaatgctgttctgtctcctggacacagacagtgggactgtttttggcacagagatctgaatctgggtactaatgcccgtgaaatatctgatggcctggtggagataagctggttctttccttccggccgggaagacctggatatctttccagagcccgtggctttcttgaatctccgcggcgatattggtagtcactggctacagtttaagctgctgactgaaataagttctgctgtgttcatcctgactgacaatatctctaaaaaagagtataagttgctctattcaatgaaggagagcaccaccaaatattatttcattctgtccccatacaggggaaagaggaacacaaacctgcggtttctcaacaagcttattccagtgctcaagattgatcactcccacgtgctagtaaaggtgagctctactgacagcgatagcttcgtaaagagaatcagggctattgtgggcaacgttctcagagcaccctgtaggagagtctctgttgaggacatggcccacgccgcccggaaactaggtttgaaggtagacgaagactgtgaagaatgtcaaaaggccaaggacaggatggagcgcattactcgcaaaatcaaggactccgatgcctaccgcagagacgaactccgactgcagggcgacccatggcggaaagcagcccaggtcgagaaggaattctgccagctccagtgggccgtggatcccccagaaaagcatcgcgctgagttgcggcgacgcttgctagagctacgaatgcaacagaatgggcacgatccgtctagcggagtgcaggagtttatttctggaatctcatccccaagtctgtcggagaagcagtacttcctcagatggatggagtgggggctggcacgagtggcccagccccggctgaggcagccccctgaaacgcttctcaccctgagacctaagcatggcggaaccactgacgtgggagaacccctgtggccagaacccctcggggtggaacacttcttgagggagatgggccaattctatgaggctgaaagctgtctggtggaggctggaagactgcccgccggccagcgacgttttgctcactttccaggacttgcctctgagctgctgttaaccggtcttcctctggaactgattgacggctctaccctgagcatgccagtacgttgggttacaggcctcctgaaggagctgcatgtgcggctcgagagaaggagccggttggtcgtgttgtcaacggtgggcgtgcctggaactggcaaatcaaccctcctcaacaccatgttcgggctgaggtttgccacggggaaatcttgtggtccacgcggggcattcatgcagttgatcacggtcgccgagggtttttcccaagacctgggatgcgaccacatccttgtaatcgattcaggagggctgattgggggtgcattaacgagtgccggagaccggtttgagctagaagcctctttagccactctgctcatgggcctttccaatgttacagtgattagtctggcagaaacaaaagatattccagctgctatactccatgcatttttgaggctagagaagactggtcacatgcctaattatcagtttgtctaccagaatctccatgatgtgagtgtccccggtccccggccgcgcgacaaacgccagttactcgaccccccaggtgatctgagtcgtgccgctgcacagatggaaaagcagggagacgggtttagagcacttgcaggtttggctttctgcgatcctgagaagcagcacatatggcacatcccgggactgtggcatggcgcccccccaatggccgccgtgtcattagcatacagcgaagcaatcttcgagctcaagcgctgtcttctggagaatattcggaatggcctgtccaatcagaacaagaatattcagcagctcatcgagcttgtgagacgcctgtag

SEQ ID NO: 108954 - DNA, 2667 bp, Artificial Sequence
  derived and/or modified sequence
atggaaggcgatgattgtgagtttcgttacggagatggcactaatgaagcacaggataatgactttcctactgtagagcggtcccgactgcaagagatgttatctctgctcggactggagacataccaggtccagaagctgtccttgcaggattccttgcaaataagttttgattccatgaaaaactgggctcctcaggtgccgaaggatttgccctggaatttccttaggaaactgcaggcccttaacgccgatgcacggaatactactatggtactggacgttctacccgatgcccgcccagtggaaaaagaaagccagatggaggaggaaattatttattgggatccagctgacgaccttgccgcggacatttattccttctcagaactgcccacacctgatacacccgtgaacccgctggatctgctgtgcgctctgctcttgagcagtgactcgtttctccaacaagagatagcattaaagatggccctctgccaatttgcgctgccgcttgtcctaccggattctgaaaatcattaccacactttcctgctctgggccatgcggggcatcgtaagaacgtggtggagccagcctccgcgagggatggggtccttcagggaggacagtgtcgtcctcagcagggcgcccgcctttgcctttgtgagaatggacgtgtcaagcaattcaaagtctcagttgcttaacgcagtgctctcacctggccacaggcagtgggactgtttctggcatagagacttgaacctggggacaaatgcacgtgagattagtgacggcctagtcgaaatttcgtggttcttcccttcaggccgcgaagacctcgacatatttcccgaaccagttgcgttccttaacctgcgcggtgatatcggatctcactggctgcagttcaaactcctcactgaaatcagcagtgccgttttcattttaacagataatatatccaaaaaagagtataaattactctattccatgaaagagtcaactactaaatattactttatcttatctccttatcgcggaaagcggaacacgaacttgcggttcctgaacaaattgattccggtcctgaagattgatcatagccatgtgctcgtgaaagtcagtagcaccgactctgactccttcgtgaaaaggataagggcgattgtgggaaatgtgctgagagctccatgtcggcgagtcagcgtagaagacatggcccacgccgcacgcaaattgggcttgaaagtcgacgaggattgtgaggagtgtcagaaggcaaaggaccgcatggaaagaataacacgcaagattaaagatagcgacgcttacaggagggacgagcttcgcctccagggtgatccgtggcgtaaagccgcacaagtggaaaaagaattctgtcaattacaatgggctgtcgaccctcctgaaaagcaccgcgccgagctcaggcggaggctactggaactgcgtatgcagcagaatggtcacgatccgagcagcggggttcaggagttcatcagcggcatctctagcccaagcctgtccgagaagcagtacttcctgaggtggatggaatggggactggctcgcgtcgcccagcctagactgcgacagccccccgagactctgcttaccctccggccaaaacatggcggcaccacagacgtaggagagcctctgtggcctgagcccttgggcgtggaacacttcttgagagagatgggacagttttacgaggcagagagctgtctcgtggaggcaggtcgactccctgcgggccagcgacgtttcgctcactttcctggactcgcgtcagagttgctgctcactggactccctctagagcttatcgacggctctactctgagcatgccggtgaggtgggtcaccgggttgcttaaggaactccatgtacgattggagcgaaggtccaggctggtggtgctgtcaacagtgggcgtccctggaaccgggaagtctacactcctcaatactatgttcggcctgcgatttgccactggaaagagctgtgggcctaggggggctttcatgcaattaattacagtcgccgaggggtttagccaggatctgggctgtgaccatatactggtgatcgattctggtggacttattggtggagcgctgactagcgctggtgatagatttgaactggaggcgagtttggctaccctgctcatgggcctgagcaacgttactgtgatctctctcgccgagaccaaagatatccccgccgccatcttacacgcctttctgaggctggagaagacaggtcatatgccaaattatcagtttgtgtatcagaatcttcatgacgttagtgtccctggccctagacctcgggacaagaggcagctcctggacccacccggcgacctcagccgtgcggccgcgcagatggagaagcagggggatggtttcagggcgctggcaggactggccttctgtgaccccgaaaaacagcacatatggcacattcctggtctctggcatggcgctccccccatggcagccgtgtcacttgcctacagcgaggccattttcgaactcaagcggtgtctgctggagaacatccggaacgggctgagtaatcagaacaagaatatccagcaactgattgaactcgtccgtcgcctatag

SEQ ID NO: 108955 - DNA, 369 bp, Artificial Sequence
  derived and/or modified sequence
atggaaggagatgattgtgagttccggtatggagacgggactaacgaggctcaagataacgattttcctaccgtcgagaggagccggttgcaagagatgctgtctctgctgggcctggagacttaccaagtgcaaaaactatcattacaggacagtctgcaaatctcatttgatagcatgaagaactgggctccacaggtgccaaaagatctcccctggaattttctcaggaagctgcaggccctgaatgctgacgctagaaatacgacaatggtgcttgacgtccttcctgatgctcgcccggtcgaaaaagagagccaaatggaggaagagatcatctattgggaccctgctgatgatctggcctag

SEQ ID NO: 108956 - DNA, 492 bp, Artificial Sequence
  derived and/or modified sequence
atggagggagatgactgtgagttccgctatggagatggcaccaatgaggcccaggacaatgacttccccaccgtggagaggagccggctgcaggagatgctgagcctgctgggcctggagacctaccaggtgcagaagctgagcctgcaggacagcctgcagatcagctttgacagcatgaagaactgggccccccaggtgcccaaggacctgccctggaacttcctgaggaagctgcaggccctgaatgctgatgccaggaacaccaccatggtgctggatgtgctgcctgatgcccggcctgtggagaaggagagccagatggaggaggagatcatctactgggaccctgcagatgacctggccgctgacatctacagcttcagcgagctgcccaccccagacacccctgtgaaccccctggacctgctgtgtgccctgctgctgagcagtgacagcttcctgcagcaggagatcgccctgaagatgtag

SEQ ID NO: 108957 - DNA, 369 bp, Artificial Sequence
  derived and/or modified sequence
atggagggagatgactgtgagttccgctatggagatggcaccaatgaggcccaggacaatgacttccccaccgtggagaggagccggctgcaggagatgctgagcctgctgggcctggagacctaccaggtgcagaagctgagcctgcaggacagcctgcagatcagctttgacagcatgaagaactgggccccccaggtgcccaaggacctgccctggaacttcctgaggaagctgcaggccctgaatgctgatgccaggaacaccaccatggtgctggatgtgctgcctgatgcccggcctgtggagaaggagagccagatggaggaggagatcatctactgggaccctgcagatgacctggcctag

SEQ ID NO: 108958 - DNA, 2667 bp, Artificial Sequence
  derived and/or modified sequence
atggagggcgacgactgcgagttccggtacggcgacggcaccaacgaggcccaggataacgactttcccaccgttgagcgctcgaggttgcaggaaatgctgtctctattgggcttggagacttatcaggtccagaaactctcgctccaggattccctgcagatatcatttgactcaatgaagaactgggctcctcaggttccaaaggacctgccgtggaatttcctgagaaagctccaggcccttaatgctgacgcaaggaacacaacaatggtgttggacgtgttacccgatgcgagaccagtcgaaaaggagtctcagatggaggaagaaatcatctattgggatccagccgacgatctcgccgcagatatctactccttcagtgagctgcccacgcctgacacaccagtcaaccccttggaccttctttgtgctctgctgctgagtagcgactccttccttcagcaagagattgctctgaagatggcactctgccagttcgccctgcccctggtcctgcctgatagcgaaaaccactatcatactttcttgctctgggcaatgcgcggtattgtgcggacctggtggagtcagcccccacgaggcatgggtagctttagagaggatagcgtagtgctgagtcgggcacctgcttttgcctttgtaaggatggacgtaagttccaattctaagagccagcttttgaatgctgtattaagcccagggcaccggcagtgggattgcttctggcacagagacctaaacctaggtactaacgctagagagatatccgacgggctggtagaaatttcctggttcttcccatccggacgagaggatctggacatttttcctgagccagtcgctttcctgaatctcaggggggacatcggaagccattggttgcaattcaagcttctgaccgaaatttcatccgcagtgttcatcctgaccgacaacatcagtaagaaagagtacaaactgctgtatagcatgaaggagtcgaccacaaaatattatttcatcttaagtccataccggggcaaaagaaatacgaatctgagatttttgaataagctcatccctgtactcaaaatcgaccactcccacgttttggtcaaggtttcttcgacagacagcgacagcttcgtgaagcgtatcagagcaatcgtgggaaacgttttaagggcaccatgccggcgtgtgtccgtggaggatatggcccacgccgctcgcaaactgggcctgaaggtggatgaggattgcgaggagtgccaaaaggcgaaggaccgtatggagcgcattacaaggaagatcaaggattccgatgcatatagacgcgacgagttacgactgcagggtgacccatggaggaaggccgcccaagtggagaaagagttctgtcagctgcagtgggctgtcgacccccctgagaagcacagagcggagttgcgcaggcgccttctggaactccgcatgcagcagaacgggcatgaccccagtagcggagtgcaggaattcatctccggcatctcttccccttcactatccgaaaaacagtactttctccgatggatggaatggggcctggcccgggtggctcaaccaaggctaaggcaaccacctgaaaccctgctgacgctccgcccaaaacacggggggaccactgatgtcggggagcctctttggccagaacccctcggtgtggagcacttcctgcgggagatgggccaattctatgaagccgagtcctgccttgtggaagccggccgcctccctgcagggcaaaggcgctttgcacacttcccaggactcgcctccgaactgttactgactggtttgcctttggaactgatcgacgggagcactctctctatgcccgtgaggtgggtgactgggctacttaaagagttacacgtcaggttggaacgccggtcccgtctggttgtgctgagcaccgttggagtccctggcacagggaagagtaccctgttaaataccatgtttggactccgctttgctactggaaagtcctgcggtccaaggggcgccttcatgcagctcatcaccgtcgccgaggggttttctcaagacttgggctgtgaccatattttagtgatcgactccggtgggctaatcggaggcgccctaacttccgcgggggaccgatttgaactcgaagcttcccttgctaccctgctgatggggctgagcaatgttacagtgatatctctggctgaaactaaggacattccggccgcaattctccatgcatttctgcgccttgaaaagaccggccatatgcccaattaccaatttgtgtatcagaatctgcacgatgtgtccgtgcctggcccgagacctcgagataagcgacagctgctggacccccccggcgatttatctcgagctgcagctcaaatggagaaacagggcgatggattccgcgctctggcaggcctggccttctgcgaccctgagaaacagcatatctggcacatccccgggctgtggcacggcgcaccccctatggccgccgtgtccctagcctattccgaagcgatttttgaactcaaacgctgtcttctggaaaatattaggaatggtctgagcaatcaaaacaaaaatattcaacagcttatcgagctggttaggagactgtag

SEQ ID NO: 108959 - DNA, 492 bp, Artificial Sequence
  derived and/or modified sequence
atggagggcgacgactgcgagttccggtacggcgacggcaccaacgaggcccaggacaacgatttcccgacagtggagagaagtcggctgcaggagatgctgtccttgcttggcttggaaacctaccaggtgcagaagctttctctccaggattccctgcagattagctttgacagcatgaaaaactgggcccctcaggttcccaaagacctgccctggaatttcctcagaaaacttcaggccttaaatgctgacgcgcgcaatactacgatggtgttggacgtgctgcccgacgcacggcctgtcgaaaaagaatcacaaatggaagaagaaatcatctactgggatcccgctgatgacttggccgctgacatttattccttttctgagcttcccacccccgacactccggtaaatcccctagatctgctttgtgccctgttgctgtcttctgactcctttctccagcaggagatcgctctaaaaatgtag

SEQ ID NO: 108960 - DNA, 2667 bp, Artificial Sequence
  derived and/or modified sequence
atggagggcgacgactgcgagttccggtacggcgacggcaccaacgaggctcaggacaacgatttcccgacggttgaacgatccagactccaggagatgctatcattgttgggcctggaaacttatcaagtgcagaagttatctctgcaagattccctgcagattagttttgactctatgaagaattgggcgccacaggtccctaaggatttgccctggaacttcttgcggaaactccaggctctcaatgccgacgctcggaacaccaccatggtgcttgatgttctccctgatgcgaggcctgttgagaaggaatcacagatggaagaagagataatctactgggatcccgcagacgatcttgcggccgacatctattccttttcggagctgccaacacccgacacaccagtgaacccgttggacctcctgtgtgccttgttgctgagctcagattcattcctgcaacaggagattgcactgaaaatggcactctgtcagttcgccctgccgcttgttttgccagattccgagaaccactaccatactttccttctgtgggctatgagaggcatcgttcgcacttggtggtcacagccacctcgaggcatgggctccttccgagaggatagcgtagtgctgagtcgcgcacccgcatttgctttcgtgcggatggatgtctcatctaattcaaaaagccagctgctgaacgccgtactgtcccccggtcatcgacagtgggattgcttttggcaccgcgatctaaatctcggtactaatgcccgggagatttctgatggcctggtggagatttcgtggttttttcccagcggccgagaagacttggatatcttccctgagcccgttgcgttcctcaatttgaggggcgacatcgggagccactggctccagtttaaactccttacggaaattagctccgctgtatttattctgactgataacatcagtaagaaagagtataaattactttactctatgaaggaaagtacgacaaaatattatttcattcttagcccgtacagaggcaagagaaacaccaacctgcgcttccttaacaaattgatacccgtgctgaaaatcgaccactcacacgtgcttgtgaaggttagttccacagattctgatagctttgtgaagcggatcagggcgattgtcgggaacgtgctgagggccccttgtaggcgggtgtctgtggaagacatggctcacgccgcccgcaaactggggctgaaggtcgatgaagattgcgaggagtgccagaaggcaaaggatcggatggagcgcatcacacgcaagataaaggactcggatgcatacaggcgggatgaactgcgtctacagggcgatccctggcgaaaggctgcccaggtcgagaaagagttctgccagcttcaatgggccgtggacccccccgaaaaacaccgtgccgaactgaggcggcgcctgctcgaactgcggatgcagcagaatggacacgaccccagctcaggcgtccaggagttcatcagtggaatcagctcaccctccttatcagagaagcaatactttctgcggtggatggagtggggcctggcccgggttgcccagcccagactccgccagcccccagaaaccctcctgacactccgcccaaaacacggcggtacgacggacgtgggggaaccactttggccagaacccctgggcgtcgagcattttcttcgagaaatggggcagttttacgaagcggagagctgcctagtggaagctggcaggcttccggccggccagagaaggttcgcccactttccagggctagcgtctgaattgcttctcaccgggctccctcttgaactgatagatggtagcactctgagcatgcccgtccggtgggttacaggactgctaaaggaactgcacgtccgtctggagcgaagaagcagacttgtggtcctaagtacagtaggcgtgcccggtaccggaaagtcgacgctattgaatacaatgttcggcttgcgctttgccacaggcaaatcttgtggcccccggggggccttcatgcagctgattactgtcgccgaaggatttagtcaagacctgggctgcgaccatatcttagtgatcgattccgggggccttatcggaggagcactgacctccgctggagaccgattcgaattggaagcttctctcgctacactccttatggggctcagcaatgtaacagtgatttctctggctgagacaaaagatatacccgcagcaatactgcatgcgtttcttagacttgagaagacagggcacatgcccaattaccagtttgtgtatcagaacctgcacgacgtgagtgtgcctggccccagaccaagagataagcggcaactcttagatcctccaggcgatctaagccgggcggcagcccaaatggagaagcagggcgacgggtttcgcgcactcgccggactggccttttgtgacccagaaaagcaacacatttggcacattcctggactgtggcatggcgccccccctatggctgctgtttccttggcttattccgaggcaatcttcgaactgaagcgctgtctcctggaaaatatccgcaatggcctgtcaaatcagaataagaatatccagcagctaatcgagcttgtgcgtcgtctgtag

SEQ ID NO: 108961 - DNA, 2667 bp, Artificial Sequence
  derived and/or modified sequence
atggagggcgacgactgcgagttccggtacggcgacggcaccaacgaggcccaggataacgattttcctacggtggaacgcagccgcctccaggagatgctgtcactgctgggactagaaacctaccaggtacagaagttgagcttacaggattcactccaaatctcctttgactctatgaagaactgggctccccaagtccctaaggacttgccatggaactttttgcgcaaactgcaggcacttaacgccgacgccaggaataccactatggtcttggacgtgctccccgacgctagaccagtggagaaagaaagccagatggaagaagagataatatattgggatcccgcagacgatctggcagccgatatatatagtttttccgagttgcccacgcctgacacccccgtgaacccattagatctgctctgtgcgctgctgctgtcaagcgactccttcctgcagcaggaaatcgctctgaagatggcgctatgccagtttgcgctgcccctggttctaccagactcagaaaatcactaccacaccttccttctatgggcaatgaggggaatcgttcgaacctggtggagtcagccacccagggggatggggtcattcagagaggattccgtggtcctgagccgcgcaccggcatttgcgtttgtcagaatggacgtgtcctcaaactccaaatctcagctgctcaatgcggtgctgtccccaggacaccgtcagtgggactgcttctggcatagggatctaaacctgggaactaatgcccgtgagatatcagacgggctggtggagatttcttggtttttccctagtgggcgggaggacttggacattttcccggaacccgtggctttccttaatctgcgcggcgacattggcagccattggctgcagttcaaactgctgactgagatcagttccgctgtgttcattctgacagataacatttcgaagaaggagtacaagcttctttattccatgaaggaatctacgaccaagtattactttatcctgtcgccctatcgtggcaagcggaacacaaatttacggtttctcaacaaactgattccagtgctcaaaattgatcactctcatgtccttgtgaaagtttcctccacggattcagactccttcgtgaagcgaattcgagcgatagtgggcaacgttctgagagccccctgtaggcgggtcagcgtcgaggacatggcacacgctgccagaaaactgggtctgaaggtggacgaggattgtgaggaatgccagaaagccaaggaccggatggaacggataacgagaaaaattaaggactcagacgcataccgcagggatgagctcaggctgcagggcgatccctggcgaaaagccgcacaggtggaaaaagagttctgccagctgcaatgggccgtcgaccccccggagaagcaccgagcagagctgcgaaggcgtctgctggaactgagaatgcagcagaatgggcatgatccctcctccggcgtccaggagtttatcagcgggatctcttctccttctctgtccgagaagcagtattttttacgctggatggagtggggattagctcgagtggcccagcctagactcaggcaaccgcctgagacgctgctgacccttcgccccaagcatgggggtacaactgatgtaggcgaacctctctggccagagcctctgggagttgaacattttctgcgcgaaatgggccaattttacgaggcggagtcttgcctcgtggaggccggtagattgccagccggacagagacggtttgcccatttccccggactggccagtgagttgttgcttaccggcttgcccttggagctgatagacggttctaccctgtcgatgccagtgcggtgggtcaccggattgttgaaggaacttcatgtgcgcctcgagcgacgatctcgactggtcgtgctgtcgaccgtgggtgtgcctggaaccggcaaaagcaccttactgaacaccatgttcgggctgcggttcgccacaggaaaatcttgtggtccccgaggagcctttatgcagttgattacagtcgcagaagggttctcccaagatctgggttgcgaccacatccttgttatcgactccggcgggcttattgggggtgccctcacaagtgccggagacaggtttgaactggaggccagcctggccacattgctcatgggcctttccaacgtcaccgttatctctttagctgagacaaaagacatacctgccgcaatattacacgccttcctgagattggagaaaactggtcatatgccaaattatcaatttgtgtaccaaaatctccatgacgtgtctgtccctgggccccggccacgcgataagagacagctgcttgacccccccggagatctcagccgggcagccgctcagatggaaaaacagggcgatggttttagagccctggccgggcttgcattttgcgatccggaaaagcaacatatctggcatatcccaggcctgtggcacggagctccaccaatggcagcagtgtccttagcgtactccgaggctatctttgagttgaagcggtgtctgctggagaacatacgaaacggcttgtccaaccagaataaaaacattcagcaactcattgagttagtgcggaggctttag

SEQ ID NO: 108962 - DNA, 369 bp, Artificial Sequence
  derived and/or modified sequence
atggagggcgacgactgcgagttccggtacggcgacggcaccaacgaggcacaggacaacgacttcccaaccgtggagcgatcgagactccaggaaatgctttcccttcttggccttgaaacatatcaagtccagaaactttctcttcaggatagcttacagatctccttcgatagcatgaagaattgggcgcctcaggtgcccaaggacttgccatggaacttcttgcgcaagctgcaggcactgaacgctgatgctagaaacaccaccatggtgctggacgtgttgccagacgcgaggccagtggaaaaagagagccaaatggaggaagagataatctactgggaccccgcagacgacctggcttag

SEQ ID NO: 108963 - DNA, 2667 bp, Artificial Sequence
  derived and/or modified sequence
atggagggcgatgactgtgaattcaggtacggcgacgggactaatgaagcccaggacaatgatttccctactgtcgaaagaagccgactgcaggaaatgctgagccttcttgggcttgagacctaccaggtgcagaagcttagcctgcaagactctctgcagataagctttgactctatgaagaattgggcccctcaggtccctaaagatttaccatggaactttctgcgaaagctgcaggcactcaatgcggatgctaggaataccacaatggtgcttgatgttttgcccgacgccaggccagtcgaaaaagagagtcaaatggaagaggagatcatttattgggaccccgctgatgaccttgccgcagatatatatagtttctccgagctccccacacctgacacaccagtgaatccactcgatctgctgtgcgctttgctgctttccagcgactccttcctgcaacaggagattgctctgaagatggcactttgccagttcgctcttccattagtgttgcccgactccgaaaaccactaccacaccttcctgctgtgggcgatgcggggaattgtcagaacttggtggagccagcctccacggggaatgggctcatttagggaggacagcgtggtgctatcccgcgcacctgcctttgcttttgttcgaatggatgtttctagcaattccaagtcacaacttttgaacgcagtactctcccccggtcatagacagtgggactgtttctggcaccgcgacctcaatctcggaacgaacgcgagggagattagtgacggcttagttgagatttcatggttttttcccagcggacgcgaggatctggatattttcccagagcccgtggcattcctgaacttacggggagatatcgggtcacactggcttcagttcaaactcctgactgaaatctctagcgcggtcttcatactcaccgataatatttctaagaaggaatataagctactgtattctatgaaagagagcaccactaagtattactttattctaagtccttaccgaggaaagcggaatacaaatctcagatttttgaacaaactcatccctgttctgaagatcgaccacagccatgtgttagttaaggtttcctcgaccgactctgatagtttcgtgaagcgcattagagccattgtgggaaatgtgctcagagccccatgcaggcgggtgtcagttgaggatatggcccacgcagccaggaagctaggtcttaaagtggatgaagattgcgaagagtgtcaaaaggcaaaggatcgaatggagcggataactcgtaaaatcaaagactctgacgcgtacagaagggatgaattaaggttacagggagacccctggaggaaggctgcacaggtggagaaagaattctgccagcttcagtgggctgtggacccccctgagaagcatagagccgagctgaggcggaggctactggagcttaggatgcagcagaacggacatgatcccagtagcggagtgcaagaattcatcagcggtattagctcaccttctttgtccgaaaaacagtactttctgaggtggatggaatggggattggccagagttgctcaaccccgactcagacagcctcctgagacgctgctaactctccgtcctaagcatggagggacaactgatgtgggggaacctctgtggccagagcccctcggcgtggagcacttcctgagagaaatgggtcagttctacgaagctgaaagctgtctcgttgaagctgggaggttgccagcaggtcagaggagatttgcccattttcctggtctcgcctccgaactgctactgaccggactcccactggagctgatcgatggctctacattgtccatgcctgttcgctgggtgacaggtctcctcaaagaattgcatgtgaggctggagcggagatctcggctggtggtgctatccacagtgggggtgccaggtactgggaagtcaactctactgaataccatgtttggcctcagatttgccaccgggaagtcctgtggacctagaggcgctttcatgcagctgatcaccgtggcagaggggtttagtcaagacctcggttgcgatcacatcctggtgatagactctggcggtctgatcgggggagccctcacctctgcgggagaccgatttgagctcgaagcgtcgctggctaccttgttgatggggttgtcaaacgtgacagtcatcagcctggcggaaaccaaggatatccccgctgcgattttgcacgccttcctgcggctggaaaagactggccatatgcctaattaccagttcgtgtaccagaacctgcacgacgtgtccgtccccggacccagaccaagggacaagaggcagctgctggacccccctggtgatttgagccgcgcagcggcacaaatggagaaacaaggtgatggttttcgggctctggcaggtcttgccttctgcgaccctgagaagcagcatatctggcacatccctggcctatggcacggcgctccccctatggcagccgtcagcttggcgtattcagaagccatcttcgagttgaaaaggtgcctcctggagaacatcaggaacggactgtccaatcagaataaaaacatccagcagctaatcgagctggtgagacgtttatag

SEQ ID NO: 108964 - DNA, 492 bp, Artificial Sequence
  derived and/or modified sequence
atggagggggacgattgtgagttcaggtatggagacgggactaatgaggcccaggacaacgatttccctacggtcgagcgtagcaggctgcaggagatgcttagtctgttgggattagagacctaccaggttcagaagctgagtctccaggacagtttgcagatctcttttgactccatgaagaattgggctccccaggttcctaaagatttgccctggaacttcttgcgtaagttgcaggccctgaatgcggacgcccgaaacacaactatggtgctggacgtcctcccggatgcccgacccgtggagaaagaaagtcaaatggaggaggaaatcatttattgggatcccgctgacgacctggccgcagacatttactcatttagcgaacttcccacccccgatactcccgttaacccattggacctgctatgtgcattgctcctctcctctgattctttccttcagcaggagattgctctgaagatgtag

SEQ ID NO: 108965 - DNA, 2667 bp, Artificial Sequence
  derived and/or modified sequence
atggagggcgatgattgcgaattccgctatggcgacggaaccaatgaagctcaagacaacgattttccaaccgtggaaagaagccgcctccaggaaatgctctccctactaggcctggagacataccaggtacagaagttgagcttacaggattccttacaaatttctttcgacagtatgaaaaactgggctccacaggtgcctaaagacctgccctggaactttttgcgcaagctgcaggccctgaacgccgacgctagaaacacaaccatggtcttggacgtgctgcctgacgccagacctgtcgaaaaagagagtcagatggaagaggagatcatctactgggaccctgctgacgacctggctgctgacatttattcttttagcgaattgcctacccctgacacccccgttaatcccctggatctcctgtgtgcactcttgctgtcgtctgattcattcctccagcaggagatcgccctaaagatggccctgtgccagttcgcactgccacttgtattgcctgattccgagaaccactaccatacttttctgctgtgggctatgaggggcatcgtgcggacgtggtggtcccagccccctagaggcatggggtccttccgagaggattctgtcgtcctgtccagagcccctgcgttcgcctttgtgcgtatggacgtctccagcaactcaaaatctcagcttctgaatgccgttctgtctccagggcaccgccagtgggattgtttctggcaccgcgatctcaatctgggtactaacgctagagagatcagcgatggactggtcgagatctcctggttttttccaagtggcagggaggatctggatatctttccagaaccggtggcctttcttaatctaagaggggatattggaagccactggttacagttcaagctactcactgagatatcttctgccgtcttcatccttacagataacatctcaaaaaaagaatacaagctcttgtacagcatgaaagagagcactaccaaatactattttatcctctccccataccgtgggaaacgaaacacaaatcttagattccttaataagctaattccagttctgaagatcgaccatagccatgtactcgtgaaagtgagctctacggacagcgattcatttgtgaaacggatcagggcaatagtcggaaatgttttgcgggctccatgccggcgagtaagtgtagaagatatggcccacgccgctcgcaagctgggcctaaaagtggacgaagattgtgaggaatgtcagaaggctaaagaccggatggagcggattaccaggaagatcaaggacagtgatgcttacaggagagatgaacttcggctgcagggtgacccttggcgcaaagcagcccaggtcgagaaggagttttgccaactccaatgggccgtggaccccccagaaaagcacagggcagagctgagaaggcgactcctggagttgcgcatgcagcagaatggacatgatcctagctccggcgtgcaggaatttattagcgggatctctagtccttctttgtctgaaaagcaatattttctccgctggatggaatggggtctggccagggttgcacagccacgcctgagacagcctccagaaacactgttaacgctccgacctaaacacggcggaacaaccgatgttggtgaaccgctttggcccgagccattgggcgtcgagcatttcctacgagagatgggccaattctacgaggccgagtcttgcctggtggaggcaggcagattgcccgcagggcagcgcaggttcgctcacttcccaggactggccagtgagctgttactgacggggctgcccctggagctgatagacgggtccacattaagcatgccagtgaggtgggtgaccggactcctcaaagagttgcacgtgaggctggagaggcggtcacgcctggtggtcctctccactgtgggagtgccaggaactggtaaatccacactgctgaacacaatgttcgggttacgctttgcaaccggaaaatcctgtggtcctcgcggagcctttatgcagctgatcacagtggctgagggcttcagccaggacctgggctgtgatcatattttagtcattgactctggcggacttattggcggagccctgacttccgctggagatcgtttcgagctggaggcatctctggctaccctgctgatgggactttccaacgttactgtgattagccttgcagaaacaaaggacattcccgctgctatactgcatgctttcctccggctggagaaaaccggtcacatgcccaattatcagttcgtgtaccaaaacctccatgacgtctctgtgccagggcctaggccgagagacaagcgccagttactggatcctccaggtgacctgagccgagccgcagcccaaatggagaagcagggcgacggcttcagagccctggccggactggctttctgcgatccagagaaacagcacatatggcacattccagggctgtggcatggagctccgccaatggccgctgtttccctcgcttactccgaggctattttcgagctcaaaaggtgtctcctggagaacatcaggaatgggctgagtaaccaaaataagaacatccagcagttgatcgaactggtgaggcgcctctag

SEQ ID NO: 108966 - DNA, 2667 bp, Artificial Sequence
  derived and/or modified sequence
atggaaggcgatgactgcgagtttcgatatggcgatggtacgaatgaggcacaggataacgactttcccactgttgaacgaagcaggctacaggagatgcttagccttcttgggctggagacttaccaggtgcagaagctgagtttgcaggattctcttcagatctccttcgacagtatgaaaaattgggcaccacaggtacccaaggatctgccctggaattttcttcgcaagctgcaggcactgaatgcagacgctcggaacaccacaatggtgctcgatgtactgcctgacgccagaccagtcgaaaaagaatcacagatggaggaggaaatcatttactgggatcccgcagatgatctggctgctgatatctatagtttcagcgaactgcctactccagatacgcctgtgaacccacttgacctcctgtgcgccctgctcctgagctctgatagctttcttcagcaggagattgcgttgaaaatggccttgtgccaatttgcgctcccactcgttttgcctgattccgagaaccactatcacacctttctcctatgggcgatgcgagggattgtcaggacctggtggtctcaacctccaagggggatgggatctttccgcgaggatagtgtggtactctctcgggctcccgcatttgcctttgtgcgaatggacgtaagttcaaacagcaaaagccagctactcaatgcggtcctgtccccaggtcatcggcagtgggattgcttctggcatcgcgacttgaacctggggaccaacgcgcgagagattagtgatgggctagtcgaaatttcctggttctttccatccgggagggaagacctggacatcttccccgagccagtggcctttctaaatctcagaggcgatattggatcccattggctgcagtttaaactgctaactgaaatttcctcagccgtctttatcctcaccgacaatatctctaagaaggaatacaagctgttatactcaatgaaggaaagtaccaccaagtactactttattctcagcccttaccgcggtaaaaggaacaccaacttgagatttcttaataagcttatccccgtactgaagatcgatcattcccacgtcctcgtcaaggtctcatccaccgattcagattcattcgttaaacgcatcagagccattgttgggaatgtgctgagggccccttgcagacgggtttccgtggaggacatggcccatgctgctcggaagctgggtctgaaggttgatgaggattgtgaggaatgccagaaggctaaggatagaatggagcgtatcactaggaagattaaggactctgatgcataccgaagggacgagttgcgcctccagggcgatccatggcggaaagctgcccaagtggagaaggaattttgccaactgcagtgggctgttgacccgcctgaaaaacacagagctgaattgcgtcggcgtctcctggaactcaggatgcagcagaacggacatgacccttcatctggcgtgcaagagttcatatccggaatcagctccccttctctgtcagagaaacagtatttcctccggtggatggaatggggcttagccagagtcgctcaacctaggttacgtcagcccccagagacattactgactttgcgcccaaagcatggaggtaccaccgatgtcggcgaacctttatggcctgaaccattgggcgttgaacactttctgcgggaaatgggccagttctacgaggcggagtcctgcctggtagaagccggacgtttacctgcgggtcagaggagattcgcacactttccagggctggcctccgaattgctcctcacgggtctccccctggaactgatagacggctcaacgttaagcatgccggttagatgggtgacaggcttactcaaggagctgcatgtacgtctcgagagacgcagcaggctggtggttctgtcaaccgtgggcgtccccggtactgggaaaagtactttgctcaacaccatgttcggactgcgattcgccacaggcaaatcttgcggcccacgaggtgccttcatgcagctgattaccgtcgcagagggcttctctcaagacctgggatgcgaccatattttggtcattgattccggtggtctgattgggggagcactgacctcagctggcgatcgatttgagttggaggcttctcttgctaccctactgatgggcttatccaacgttaccgtcatctctttggctgagactaaggacattccggcagccatcctccatgccttcctgcggctcgaaaaaaccggtcatatgcctaactatcagtttgtgtaccagaatcttcacgatgtgtccgtgcccggtcccagaccaagagacaaacggcagctcctggaccctccaggggatctcagccgggctgccgcacagatggagaaacagggcgatggctttcgcgctctcgctgggctggccttttgtgaccccgagaagcagcacatttggcatatacccggactgtggcacggggctcctcccatggctgccgtgtctctcgcttactctgaagcaatcttcgaactgaagcggtgcttgctagagaatataaggaacggtctctctaaccaaaataaaaacatacaacagctcatagaactcgtcagaaggctttag

SEQ ID NO: 108967 - DNA, 369 bp, Artificial Sequence
  derived and/or modified sequence
atggaaggcgatgattgcgagttccgttatggtgacggaaccaacgaggcccaggataatgacttcccaactgtcgaacggtcacggctgcaggaaatgctcagcctgttgggcctggagacctatcaggtccaaaagctcagcctgcaggatagtctccagatctccttcgattccatgaagaactgggcaccccaggtgcctaaggacctcccatggaattttcttcgtaaactccaggcccttaacgcagatgctcgaaatactacaatggtgctggacgtcctgccagacgcaagaccagtggagaaggagagccaaatggaagaagagatcatttactgggatccagctgatgacctcgcttag

SEQ ID NO: 108968 - protein, 1081 aa, Artificial Sequence
  derived and/or modified sequence
MDSLASLVLCGVSLLLSGTVEGAMDLILINSLPLVSDAETSLTCIASGWRPHEPITIGRDFEALMNQHQDPLEVTQDVTREWAKKVVWKREKASKINGAYFCEGRVRGEAIRIRTMKMRQQASFLPATLTMTVDKGDNVNISFKKVLIKEEDAVIYKNGSFIHSVPRHEVPDILEVHLPHAQPQDAGVYSARYIGGNLFTSAFTRLIVRRCEAQKWGPECNHLCTACMNNGVCHEDTGECICPPGFMGRTCEKACELHTFGRTCKERCSGQEGCKSYVFCLPDPYGCSCATGWKGLQCNEGIQRMTPKIVDLPDHIEVNSGKFNPICKASGWPLPTNEEMTLVKPDGTVLHPKDFNHTDHFSVAIFTIHRILPPDSGVWVCSVNTVAGMVEKPFNISVKVLPKPLNAPNVIDTGHNFAVINISSEPYFGDGPIKSKKLLYKPVNHYEAWQHIQVTNEIVTLNYLEPRTEYELCVQLVRRGEGGEGHPGPVRRFTTASIGLPPPRGLNLLPKSQTTLNLTWQPIFPSSEDDFYVEVERRSVQKSDQQNIKVPGNLTSVLLNNLHPREQYVVRARVNTKAQGEWSEDLTAWTLSDILPPQPENIKISNITHSSAVISWTILDGYSISSITIRYKVQGKNEDQHVDVKIKNATITQYQLKGLEPETAYQVDIFAENNIGSSNPAFSHELVTLPESQAPADLGGGKMLLIAILGSAGMTCLTVLLAFLIILQLKRANVQRRMAQAFQNVREEPAVQFNSGTLALNRKVKNNPDPTIYPVLDWNDIKFQDVIGEGNFGQVLKARIKKDGLRMDAAIKRMKEYASKDDHRDFAGELEVLCKLGHHPNIINLLGACEHRGYLYLAIEYAPHGNLLDFLRKSRVLETDPAFAIANSTASTLSSQQLLHFAADVARGMDYLSQKQFIHRDLAARNILVGENYVAKIADFGLSRGQEVYVKKTMGRLPVRWMAIESLNYSVYTTNSDVWSYGVLLWEIVSLGGTPYCGMTCAELYEKLPQGYRLEKPLNCDDEVYDLMRQCWREKPYERPSFAQILVSLNRMLEERKTYVNTTLYEKFTYAGIDCSAEEAA

SEQ ID NO: 108969 - DNA, 3246 bp, Artificial Sequence
  derived and/or modified sequence
atggacagcctggccagcctggtgctgtgcggcgtgagcctgctgctgagcggcaccgtggagggcgccatggacctgatcctgatcaacagcctgcccctggtgagcgacgccgagaccagcctgacctgcatcgccagcggctggagaccccacgagcccatcaccatcggcagagacttcgaggccctgatgaaccagcaccaggaccccctggaggtgacccaggacgtgaccagagagtgggccaagaaggtggtgtggaagagagagaaggccagcaagatcaacggcgcctacttctgcgagggcagagtgagaggcgaggccatcagaatcagaaccatgaagatgagacagcaggccagcttcctgcccgccaccctgaccatgaccgtggacaagggcgacaacgtgaacatcagcttcaagaaggtgctgatcaaggaggaggacgccgtgatctacaagaacggcagcttcatccacagcgtgcccagacacgaggtgcccgacatcctggaggtgcacctgccccacgcccagccccaggacgccggcgtgtacagcgccagatacatcggcggcaacctgttcaccagcgccttcaccagactgatcgtgagaagatgcgaggcccagaagtggggccccgagtgcaaccacctgtgcaccgcctgcatgaacaacggcgtgtgccacgaggacaccggcgagtgcatctgcccccccggcttcatgggcagaacctgcgagaaggcctgcgagctgcacaccttcggcagaacctgcaaggagagatgcagcggccaggagggctgcaagagctacgtgttctgcctgcccgacccctacggctgcagctgcgccaccggctggaagggcctgcagtgcaacgagggcatccagagaatgacccccaagatcgtggacctgcccgaccacatcgaggtgaacagcggcaagttcaaccccatctgcaaggccagcggctggcccctgcccaccaacgaggagatgaccctggtgaagcccgacggcaccgtgctgcaccccaaggacttcaaccacaccgaccacttcagcgtggccatcttcaccatccacagaatcctgccccccgacagcggcgtgtgggtgtgcagcgtgaacaccgtggccggcatggtggagaagcccttcaacatcagcgtgaaggtgctgcccaagcccctgaacgcccccaacgtgatcgacaccggccacaacttcgccgtgatcaacatcagcagcgagccctacttcggcgacggccccatcaagagcaagaagctgctgtacaagcccgtgaaccactacgaggcctggcagcacatccaggtgaccaacgagatcgtgaccctgaactacctggagcccagaaccgagtacgagctgtgcgtgcagctggtgagaagaggcgagggcggcgagggccaccccggccccgtgagaagattcaccaccgccagcatcggcctgcccccccccagaggcctgaacctgctgcccaagagccagaccaccctgaacctgacctggcagcccatcttccccagcagcgaggacgacttctacgtggaggtggagagaagaagcgtgcagaagagcgaccagcagaacatcaaggtgcccggcaacctgaccagcgtgctgctgaacaacctgcaccccagagagcagtacgtggtgagagccagagtgaacaccaaggcccagggcgagtggagcgaggacctgaccgcctggaccctgagcgacatcctgcccccccagcccgagaacatcaagatcagcaacatcacccacagcagcgccgtgatcagctggaccatcctggacggctacagcatcagcagcatcaccatcagatacaaggtgcagggcaagaacgaggaccagcacgtggacgtgaagatcaagaacgccaccatcacccagtaccagctgaagggcctggagcccgagaccgcctaccaggtggacatcttcgccgagaacaacatcggcagcagcaaccccgccttcagccacgagctggtgaccctgcccgagagccaggcccccgccgacctgggcggcggcaagatgctgctgatcgccatcctgggcagcgccggcatgacctgcctgaccgtgctgctggccttcctgatcatcctgcagctgaagagagccaacgtgcagagaagaatggcccaggccttccagaacgtgagagaggagcccgccgtgcagttcaacagcggcaccctggccctgaacagaaaggtgaagaacaaccccgaccccaccatctaccccgtgctggactggaacgacatcaagttccaggacgtgatcggcgagggcaacttcggccaggtgctgaaggccagaatcaagaaggacggcctgagaatggacgccgccatcaagagaatgaaggagtacgccagcaaggacgaccacagagacttcgccggcgagctggaggtgctgtgcaagctgggccaccaccccaacatcatcaacctgctgggcgcctgcgagcacagaggctacctgtacctggccatcgagtacgccccccacggcaacctgctggacttcctgagaaagagcagagtgctggagaccgaccccgccttcgccatcgccaacagcaccgccagcaccctgagcagccagcagctgctgcacttcgccgccgacgtggccagaggcatggactacctgagccagaagcagttcatccacagagacctggccgccagaaacatcctggtgggcgagaactacgtggccaagatcgccgacttcggcctgagcagaggccaggaggtgtacgtgaagaagaccatgggcagactgcccgtgagatggatggccatcgagagcctgaactacagcgtgtacaccaccaacagcgacgtgtggagctacggcgtgctgctgtgggagatcgtgagcctgggcggcaccccctactgcggcatgacctgcgccgagctgtacgagaagctgccccagggctacagactggagaagcccctgaactgcgacgacgaggtgtacgacctgatgagacagtgctggagagagaagccctacgagagacccagcttcgcccagatcctggtgagcctgaacagaatgctggaggagagaaagacctacgtgaacaccaccctgtacgagaagttcacctacgccggcatcgactgcagcgccgaggaggccgcctag

SEQ ID NO: 108970 - DNA, 3246 bp, Artificial Sequence
  derived and/or modified sequence
atggatagccttgcttcactggtcctgtgcggagtctcccttctcttaagtgggactgtggaaggcgcgatggatctgatcctgattaactccttgccactcgtgtccgacgccgaaacgagtcttacctgcatcgctagcgggtggcggcctcacgagcctatcaccataggccgtgacttcgaggctctcatgaatcagcaccaggatcccctggaggtaactcaagacgtcaccagggaatgggcaaagaaggtggtttggaaaagagaaaaggcctccaaaattaacggcgcctatttctgtgaggggcgggtgcgcggggaggctattcgaattagaaccatgaagatgagacaacaggcaagctttctgcctgcaaccctgactatgactgtagacaagggcgacaatgtgaacatatcatttaagaaagttctgattaaagaggaggatgccgttatctataaaaatggctctttcatacattccgtgcctcgacatgaggtccccgatattctggaggttcacttgccgcatgctcagccacaggacgctggagtttatagtgcccggtacattggtggcaacctattcacctcagcatttaccagattaattgttcgacgctgtgaggctcagaagtggggaccggagtgcaatcacctgtgtactgcgtgtatgaataatggagtctgccacgaggatacaggcgagtgtatctgtcccccaggcttcatgggcagaacatgcgagaaggcgtgtgaactgcacacatttggccggacctgcaaggagcggtgttcaggacaggaagggtgtaagtcctacgtgttctgcctgccagacccgtacggatgctcctgcgcaacagggtggaagggcctccagtgtaatgaaggaatccagagaatgactcctaaaatcgttgacctgcctgaccacatcgaggtcaattctggaaagttcaaccctatatgcaaggctagcggctggccattgccaacaaacgaagaaatgacactggtcaaacctgatggcaccgtcctgcaccctaaagacttcaatcacactgatcatttctccgttgccatcttcacaattcacaggatcctcccccccgattccggagtttgggtatgtagcgtgaacaccgtggccggcatggttgaaaaaccgttcaacatatctgtcaaagtgttaccaaaacctctgaacgcaccaaacgtgatagatacagggcataattttgctgtgattaacatctcttccgagccgtatttcggggatggacctattaaaagcaaaaagttgctgtacaagccagttaaccattatgaggcttggcagcatatccaggtgactaatgagattgtaacgctgaactacctggaaccaagaacagaatatgagttatgcgtgcaactggtcaggagaggcgaaggcggcgaggggcaccccgggcctgtgcgaagatttaccacagcatctattggtctcccgccaccacgaggattgaacctgctcccgaagtcgcagaccactctaaacttgacctggcaacccattttcccatcttcagaggatgatttttacgtcgaagtcgaacgaagatctgtgcagaaatccgaccagcagaacattaaagtgcctggaaatttaaccagcgtgttacttaacaacttgcaccctagagagcagtacgtggtgcgggcacgcgtgaacactaaggcccagggagagtggagtgaagacttgacagcatggaccctaagcgacatcctgcctcctcagcccgaaaacattaagatctccaatataacacacagttctgccgtgatttcctggactatactggacggatatagtatatccagcatcacaatccggtacaaggtgcagggaaaaaatgaagaccagcacgtggatgttaaaatcaagaacgcgactatcactcagtatcaactgaagggtctggaacccgagacagcttaccaagtcgacatcttcgccgaaaataatataggctccagcaatccggccttcagccatgagctcgtcaccctccccgagtcccaggcccccgcagatttgggtggagggaaaatgctcttgatagccattctgggatccgcgggcatgacctgtctgactgtccttctggcattcctaatcattctgcagttaaagagagcaaatgttcaacgacggatggcacaggccttccagaatgtgagagaagagcccgccgtgcagttcaattccggcacattggcactcaacaggaaggtaaagaataacccggatccaacgatctatcctgtgctggattggaacgacataaaattccaggacgtcatcggcgaaggcaacttcggccaggtgctcaaggcccgtatcaagaaagatgggcttcgcatggacgctgccatcaaaaggatgaaagagtatgctagcaaggatgaccaccgggacttcgctggggaactggaggtgctgtgcaaactgggtcatcacccaaatatcattaacctgctcggcgcttgcgaacatagaggctatctgtacctggccatagagtatgcccctcatggaaatcttctggactttcttcgaaaatctcgggtacttgagacagatcctgcttttgccatcgccaacagtactgcttcaacattgagcagccagcagctgttgcacttcgctgccgatgtggcgcggggtatggattacttgtctcagaaacaatttatccatcgggacttagcagccaggaatatactggtaggcgaaaactacgtggcgaaaattgctgatttcggcttaagtcgcggccaagaagtgtatgtgaaaaagactatgggtcgactaccggttaggtggatggccatcgagtccttaaattatagtgtctacaccactaattcggacgtttggagctacggagttcttctttgggaaattgtgtcactgggagggacgccatattgcggaatgacctgtgccgaactgtatgagaagctaccccagggatacagactggaaaagccactgaactgtgatgatgaggtgtacgacttaatgcgccaatgctggagggaaaaaccctatgagagaccctcattcgcacagattttagtgtctcttaataggatgctggaagaaagaaaaacttacgttaacactactctgtacgaaaagttcacttacgccggaatcgattgtagtgccgaagaggccgcatag

SEQ ID NO: 108971 - DNA, 3246 bp, Artificial Sequence
  derived and/or modified sequence
atggacagcctggccagcctggtgctgtgtggggtgtccctgctgctgtctggaacagtggagggcgccatggacctgatcctgatcaacagcctgcccctggtgtctgatgctgagaccagcctgacctgcatcgccagcggctggaggcctcatgagcccatcaccatcggccgggactttgaggccctgatgaaccagcaccaggaccccctggaggtgacccaggatgtgacccgggagtgggccaagaaggtggtgtggaagcgggagaaggccagcaagatcaatggagcctacttctgtgagggccgggtgcggggggaggccatccgcatccgcaccatgaagatgaggcagcaggccagcttcctgcctgccaccctgaccatgacagtggacaagggggacaacgtgaacatctccttcaagaaggtgctgatcaaggaggaggatgctgtgatctacaagaatggcagcttcatccacagcgtgcccaggcatgaggtgcctgacatcctggaggtgcacctgccccacgcccagccccaggatgctggggtgtacagcgcccgctacatcggcggcaacctcttcaccagcgccttcacccggctgattgtgagaagatgtgaggcccagaagtggggccctgagtgcaaccacctgtgcacagcctgcatgaacaacggggtgtgccatgaagatactggagagtgcatctgccccccaggcttcatgggccgcacctgtgagaaggcctgtgagctgcacaccttcggccgcacctgcaaggagcgctgcagcggccaggagggctgcaagagctatgtgttctgcctgcctgacccctacggctgcagctgtgccaccggctggaagggcctgcagtgcaatgaaggcatccagaggatgacccccaagatcgtggacctgcctgaccacatcgaggtgaacagcggcaagttcaaccccatctgcaaggccagcggctggcccctgcccaccaatgaggagatgaccctggtgaagccagatggcaccgtgctgcaccccaaggacttcaaccacacagaccacttctctgtggccatcttcaccatccaccgcatcctgcccccagacagcggcgtgtgggtgtgcagcgtgaacacagtggccggcatggtggagaagcccttcaacatctctgtgaaggtgctgcccaagcccctgaatgccccaaatgtgattgacaccggccacaactttgctgtgatcaacatcagcagcgagccctactttggagatggccccatcaagagcaagaagctgctgtacaagcctgtgaaccactatgaggcctggcagcacatccaggtgaccaatgagatcgtgaccctgaactacctggagcccaggacagaatatgagctgtgtgtgcagctggtgcggcggggggagggcggggagggccaccctggccctgtgcggcgcttcaccacagccagcatcggcctgcccccaccccggggcctgaacctgctgcccaagagccagaccaccctgaacctgacctggcagcccatcttccccagcagtgaagatgacttctacgtggaggtggagaggagatctgtgcagaagagtgaccagcagaacatcaaggtgcccggcaacctgacctctgtgctgctgaacaacctgcacccccgggagcagtatgtggtgcgggcccgggtgaacaccaaggcccagggcgagtggagcgaggacctgacagcctggaccctgagtgacatcctgcccccccagcctgagaacatcaagatcagcaacatcacccacagcagcgctgtgatctcctggaccatcctggatggctacagcatcagcagcatcaccatccgctacaaggtgcagggcaagaatgaagaccagcacgtggatgtgaagatcaagaatgccaccatcacccagtaccagctgaagggcctggagcctgagacagcctaccaggtggacatctttgctgagaacaacatcggcagcagcaacccagccttcagccatgagctggtgaccctgcctgagagccaggccccagctgacctgggcggcggcaagatgctgctgattgccatcctgggcagcgctggcatgacctgcctgactgtgctgctggccttcctgatcatcctgcagctgaagagggccaacgtgcagaggaggatggcccaggccttccagaatgtgcgggaggagcctgctgtgcagttcaacagcggcaccctggccctgaacaggaaggtgaagaacaacccagaccccaccatctaccctgtgctggactggaatgacatcaagttccaggatgtgattggagagggcaactttggccaggtgctgaaggcccgcatcaagaaggatggcctgaggatggatgctgccatcaagaggatgaaggagtatgccagcaaggatgaccaccgggactttgctggggagctggaggtgctgtgcaagctgggccaccaccccaacatcatcaacctgctgggcgcctgtgagcaccggggctacctgtacctggccattgaatatgccccccacggcaacctgctggacttcctgaggaagagccgggtgctggagacagatcctgcctttgccatcgccaacagcacagccagcaccctgagcagccagcagctgctgcactttgctgctgatgtggcccggggcatggactacctgagccagaagcagttcatccaccgggacctggccgccaggaacatcctggtgggagaaaattatgtggccaagattgctgactttggcctgagccggggccaggaggtgtatgtgaagaagaccatgggccgcctgcctgtgcgctggatggccatcgagagcctgaactacagcgtgtacaccaccaacagtgatgtgtggagctatggagtgctgctgtgggagatcgtgtccctgggcggcaccccctactgcggcatgacctgtgccgagctgtatgagaagctgccccagggctaccgcctggagaagcccctgaactgtgatgatgaggtgtatgacctgatgaggcagtgctggagggagaagccctatgagcggcccagctttgcccagatcctggtgtccctgaacaggatgctggaggagaggaagacctacgtgaacaccaccctgtatgagaagttcacctacgccggcatcgactgcagcgctgaggaggccgcctag

SEQ ID NO: 108972 - DNA, 3246 bp, Artificial Sequence
  derived and/or modified sequence
atggacagcctggccagcctggtgctgtgcggcgtgagcctgctgctctccgggaccgtcgaaggcgcaatggatttaatcttaataaatagtctccctctggtctctgatgccgagacgtcgctgacctgtatcgcaagcggatggagaccccatgagcccataactattggccgggatttcgaagcgctgatgaatcaacatcaggatcccctcgaggtaactcaggacgttacgagagaatgggctaaaaaagttgtgtggaaacgggaaaaggcatccaagatcaacggggcctacttctgcgagggcagggtacgaggggaggccatacggattagaaccatgaagatgcggcaacaggctagttttttgcctgctacactaactatgactgtagataagggcgacaacgtcaatatttctttcaagaaagtgctgatcaaagaggaagacgccgtgatatacaagaacgggtcatttatacattctgtgcccaggcacgaagtacccgatatcttagaagtgcatttgccacatgcacagcctcaagatgcaggtgtgtatagcgccaggtatatcggaggtaacctattcaccagtgcctttaccagactgatcgtaaggcggtgcgaagcccagaaatggggtccagaatgtaatcacttgtgtacggcatgcatgaacaacggagtttgccacgaggacactggcgagtgcatatgcccacctggattcatggggcgcacgtgcgagaaagcctgtgagcttcatacgttcgggcggacatgtaaggaacgctgcagtggccaagaaggatgcaagtcctacgtcttctgtctacctgacccttacggttgcagttgcgcgaccggctggaagggcctgcagtgtaacgagggtattcagcggatgaccccaaaaattgtggacctgccggatcacatcgaagtgaacagcggcaaatttaatcccatttgtaaggcatccgggtggccattacccacaaacgaagagatgacccttgtcaagccagatggaacagtactacaccctaaggatttcaaccacaccgaccatttttctgtggcgatttttacgatccaccggatccttccaccagattccggagtctgggtgtgctccgtgaataccgtggccggtatggtcgagaagccgttcaacatcagtgttaaggtgttacccaagcctctcaatgctcccaacgtaattgacacagggcacaactttgccgtgattaatatcagcagtgagccctattttggtgatggccccattaagtccaagaaattattgtacaaaccagtgaaccactatgaagcctggcagcatatccaggtcacaaacgaaatcgtcacactcaattatctggaaccaaggactgaatacgagttatgtgttcagctggtaaggcggggtgaaggcggagagggacatcccggtcccgtaagacgcttcacaaccgccagtattgggttgcccccgccacgcggcctgaatctcctgccaaagtctcagacaaccttgaacctgacgtggcagcctattttccctagcagcgaagacgacttctacgtggaggttgaaagacgctctgtgcagaagtctgatcagcagaacatcaaggtgccgggcaatctaactagtgtgctgcttaataatctccacccccgagagcagtatgtcgttagagcaagagtgaacaccaaagcccagggggaatggagcgaggacctgactgcctggaccctatcagacatattgcctccccagcctgagaatattaaaatttcaaacattactcacagttcagccgtgatctcatggactatcctcgatggctattctatttcttcaattactattcgctataaagttcagggcaaaaatgaggaccagcatgtcgacgtgaagattaaaaacgccacaatcacacaataccagctcaagggtcttgaaccagagacagcctaccaggtggatatttttgctgagaataacatcgggtctagcaaccccgcattctctcacgaactggtgaccctgccggagagccaggctcccgcggatctcggaggcgggaagatgcttcttatcgctatattagggagcgctggtatgacatgcctgaccgtgctgttggcctttttaatcattctgcaacttaagagagccaatgtacaacggcggatggcccaggcttttcagaacgtgcgggaagagccagctgtgcagtttaatagcggtactctggcactgaatcgaaaggtgaaaaataaccccgatcctacgatataccctgtcttggattggaatgacatcaagttccaggatgtgattggcgaagggaattttggtcaggtcctcaaggccaggatcaagaaagacggtctgcgtatggatgctgccattaaaagaatgaaggaatatgcttctaaggacgaccaccgtgatttcgcgggagaactggaagtgctgtgcaagctagggcaccacccaaacattatcaacctgctgggggcatgcgaacataggggttatctgtacctggcaattgagtacgcacctcacgggaacctgctggactttttgcggaagtcacgggttctggagacagacccggcctttgcaatcgcaaattccaccgctagcaccctgtcgtcccagcagctccttcacttcgcagctgacgtagcgcgaggaatggattacctgtcccagaagcagttcatccatagagatctggcagcacgtaacatcctggttggcgagaattacgttgctaaaattgccgatttcggactgtcgagaggacaagaagtatacgtaaaaaaaactatggggcggctccccgtaagatggatggctatagagtccctgaactatagtgtgtacaccaccaactcagacgtctggtcttacggggtccttctctgggagatagtatcactgggcggtacgccctactgtggcatgacatgcgcagagctgtacgagaagttgcctcagggttacaggttggagaaacctctgaactgcgatgatgaggtctatgacctgatgagacaatgttggcgtgaaaagccctacgagcgcccatcgttcgctcaaattttggttagcctcaatcgcatgctggaggaacgcaaaacttacgttaacactactctttacgaaaagtttacatatgctggtattgattgctctgcagaagaggctgcctag

SEQ ID NO: 108973 - DNA, 3246 bp, Artificial Sequence
  derived and/or modified sequence
atggacagtttagcatccctggtgttgtgcggcgtctccctgttgctgagcgggacagtggagggcgctatggacttgatcctcattaacagcctgccgcttgtgtcagatgctgagacatctctcacttgcattgcctccggctggagacctcacgaacccattacgattggcagggacttcgaggccctgatgaaccagcatcaggacccattagaagtgactcaagatgtgacccgagagtgggctaaaaaggttgtctggaaaagggaaaaggctagcaagattaacggcgcatacttctgcgagggacgggtcaggggcgaggctatccggattcgaaccatgaagatgcggcagcaggcaagttttctacccgcaacactgacaatgacagtagataaaggtgataatgtgaacattagctttaaaaaggtgctaattaaggaggaggacgcagttatttacaagaacggctctttcatccactctgttcccaggcacgaggtgcccgacatactggaagtacacctgcctcacgctcagccacaagatgccggagtctactccgctcgctatatcggaggcaatctgttcacatcagcatttacgcgcctgatagtgcggagatgcgaggcccagaagtggggcccagaatgcaatcatctctgtacggcatgtatgaataatggtgtttgtcatgaggacaccggcgagtgtatttgcccccctggcttcatgggcaggacatgcgagaaggcatgcgaattgcacactttcggaaggacctgcaaggagcgctgctccggccaggaggggtgcaaaagctacgtattctgtcttccagacccttacggttgtagttgtgccacgggttggaaaggtctccaatgcaatgaaggaatacagaggatgacccctaagatcgttgacttacctgaccacatcgaagtaaatagtggaaagttcaatcccatttgcaaggcttccggttggcctttgccgactaatgaggagatgactttagtgaagcccgacgggaccgtgctgcatccaaaagacttcaatcacaccgatcatttctcagtagccatttttaccattcaccgcattttaccgcctgattcgggagtgtgggtgtgcagcgtgaacactgtagcgggaatggtcgagaagcccttcaatatctccgtcaaggtgctgccaaagccattgaatgctccaaatgtgatagacactgggcataatttcgccgtgattaatatttcgagtgaaccctatttcggagatggccctatcaaaagcaaaaaattgctctataaacccgtgaaccactacgaagcttggcagcatattcaggtcacaaacgagattgtgacccttaactacctggaaccccgaaccgagtacgaactctgtgtccaattggtgaggcggggtgaaggcggagagggacacccgggaccggtacgacgattcaccactgctagcattggacttcccccacctcggggattgaatctgctccctaagtcgcagactaccttaaatctgacatggcaaccaatattcccgtccagcgaggatgatttctatgtggaggtcgagcgcaggtccgtccagaagagcgatcagcagaatataaaagtgcctggtaacttgacttccgtattgcttaataaccttcacccgagggaacaatacgtcgtgagagcccgagtaaacacaaaagcacagggcgaatggtctgaagacctcaccgcctggacattgtcagacatccttccaccccagcctgaaaacatcaagatctccaacatcacacattcaagcgccgtaatttcatggaccatactggatggttattcaatttctagtattacaattcgatataaggtgcaggggaagaatgaagaccaacacgtcgacgttaagatcaagaatgctaccattactcaatatcagcttaagggccttgagcccgagactgcttaccaggtggatattttcgctgagaataacataggatcatcaaacccagctttttcccacgagctggtgacattaccagaaagccaagccccagctgacctggggggaggcaaaatgttgctaattgccattctaggatccgctgggatgacatgtctcaccgtgctcttagcatttctcatcattctacagttgaaacgagctaatgtgcagcgcagaatggcccaggcttttcaaaacgtgagagaagagcctgctgtacaattcaattcgggcacattggctttgaatcgcaaggtgaagaacaaccccgaccccacaatttacccagtgctggattggaatgatatcaaatttcaagacgtcattggggaaggcaattttgggcaagtgctgaaggcacggattaagaaggatggcttgcggatggacgccgcaattaagaggatgaaagagtatgctagcaaagatgatcacagggattttgctggagaactggaggttctgtgtaagctcgggcaccaccccaacataataaacctgctgggtgcctgcgaacaccggggatacttgtatcttgctatagaatacgcacctcatggcaacctcctggattttctgcgtaagtcccgagtcctggaaacagatcccgcattcgctatcgctaacagcacagcctctacgctgagcagccaacagttgttgcacttcgccgcagatgtggcacgcggtatggactatcttagccagaagcagttcatccacagggaccttgctgccagaaatattctcgtgggggaaaattacgttgccaagatagccgacttcgggctcagtcggggacaagaggtgtacgtgaaaaagacaatgggtaggctgcccgtgcggtggatggccattgagtccctgaactacagcgtgtacacgacgaattccgacgtgtggagctatggggtattactttgggaaatcgttagtctggggggtacgccatattgtggcatgacttgtgccgagttatacgaaaagttgccccagggctacaggctggaaaaaccactgaattgtgatgacgaggtgtatgacttgatgagacagtgttggcgggagaagccttacgagagacccagctttgcgcagattttggtttccctgaacagaatgctggaggagcgaaagacctatgtaaataccacactgtacgagaagttcacctacgcaggcatagactgcagcgcagaggaggcagcttag

SEQ ID NO: 108974 - DNA, 3935 bp, Artificial Sequence
  derived and/or modified sequence
agacagaaatgagactgttacagcctgcttctgtgctgttccttcttgcctctaacttgtaaacaagacgtagtaggacgatgctaatggaaagtcacaaaccgctgggtttttgaaaggatccttgggacctcatgcacatttgtggaaactggatggagagatttggggaagcatggactctttagccagcttagttctctgtggagtcagcttgctcctttctggaactgtggaaggtgccatggacttgatcttgatcaattccctacctcttgtatctgatgctgaaacatctctcacctgcattgcctctgggtggcgcccccatgagcccatcaccataggaagggactttgaagccttaatgaaccagcaccaggatccgctggaagttactcaagatgtgaccagagaatgggctaaaaaagttgtttggaagagagaaaaggctagtaagatcaatggtgcttatttctgtgaagggcgagttcgaggagaggcaatcaggatacgaaccatgaagatgcgtcaacaagcttccttcctaccagctactttaactatgactgtggacaagggagataacgtgaacatatctttcaaaaaggtattgattaaagaagaagatgcagtgatttacaaaaatggttccttcatccattcagtgccccggcatgaagtacctgatattctagaagtacacctgcctcatgctcagccccaggatgctggagtgtactcggccaggtatataggaggaaacctcttcacctcggccttcaccaggctgatagtccggagatgtgaagcccagaagtggggacctgaatgcaaccatctctgtactgcttgtatgaacaatggtgtctgccatgaagatactggagaatgcatttgccctcctgggtttatgggaaggacgtgtgagaaggcttgtgaactgcacacgtttggcagaacttgtaaagaaaggtgcagtggacaagagggatgcaagtcttatgtgttctgtctccctgacccctatgggtgttcctgtgccacaggctggaagggtctgcagtgcaatgaaggcatacagaggatgaccccaaagatagtggatttgccagatcatatagaagtaaacagtggtaaatttaatcccatttgcaaagcttctggctggccgctacctactaatgaagaaatgaccctggtgaagccggatgggacagtgctccatccaaaagactttaaccatacggatcatttctcagtagccatattcaccatccaccggatcctcccccctgactcaggagtttgggtctgcagtgtgaacacagtggctgggatggtggaaaagcccttcaacatttctgttaaagttcttccaaagcccctgaatgccccaaacgtgattgacactggacataactttgctgtcatcaacatcagctctgagccttactttggggatggaccaatcaaatccaagaagcttctatacaaacccgttaatcactatgaggcttggcaacatattcaagtgacaaatgagattgttacactcaactatttggaacctcggacagaatatgaactctgtgtgcaactggtccgtcgtggagagggtggggaagggcatcctggacctgtgagacgcttcacaacagcttctatcggactccctcctccaagaggtctaaatctcctgcctaaaagtcagaccactctaaatttgacctggcaaccaatatttccaagctcggaagatgacttttatgttgaagtggagagaaggtctgtgcaaaaaagtgatcagcagaatattaaagttccaggcaacttgacttcggtgctacttaacaacttacatcccagggagcagtacgtggtccgagctagagtcaacaccaaggcccagggggaatggagtgaagatctcactgcttggacccttagtgacattcttcctcctcaaccagaaaacatcaagatttccaacattacacactcctcagctgtgatttcttggacaatattggatggctattctatttcttctattactatccgttacaaggttcaaggcaagaatgaagaccagcacgttgatgtgaagataaagaatgccaccatcactcagtatcagctcaagggcctagagcctgaaacagcataccaggtggacatttttgcagagaacaacatagggtcaagcaacccagccttttctcatgaactggtgaccctcccagaatctcaagcaccagcggacctcggaggggggaagatgctgcttatagccatccttggctctgctggaatgacctgcctgactgtgctgttggcctttctgatcatattgcaattgaagagggcaaatgtgcaaaggagaatggcccaagccttccaaaacgtgagggaagaaccagctgtgcagttcaactcagggactctggccctaaacaggaaggtcaaaaacaacccagatcctacaatttatccagtgcttgactggaatgacatcaaatttcaagatgtgattggggagggcaattttggccaagttcttaaggcgcgcatcaagaaggatgggttacggatggatgctgccatcaaaagaatgaaagaatatgcctccaaagatgatcacagggactttgcaggagaactggaagttctttgtaaacttggacaccatccaaacatcatcaatctcttaggagcatgtgaacatcgaggctacttgtacctggccattgagtacgcgccccatggaaaccttctggacttccttcgcaagagccgtgtgctggagacggacccagcatttgccattgccaatagcaccgcgtccacactgtcctcccagcagctccttcacttcgctgccgacgtggcccggggcatggactacttgagccaaaaacagtttatccacagggatctggctgccagaaacattttagttggtgaaaactatgtggcaaaaatagcagattttggattgtcccgaggtcaagaggtgtatgtgaaaaagacaatgggaaggctcccagtgcgctggatggccatcgagtcactgaattacagtgtgtacacaaccaacagtgatgtatggtcctatggtgtgttactatgggagattgttagcttaggaggcacaccctactgcgggatgacttgtgcagaactctacgagaagctgccccagggctacagactggagaagcccctgaactgtgatgatgaggtgtatgatctaatgagacaatgctggcgggagaagccttatgagaggccatcatttgcccagatattggtgtccttaaacagaatgttagaggagcgaaagacctacgtgaataccacgctttatgagaagtttacttatgcaggaattgactgttctgctgaagaagcggcctaggacagaacatctgtataccctctgtttccctttcactggcatgggagacccttgacacctgctgagaaaacatgcctctgccaaaggatgtgatatataagtgtacatatgtgctgtacacctgggaccttcaccactgtagatcccatgcatggatctatgtagtatgctctgactctaataggactgtatatactgttttaagaatgggctgaaatcagaatgcctgtttgtggtttcatatgcaataatatatttttttaaaaatgtggacttcataggaaggcgtgagtacaattagtataatgcataactcattgttgtcctagatattttgatatttacctttatgttgaatgctattaaatgttttcctgtgtcaaagtaaaatattgttaataaacctaacaatgaccctgatagtacaggttaagtgagagaactatatgaattctaacaagtcataggttaatatttaagacactgaaaaatctaagtgatataaatcagattc

SEQ ID NO: 108975 - protein, 976 aa, Artificial Sequence
  derived and/or modified sequence
MDSLASLVLCGVSLLLSASFLPATLTMTVDKGDNVNISFKKVLIKEEDAVIYKNGSFIHSVPRHEVPDILEVHLPHAQPQDAGVYSARYIGGNLFTSAFTRLIVRRCEAQKWGPECNHLCTACMNNGVCHEDTGECICPPGFMGRTCEKACELHTFGRTCKERCSGQEGCKSYVFCLPDPYGCSCATGWKGLQCNEGIQRMTPKIVDLPDHIEVNSGKFNPICKASGWPLPTNEEMTLVKPDGTVLHPKDFNHTDHFSVAIFTIHRILPPDSGVWVCSVNTVAGMVEKPFNISVKVLPKPLNAPNVIDTGHNFAVINISSEPYFGDGPIKSKKLLYKPVNHYEAWQHIQVTNEIVTLNYLEPRTEYELCVQLVRRGEGGEGHPGPVRRFTTASIGLPPPRGLNLLPKSQTTLNLTWQPIFPSSEDDFYVEVERRSVQKSDQQNIKVPGNLTSVLLNNLHPREQYVVRARVNTKAQGEWSEDLTAWTLSDILPPQPENIKISNITHSSAVISWTILDGYSISSITIRYKVQGKNEDQHVDVKIKNATITQYQLKGLEPETAYQVDIFAENNIGSSNPAFSHELVTLPESQAPADLGGGKMLLIAILGSAGMTCLTVLLAFLIILQLKRANVQRRMAQAFQNREEPAVQFNSGTLALNRKVKNNPDPTIYPVLDWNDIKFQDVIGEGNFGQVLKARIKKDGLRMDAAIKRMKEYASKDDHRDFAGELEVLCKLGHHPNIINLLGACEHRGYLYLAIEYAPHGNLLDFLRKSRVLETDPAFAIANSTASTLSSQQLLHFAADVARGMDYLSQKQFIHRDLAARNILVGENYVAKIADFGLSRGQEVYVKKTMGRLPVRWMAIESLNYSVYTTNSDVWSYGVLLWEIVSLGGTPYCGMTCAELYEKLPQGYRLEKPLNCDDEVYDLMRQCWREKPYERPSFAQILVSLNRMLEERKTYVNTTLYEKFTYAGIDCSAEEAA

SEQ ID NO: 108976 - protein, 411 aa, Artificial Sequence
  derived and/or modified sequence
MDGRAELPAFPRAGAPPLAASDTVPAAPEGAGAARPAAPLRPTSFSVLDILDPNKFNSRRRRCVLLGPVAPAACAPCASAPCAPAPAASGRPPRAEELERRALAGAGGVGAAGAEPPNAGDPFKAGEAETNDTNGYSSGGGGHSPSADSGDEVPDDEDDDEDEAPETEAARGAEEARGGGGGLGARGSGCQGAAETDASPGATVDEAAAPGPRENSPVAQGPPGGAAAPGGAGTTPQGTATAAKPKRKRTGSDSKSGKPRRARTAFTYEQLVALENKFKATRYLSVCERLNLALSLSLTETQVKIWFQNRRTKWKKQNPGADTSAPTGGGGGPGPGAGPGTGLPGGLSPLSPSPPMGAPLGMHGPAGYPAHGPGGLVCAAQLPFLSSPAVLSPFVLGSQTYGAPAFYAPHL

SEQ ID NO: 108977 - DNA, 117 bp, Artificial Sequence
  derived and/or modified sequence
acctacgagcagctcgtggcgctggagaacaagttcaaggccacgcgctacctgtcggtgtgcgagcgcctcaacctggccgtgtcgctcagcctcaccgagacgcaggtgaagatc

SEQ ID NO: 108978 - DNA, 1236 bp, Artificial Sequence
  derived and/or modified sequence
atggacggtcgcgccgagttgccagcatttcctcgggccggagcacctccactagccgcctcagacactgtccctgccgcacccgagggcgccggcgccgcccgcccagcagccccactccgtccaactagtttctccgtgctggatatcctggacccaaataagtttaattcgaggaggagacgctgcgttctccttggccctgtggcgcccgctgcttgcgcaccatgcgcctctgccccatgcgcgcctgctccagccgcaagtgggagacctccacgggccgaggagctggagagacgagccctcgcaggggccggaggagtgggggcagcaggagccgagcctcctaatgcaggcgacccttttaaggcaggcgaagccgaaactaacgacaccaacggctattcatccgggggtgggggacacagcccctccgcggattcaggcgatgaggttcctgacgacgaagatgatgatgaagacgaggcgccagagactgaagcagcaagaggagctgaggaggctcgcggtggcggtggcggtctgggagctcggggctccggctgtcagggggcggctgaaacagatgcaagtccgggagcaactgtggacgaagctgccgccccaggccccagagagaattccccagtcgctcagggcccccccggcggagcggcagcccctggcggcgccggcacaaccccccagggcaccgcaaccgccgccaagcccaaacgcaaaaggacgggatcagactccaaatcgggtaaacctcgccgggctcggactgcctttacttacgagcagttggtggccttagagaacaaatttaaggctacccgttacctgtcagtatgtgaacggcttaaccttgcgctcagcctgagcttgaccgagacccaggtcaagatttggtttcaaaaccgaagaacaaagtggaaaaaacagaaccccggagcagacacaagcgccccaactggcggtggtggtggcccgggacctggcgccgggccaggcaccggcctgcccggcggcttgtccccgctgagtccaagcccgcctatgggtgcccccctagggatgcacggccccgctgggtacccggcccacggacccggaggcctcgtgtgcgctgcccaactccccttcctgagctcgccggctgtgctctcaccgttcgtgctggggtcgcagacatacggcgcccctgcgttctatgccccacacctctag

SEQ ID NO: 108979 - DNA, 1236 bp, Artificial Sequence
  derived and/or modified sequence
atggacgggcgcgccgagctgccggcctttccccgcgctggagccccgccgctcgcggccagcgacactgtgcctgcggcgcccgagggggctggagcggcccggcccgcagcgcccctgcgccccacctccttctcggtactggacatcctggaccccaacaagttcaacagcaggaggcgtcgttgcgtgctgctgggcccagtggctcccgctgcgtgcgccccttgcgcttcggccccatgcgcccctgcacccgccgcctcgggacgcccgccacgcgcggaggagctggagcgccgcgccctcgccggcgccgggggagtcggagccgccggagctgagccgccgaacgccggcgaccccttcaaggcaggggaggccgagaccaacgacaccaacggctacagcagcggcggcggcggccacagcccgagcgcggacagcggggacgaggttcccgacgacgaggacgacgacgaggacgaagcgcccgagacggaggcggcgcgaggcgcggaggaggcgcggggaggcggcggcggcctcggggcccgcgggtcgggttgccagggcgcggctgagaccgacgcgtcccccggagccaccgtcgacgaggcagcggcccccggaccccgcgagaactcgcccgttgcccagggcccaccgggaggtgcagcggcgccggggggcgcggggaccaccccgcagggcacggcgacggcggcgaagcccaagcggaagcgcacggggtccgactccaagtccgggaagccgcggcgagcgcgcaccgccttcacctacgagcagctcgtggcgctggagaacaagttcaaggccacgcgctacctgtcggtgtgcgagcgcctcaacctggcgctgtcgctcagcctcaccgagacgcaggtgaagatctggttccagaaccgccgaaccaagtggaagaagcagaacccgggcgccgacaccagcgctccgaccggcggcgggggcggaccgggaccgggggccgggcctggcacggggctgcccggcggcctcagcccgctcagcccctcgccgcccatgggcgccccgctcggcatgcacggcccggccgggtacccggcgcacggccccggaggcctggtgtgcgccgcgcagctgccgttcctgtcgagcccggcggtgctctcgcccttcgtgctgggctcgcagacctacggggcgcccgccttctacgcgccgcacctctga

SEQ ID NO: 108980 - DNA, 1236 bp, Artificial Sequence
  derived and/or modified sequence
atggatggccgggcagagctgcctgccttccccagggctggggccccacccctggccgccagtgacacagtgcctgctgcccctgagggcgctggggccgcccggcctgctgcccccctgcggcccaccagcttctctgtgctggacatcctggaccccaacaagttcaacagcagaagaagaagatgtgtgctgctgggccctgtggccccagctgcctgtgccccctgtgccagcgccccctgtgccccagccccagctgccagcggccggccccccagggctgaggagctggagcggcgggccctggccggggccggcggcgtgggcgccgccggggctgagcccccaaatgctggggaccccttcaaggccggggaggccgagaccaatgacaccaacggctacagcagcggcggcggcggccacagccccagcgctgacagcggagatgaggtgcctgatgatgaagatgatgatgaagatgaggcccctgagacagaagctgcccggggagctgaggaggcccggggcggcggcggcggcctgggcgcccggggcagcggctgccagggcgctgctgagacagatgccagccctggggccaccgtggatgaagctgctgcccctggcccccgggagaacagccctgtggcccagggccccccaggaggagctgctgcccctggaggagctggcaccaccccccagggcacagccacagctgccaagcccaagaggaagaggacaggcagtgacagcaagagcggcaagccccggcgggccaggacagccttcacctatgagcagctggtggccctggagaacaagttcaaggccacccgctacctgtctgtgtgtgagcggctgaacctggccctgagcctgagcctgacagagacccaggtgaagatctggttccagaacagaaggaccaagtggaagaagcagaaccctggagctgacaccagcgcccccactggaggcggcggcggccctggccctggagctggccctggcaccggcctgcccggcggcctgagccccctgagccccagcccccccatgggcgcccccctgggcatgcacggccctgctggctacccagcccacggccctgggggcctggtgtgtgccgcccagctgcccttcctgagcagccctgctgtgctgagcccctttgtgctgggcagccagacctatggagccccagccttctacgccccccacctgtag

SEQ ID NO: 108981 - DNA, 1236 bp, Artificial Sequence
  derived and/or modified sequence
atggacggccgggccgagctgcccgccttcccccgggccggcgcccctcccctcgccgcctccgataccgtgcctgcagcacccgagggtgccggagccgcacggcctgccgcacctctgaggccaacctccttcagcgtcctagacatcttggatccgaacaagtttaactccagacgcaggcgttgcgttctgttagggcccgtagcccctgccgcatgcgccccttgtgcctcagccccttgcgctcccgcccctgcggcctcaggacggcccccccgcgcagaggagctggagaggcgtgcgctcgccggcgccggcggcgtgggagccgcaggcgccgagccacccaatgcaggcgatcctttcaaagctggggaagccgagaccaacgatactaacggttattcttccggtggaggcggacattcacccagtgcagactcaggagacgaggtcccagatgacgaagatgacgatgaggatgaagcgccagagaccgaggcagcccgaggggccgaggaagcccggggaggagggggtgggctgggagcacgtggaagcggttgccagggggccgccgagactgatgcatcaccaggcgctactgtcgacgaggcagcagcccctggtcccagggaaaattctcctgttgcccagggcccaccgggcggtgctgccgcacccggtggtgccggaaccacaccccagggcacagctacagccgccaaaccgaaacgaaagaggaccgggagcgattctaagagcgggaagccaagaagagcccgcactgccttcacttacgagcaactcgtggcgcttgagaataaatttaaggccacccgctatctgtcagtgtgtgaaaggttgaacctggcactgagcctgtccttaaccgaaactcaagtgaaaatctggtttcaaaacagaaggaccaaatggaagaagcagaaccccggggccgatacttctgcgcccactggggggggaggtggacccggtcctggagccggtccaggaactggtctgccaggtgggctttcacctctgtcccccagccctcccatgggggctcctctcggcatgcacggcccggccggatatccagcccacggccctggcggtttagtgtgtgctgcacagctgccttttcttagttcacccgcagtgttgagcccttttgtgctaggctctcaaacttatggagcccctgctttttacgcaccccacctctag

SEQ ID NO: 108982 - DNA, 1236 bp, Artificial Sequence
  derived and/or modified sequence
atggatggccgagcggagctaccagcttttcctagagcaggggcaccccctctggctgcatctgatacggtgccggcagcccctgagggcgctggagctgctcggcctgcagctccactgcgtcccacctctttttccgttctggacatcttggatcccaacaagttcaattctagaaggaggaggtgtgtgcttctgggaccagttgcccctgccgcatgcgccccatgtgcttcggcaccctgcgcacctgcaccggcagcctctggtcggccaccccgtgccgaagaactggagcggagggccctcgccggtgcgggaggagtcggagccgcaggggctgaaccccctaacgcaggcgatccttttaaagccggagaagctgaaaccaacgacaccaacggctactcatctggaggaggcggtcattctccttccgcagatagcggcgacgaggtaccagatgatgaagacgatgacgaagatgaggcacctgagactgaggccgctcggggagccgaggaggctcgcggaggcggaggaggattgggcgctcgagggtccggttgccaaggagccgctgagaccgatgcaagccccggtgccaccgtggacgaggcggcagcgccaggtcctcgtgagaatagtccggtggctcagggccctcctgggggagccgcagcacccggaggtgctggaaccactccgcaaggaactgccactgcggcaaaaccgaaacgcaaacgaactggaagtgattcgaagtcgggaaagcccagaagggccaggacggcattcacgtacgagcaactggtggctctggagaataagtttaaggctacccgttacctttccgtttgcgaacgtctgaatctggctctgtccctttctttgaccgagacccaggtcaaaatctggttccagaaccggagaaccaaatggaagaaacagaaccctggagcagatacttccgcaccaacagggggaggagggggtcctggaccaggagctggtcctggcaccggtctccctggcggtctctcacctttgtccccctcccctcccatgggggctccgcttggtatgcatgggccagccggttacccagcacacggccctggaggactggtatgtgccgcacagttacctttcctatccagtccagctgtattatcaccctttgttctcggtagtcagacttacggcgctcctgctttctatgctccacacttgtag

SEQ ID NO: 108983 - DNA, 1236 bp, Artificial Sequence
  derived and/or modified sequence
atggacggcagagccgagctgcccgccttccccagagccggcgccccccccctggccgccagcgacaccgtgcccgccgcccccgagggcgccggcgccgccagacccgccgcccccctgagacccaccagcttcagcgtgctggacatcctggaccccaacaagttcaacagcagaagaagaagatgcgtgctgctgggccccgtggcccccgccgcctgcgccccctgcgccagcgccccctgcgcccccgcccccgccgccagcggcagaccccccagagccgaggagctggagagaagagccctggccggcgccggcggcgtgggcgccgccggcgccgagccccccaacgccggcgaccccttcaaggccggcgaggccgagaccaacgacaccaacggctacagcagcggcggcggcggccacagccccagcgccgacagcggcgacgaggtgcccgacgacgaggacgacgacgaggacgaggcccccgagaccgaggccgccagaggcgccgaggaggccagaggcggcggcggcggcctgggcgccagaggcagcggctgccagggcgccgccgagaccgacgccagccccggcgccaccgtggacgaggccgccgcccccggccccagagagaacagccccgtggcccagggcccccccggcggcgccgccgcccccggcggcgccggcaccaccccccagggcaccgccaccgccgccaagcccaagagaaagagaaccggcagcgacagcaagagcggcaagcccagaagagccagaaccgccttcacctacgagcagctggtggccctggagaacaagttcaaggccaccagatacctgagcgtgtgcgagagactgaacctggccctgagcctgagcctgaccgagacccaggtgaagatctggttccagaacagaagaaccaagtggaagaagcagaaccccggcgccgacaccagcgcccccaccggcggcggcggcggccccggccccggcgccggccccggcaccggcctgcccggcggcctgagccccctgagccccagcccccccatgggcgcccccctgggcatgcacggccccgccggctaccccgcccacggccccggcggcctggtgtgcgccgcccagctgcccttcctgagcagccccgccgtgctgagccccttcgtgctgggcagccagacctacggcgcccccgccttctacgccccccacctgtag

SEQ ID NO: 108984 - protein, 122 aa, Artificial Sequence
  derived and/or modified sequence
MHGTFVILLPLSLILMVFGGMTGFLSFLLQAYLLLLLTGILFLFGAMVTLAGISVYIAYSAAAFREALCLLEEKALLDQVDISFGWSLALGWISFIAELLTGAAFLAAARELSLRRRQDQAI

SEQ ID NO: 108985 - DNA, 369 bp, Artificial Sequence
  derived and/or modified sequence
atgcacggcaccttcgtgatcctgctgcccctgagcctgatcctgatggtgttcggcggcatgaccggcttcctgagcttcctgctgcaggcctacctgctgctgctgctgaccggcatcctgttcctgttcggcgccatggtgaccctggccggcatcagcgtgtacatcgcctacagcgccgccgccttcagagaggccctgtgcctgctggaggagaaggccctgctggaccaggtggacatcagcttcggctggagcctggccctgggctggatcagcttcatcgccgagctgctgaccggcgccgccttcctggccgccgccagagagctgagcctgagaagaagacaggaccaggccatctag

SEQ ID NO: 108986 - DNA, 369 bp, Artificial Sequence
  derived and/or modified sequence
atgcacgggaccttcgtgatattactcccgctgtcactgattctgatggtcttcggaggcatgacaggattcctgtcattccttctgcaagcttacctccttcttttgctgacaggcattctgttcttattcggcgcaatggttaccctggcgggaatatctgtatacatagcttactcagcagccgcctttcgggaggccctatgtctgttggaagagaaagccttactggaccaagtggacatctcttttggatggtccctggccctgggatggatcagctttattgccgagctgttaacgggggctgccttcctggctgccgcacgggaactcagcttacggaggcgccaggaccaggcaatctag

SEQ ID NO: 108987 - DNA, 369 bp, Artificial Sequence
  derived and/or modified sequence
atgcacggcacctttgtgatcctgctgcccctgagcctcatcctgatggtgtttggaggcatgacaggcttcctgtccttcctgctgcaggcctacctgctgctgctgctgaccggcatcctcttcctgtttggagccatggtgaccctggccggcatctctgtgtacatcgcctacagcgctgctgccttccgggaggccctgtgcctgctggaggagaaggccctgctggaccaggtggacatcagctttggctggagcctggccctgggctggatctccttcatcgccgagctgctgactggagctgccttcctggccgccgcccgggagctgagcctgcggcggcggcaggaccaggccatctag

SEQ ID NO: 108988 - DNA, 369 bp, Artificial Sequence
  derived and/or modified sequence
atgcacggcaccttcgtgatcctgctgcccctgagcctgatcctgatggtgtttggcgggatgactggcttcctgagctttctcctgcaggcttatctgctgctgctcctgaccgggatactctttttgttcggcgccatggttacattagctgggatctctgtgtacatcgcctactcagccgcagccttcagggaggccctgtgtttgctggaggagaaggccctgctggatcaggtggacatctcgtttggctggagcctggccctgggctggatttccttcatcgccgagctgctgaccggggcagccttcttagcagccgcccgtgagctgtccctccgacgcagacaggaccaggccatctag

SEQ ID NO: 108989 - DNA, 369 bp, Artificial Sequence
  derived and/or modified sequence
atgcatggaacttttgtgattctgctccctctgtcactgattctgatggtgttcgggggaatgaccggattcctctcattcttactccaggcctatctcctgttgctgctcaccgggattctatttctcttcggcgcaatggtaacattagcgggaattagtgtgtacatcgcctacagtgccgcagccttccgagaggcactctgtttgctcgaagagaaggcactgttggaccaggtggacataagtttcggatggtctctggcactggggtggatcagcttcatagctgaactgctgaccggagctgccttccttgccgcagcgagggaactgtcccttcggcgtcggcaggaccaggccatctag

SEQ ID NO: 108990 - DNA, 516 bp, Artificial Sequence
  derived and/or modified sequence
gctcgggaagtgtttgttgattgaatgaaggatgttagtaactgtcctctgcctggtatcctctctgtctcttctaagccatgcatgggacatttgtgattctgctgccgctcagcctgatcctgatggtttttggggggatgacggggtttctgagcttcctcctccaagcctacctcctcctcctgctcactggaattctcttcctctttggagccatggtgaccctcgctgggatcagcgtctacatagcgtattcagccgccgccttccgggaggcgctgtgtctcttggaggagaaggccctcctggaccaggtggacatcagcttcggctggtccctggccctgggctggatcagcttcatcgccgagctgctcaccggggcagccttcctggcagcagcccgcgagctcagcctgagacggaggcaggaccaggccatatgagcctgggcgctgggtcgtggaggggagggaggggcttggccccggagcttcaccgaccgatctccat

SEQ ID NO: 108991 - DNA, 969 bp, Artificial Sequence
  derived and/or modified sequence
atgtggaagagccccaacggcaccatcagaaacatcctgggcggcaccgtgttcagagagcccatcatctgcaagaacatccccagactggtgcccggctggaccaagcccatcaccatcggcagacacgcccacggcgaccagtacaaggccaccgacttcgtggccgacagagccggcaccttcaagatggtgttcacccccaaggacggcagcggcgtgaaggagtgggaggtgtacaacttccccgccggcggcgtgggcatgggcatgtacaacaccgacgagagcatcagcggcttcgcccacagctgcttccagtacgccatccagaagaagtggcccctgtacatgagcaccaagaacaccatcctgaaggcctacgacggcagattcaaggacatcttccaggagatcttcgacaagcactacaagaccgacttcgacaagaacaagatctggtacgagcacagactgatcgacgacatggtggcccaggtgctgaagagcagcggcggcttcgtgtgggcctgcaagaactacgacggcgacgtgcagagcgacatcctggcccagggcttcggcagcctgggcctgatgaccagcgtgctggtgtgccccgacggcaagaccatcgaggccgaggccgcccacggcaccgtgaccagacactacagagagcaccagaagggcagacccaccagcaccaaccccatcgccagcatcttcgcctggaccagaggcctggagcacagaggcaagctggacggcaaccaggacctgatcagattcgcccagatgctggagaaggtgtgcgtggagaccgtggagagcggcgccatgaccaaggacctggccggctgcatccacggcctgagcaacgtgaagctgaacgagcacttcctgaacaccaccgacttcctggacaccatcaagagcaacctggacagagccctgggcagacagtag

SEQ ID NO: 108992 - DNA, 969 bp, Artificial Sequence
  derived and/or modified sequence
atgtggaaatcacccaacggtaccattcggaacatcctcggaggcactgtgtttcgggagcctataatctgtaaaaatatcccacggctggtaccgggctggaccaaacccattacgatcgggcgccacgcccatggcgaccagtataaggctactgattttgtggcagacagggctggcacattcaaaatggtgttcacacctaaggacggaagtggggtgaaggaatgggaagtttacaacttccctgcaggtggcgtggggatgggcatgtacaacaccgatgagtccatctctgggtttgctcacagctgtttccaatatgccatccaaaaaaaatggcccctctatatgtccactaagaacactatcctgaaggcatacgatgggagattcaaagatatattccaggagatattcgacaaacattataagacagatttcgacaaaaataagatttggtatgagcatcggctaatcgatgacatggtggcccaggtccttaagagctctggaggattcgtatgggcctgtaaaaattacgacggcgatgtgcagtctgatattctagcccaggggtttggcagtctcggcctcatgacatctgtgctcgtctgccctgatggaaaaaccatcgaggccgaagctgcccacggcactgtaacacgacattaccgtgagcaccagaaggggcggcccactagtacaaatccaatagccagcatttttgcctggacgcggggtttggagcatcgcggcaagctggatgggaaccaagacctgataaggttcgcgcagatgctggagaaagtttgcgtggagacagtcgaatccggagccatgacaaaggatctggccggctgtattcacggtctgtccaacgttaagcttaacgagcacttcctgaacacaactgacttcctggacactatcaaatccaatttggaccgcgccctcggcagacagtag

SEQ ID NO: 108993 - DNA, 969 bp, Artificial Sequence
  derived and/or modified sequence
atgtggaagagccccaacggcaccatccggaacatcctgggcggcaccgtcttccgggagcccatcatctgcaagaacatcccccggctggtgcccggctggaccaagcccatcaccatcggcagacatgcccatggagaccagtacaaggccacagactttgtggccgacagagctggcaccttcaagatggtgttcacccccaaggatggcagcggcgtgaaggagtgggaggtgtacaacttccctgctgggggcgtgggcatgggcatgtacaacacagatgagagcatcagcggctttgcccacagctgcttccagtatgccatccagaagaagtggcccctgtacatgagcaccaagaacaccatcctgaaggcctatgatggccgcttcaaggacatcttccaggagatctttgacaagcactacaagacagactttgacaagaacaagatctggtatgagcaccggctgattgatgacatggtggcccaggtgctgaagagcagcggcggctttgtgtgggcctgcaagaactatgatggagatgtgcagagcgacatcctggcccagggcttcggcagcctgggcctgatgacctctgtgctggtgtgcccagatggcaagaccatcgaggccgaggccgcccacggcaccgtgaccaggcactaccgggagcaccagaagggccggcccaccagcaccaaccccatcgccagcatctttgcctggacccggggcctggagcaccggggcaagctggatggcaaccaggacctgatccgctttgcccagatgctggagaaggtgtgtgtggagaccgtggagagcggggccatgaccaaggacctggccggctgcatccacggcctgagcaatgtgaagctgaatgagcacttcctgaacaccacagacttcctggacaccatcaagagcaacctggaccgggccctgggccggcagtag

SEQ ID NO: 108994 - DNA, 969 bp, Artificial Sequence
  derived and/or modified sequence
atgtggaagagccccaacggcaccatccggaacatcctgggcggcaccgtgtttcgggagccaatcatctgcaaaaacatcccacgcctggtgcccggctggactaagcctatcacaataggcaggcacgctcacggggatcaatataaagccaccgattttgtagctgatagagccggaacttttaaaatggtgttcacccccaaagacggctctggcgtaaaggaatgggaggtgtacaatttccctgccgggggcgtgggcatgggaatgtataatacagacgagagtatctcagggtttgctcactcctgttttcagtacgctatccaaaagaaatggcctctttacatgtctactaagaacaccatcctcaaggcctacgatgggcgcttcaaagatatctttcaggagatttttgataaacattacaaaacagacttcgacaagaacaagatttggtacgagcaccggctcatagatgacatggttgctcaggtgctcaaatctagcggaggctttgtgtgggcctgcaagaactacgacggtgatgtccagtccgacatcttggcacaggggtttggaagcctcggcctgatgacctctgtgttagtgtgtcccgatggtaagacaatcgaggccgaagcagcccacgggaccgtgactcgccactatagagaacaccagaagggcagacccacttctaccaacccaattgcgagcatttttgcttggaccagaggcctggaacatcggggtaagctcgatggtaaccaggacctgataaggtttgcgcagatgcttgagaaagtttgtgtcgagaccgtggagagcggagccatgacaaaggaccttgccggctgcatccacgggctgagcaacgttaaattaaatgagcactttctaaacactaccgatttcctggacacaatcaagtcaaatctcgaccgtgctcttgggcgtcagtag

SEQ ID NO: 108995 - DNA, 969 bp, Artificial Sequence
  derived and/or modified sequence
atgtggaaatctccaaatggcacaatccgcaacatcttaggcggtaccgttttccgcgagcccatcatctgtaagaacatccccaggctcgtgccaggttggacgaaacctattacaattggaaggcacgctcatggcgatcagtacaaggcgaccgatttcgtagctgatcgcgcaggcacattcaagatggtgttcacaccaaaggacggctctggagtcaaagaatgggaggtctataacttcccagctggcggagtggggatgggaatgtataacaccgatgaatcaataagcgggttcgctcatagttgcttccagtacgctatccagaagaaatggcccctctacatgagcactaaaaataccattctaaaagcttatgatgggaggttcaaagacatattccaggaaattttcgataagcactataaaacagatttcgataagaacaaaatttggtatgagcatcggttgatcgacgatatggtggctcaagtcctcaaaagctcagggggttttgtgtgggcctgcaagaactatgacggcgatgtccaatccgacattctggcccaggggttcggcagcctggggctgatgacatctgtcctcgtttgtcctgacggcaagacaatagaggccgaagccgcacacggtactgtcactcggcactatcgcgagcatcagaagggtcggcctactagcaccaatccgattgccagcatcttcgcctggactagagggctggagcaccggggaaaacttgacggaaatcaggatctgattcgatttgcccagatgctggagaaagtttgcgtggaaactgtggagagtggcgctatgacaaaagacttagctggatgtatacacgggctctctaatgttaagttgaacgaacactttttgaatactaccgacttccttgacactattaaatctaatctcgaccgggcactcggcagacagtag

SEQ ID NO: 108996 - DNA, 3480 bp, Artificial Sequence
  derived and/or modified sequence
gaatcaattttgggggagaccacatctaatggataaaagagccacaggattacaaaagggtggaatagttgttacaagaaggtcacatcatcctggcactgctcccagaaccagtgggcctcgaagcccagcttggcactctcatcctctggtgactcaggtggtccaccttgaagcctctcccctgggggcttccacacagctctcaagctccctagcctggtggctgccacatccacctcagtcctggccctctctccaccagctataacttttgcccagtccatctcggaacgtggagccccaggtgggccctgttcatccagctcgctgggggccactgtgtccaggaagctgccaatagagacactgtccagccggtcggtggtgctggtgtctggcaggctgtcccagctgcctcgccttgagcggcctgggctcccgcctgtcaggctatattgactgctggtgaggctgctgcaatgactggtcaacgtcccccgctcctccaacagccagcgcactgcctcgatgccctcattcaaggtcaccagctgctgcaggatcttcacatcgatggctcgcagattcctgaagtcatgggctggccaggacattggtgacccgccaatccggtatggacgactggaagcccagccccctcatcaagccctttggggctcggaagaagcggagctggtaccttacctggaagtataaactgacaaaccagcgggccctgcggagattctgtcagacaggggccgtgcttttcctgctggtgactgtcattgtcaatatcaagttgatcctggacactcggcgagccatcagtgaagccaatgaagacccagagccagagcaagactatgatgaggccctaggccgcctggagcccccacggcgcagaggcagtggtccccggcgggtcctggacgtagaggtgtattcaagtcgcagcaaagtatatgtggcagtggatggcaccacggtgctggaggatgaggcccgggagcagggccggggcatccatgtcattgtcctcaaccaggccacgggccacgtgatggcaaaacgtgtgtttgacacgtactcacctcatgaggatgaggccatggtgctattcctcaacatggtagcgcccggccgagtgctcatctgcactgtcaaggtcctgtcttcggggagaaacattctaaatcacctgccctctcttcctggggggacccagtcctgctgaagacagatgtgccattgagctcagcagaagaggcagagtgccactgggcagacacagagctgaaccgtcgccgccggcgcttctgcagcaaagttgagggctatggaagtgtatgcagctgcaaggaccccacacccatcgagttcagccctgacccactcccagacaacaaggtcctcaatgtgcctgtggctgtcattgcagggaaccgacccaattacctgtacaggtaagcctgggaatgggctatacccagcactgaacaggagggtgcttaggtcatctacctccaggaggaactcttgaggtgggcagaaaggcaatagattctagacgcattcacctctgtgggtaagcatagggactctgggcccagctgtaaacacaggggaacctgagttgaggggtgatgaagtgaccctaacctatccctgggctccccaggatgctgcgctctctgctttcagcccagggggtgtctcctcagatgataacagttttcattgacggctactatgaggtgagcaggacttggggggtgcctcgggtggagtacaacatggagcagcagtgattgccagggacgggcaagggagaccgcccaggcaagggctgtgaaatgtgaaggccttggattgcagaggtgggcagagggaaagtgacctcacatggtgagcagtggccatgtcccccaggaacccatggatgtggtggcactgtttggtctgaggggcatccagcatactcccatcagcatcaagaatgcccgcgtgtctcagcactacaaggccagcctcactgccactttcaacctgtttccggaggccaagtttgctgtggttctggaagaggacctggacattgctgtggattttttcagtttcctgagccaatccatccacctactggaggaggatgacagcctgtactgcatctctgcctggaatgaccaggggtatgaacacacggctgaggacccagcactactgtaccgtgtggagaccatgcctgggctgggctgggtgctcaggaggtccttgtacaaggaggagcttgagcccaagtggcctacaccggaaaagctctgggattgggacatgtggatgcggatgcctgaacaacgccggggccgagagtgcatcatccctgacgtttcccgatcctaccactttggcatcgtcggcctcaacatgaatggctactttcacgaggcctacttcaagaagcacaagttcaacacggttccaggtgtccagctcaggaatgtggacagtctgaagaaagaagcttatgaagtggaagttcacaggctgctcagtgaggctgaggttctggaccacagcaagaacccttgtgaagactctttcctgccagacacagagggccacacctacgtggcctttattcgaatggagaaagatgatgacttcaccacctggacccagcttgccaagtgcctccatatctgggacctggatgtgcgtggcaaccatcggggcctgtggagattgtttcggaagaagaaccacttcctgatggtgggggtcccggcttccccctactcagtgaagaagccaccctcagtcaccccaattttcctggagccacccccaaaggaggagggagccccaggagccccagaacagacatgagacctcctccaggaccctgcggggctgggtactgtgtacccccaggctggctagcccttccctccatcctgtaggattttgtagatgctggtaggggctggggctaccttgtttttaacatgagacttaattactaactccaaggggagggttcccctgctccaacaccccgttcctgagttaaaagtctatttatttacttccttgttggagaagggcaggagagtacctgggaatcattacgatccctagcagctcatcctgccctttgaataccctcactttccaggcctggctcagaatctaacctatttattgactgtcctgagggccttgaaaacaggccgaacctggagggcctggatttctttttgggctggaatgctgccctgagggtggggctggctcttactcaggaaactgctgtgcccaacccatggacaggcccagctggggcccacatgctgacacagactcactcagagacccttagacactggaccaggcctcctctcagccttctctttgtccagatttccaaagctggataagttggtcattgattaaaaaaggagaagccctctgggg

SEQ ID NO: 108997 - protein, 849 aa, Artificial Sequence
  derived and/or modified sequence
MWEKMETKTIVYDLDTSGGLMEQIQALLAPPKTDEAEKRSRKPEKEPRRSGRATNHDSCDSCKEGGDLLCCDHCPAAFHLLVYQDFVAPISLFHGTFHDGPTCSFAQKREQKKELGHVNGLVDKSGKRTTSPSSDTDLLDRSASKTELKAIAHARILERRASRPGTPTSSASTETPTSEQNDVDEDIIDVDEEPVAAEPDYVQPQLRRPFELLIAAAMERNPTQFQLPNELTCTTALPGSSKRRRKEETTGKNVKKTQHELDHNGLVPLPVKVCFTCNRSCRVAPLIQCDYCPLLFHMDCLEPPLTAMPLGRWMCPNHIEHVVLNQKNMTLSNRCQVFDRFQDTVSQHVVKVDFLNRIHKKHPPNRRVLQSVKRRSLKVPDAIKSQYQFPPPLIAPAAIRDGELICNGIPEESQMHLLNSEHLATQAEQQEWLCSVVALQCSILKHLSAKQMPSHWDSEQTEKADIKPVIVTDSSVTTSLQTADKTPTPSHYPLSCPSGISTQNSLSCSPPHQSPALEDIGCSSCAEKSKKTPCGTANGPVNTEVKANGPHLYSSPTDSTDPRRLPGANTPLPGLSHRQGWPRPLTPPAAGGLQNHTVGIIVKTENATGPSSCPQRSLVPVPSLPPSIPSSCASIENTSTLQRKTVQSQIGPPLTDSRPLGSPPNATRVLTPPQAAGDGILATTANQRFSSPAPSSDGKVSPGTLSIGSALTVPSFPANSTAMVDLTNSLRAFMDVNGEIEINMLDEKLIKFLALQRIHQLFPSRVQPSPGSVGTHQLASGGHHIEGAHVHTCHHIIRSPLYVCEWSPCLHGESELPVSQTSLCAFHGLNKAPWFFSEESRNKMATTAF

SEQ ID NO: 108998 - DNA, 2550 bp, Artificial Sequence
  derived and/or modified sequence
atgtgggaaaaaatggagacaaagacgattgtgtatgatctggacacgagtggcgggttaatggagcagattcaggcgctgctggctcccccaaagaccgatgaggctgaaaaaaggagtaggaagcctgaaaaggaaccgcggaggtccggcagggcaaccaatcacgactcctgcgacagctgcaaagaaggcggagatctcttgtgttgtgaccattgtcccgcagcctttcacttactagtctaccaggatttcgtggcaccaatttctctattccatggaaccttccacgacgggcctacgtgtagcttcgcacaaaagcgggagcagaagaaagaattggggcacgtgaatggtctggtggataagtctggcaagcgaactacctctcccagctcagacacagatctgttggacaggagcgcctccaagactgaattgaaggcaatagcccacgcgagaattttagaaaggcgcgcatccaggcccggcacgcctactagcagcgcttctactgagactccgacgagcgagcagaatgatgtcgacgaggatatcatcgacgttgacgaggagcccgttgctgcggagcctgactacgtgcaaccacagttaaggagaccatttgagctgctaatcgccgccgcaatggaacggaacccaactcagttccagttgccaaatgaactgacctgcacaaccgcccttcctggcagctcaaagaggcgaagaaaggaggagaccacaggcaagaacgtcaagaagacccaacatgaactagaccacaatggactggtcccactccccgttaaagtgtgttttacctgcaatagatcctgccgcgtggcccctttgattcaatgcgactactgccccttgctctttcatatggattgcctagaaccccccttgaccgctatgcccctcggccgctggatgtgcccaaatcacatcgaacacgttgtccttaatcagaaaaacatgactctgtccaaccggtgccaagtcttcgatcggtttcaggacactgtttctcaacatgtggtgaaggtggattttctcaacaggatacataagaagcacccaccaaataggcgggtacttcagtccgtcaagcggagatccctcaaggtgcctgatgccatcaagtcacagtaccagtttcccccacccctaatagctcctgctgctatccgagatggtgagctgatctgtaatggcattcccgaggagtctcagatgcatttactgaacagcgagcatctcgctacgcaggctgaacagcaagaatggctatgcagcgtggtcgcgcttcaatgctcaattctaaagcatctctctgcaaaacaaatgccaagtcactgggactccgagcagaccgaaaaggccgatataaaaccagtgatcgtcactgactctagcgtgaccacatccctgcagacagccgacaagacacctaccccctctcattatccgctgtcgtgtccctctggaatcagtactcagaattccctgagctgttctccgccccatcaaagccccgctttagaggacattggatgctcgagctgcgccgagaagagcaaaaaaacaccttgcggtacagccaacggacccgtgaatactgaagtaaaggctaacggcccccacctctattcctctcccacagattccacagatccacgaaggctgcctggggctaatacccccctacccggcctgtcccatcgtcagggatggccaagaccgctaacgccacctgccgccgggggtctgcagaaccacaccgtggggataatcgtcaagacagaaaatgccactggcccatccagctgcccccaacgctctctcgtaccagtgccgagccttccaccctccattccatcatcatgtgccagcatagaaaacaccagtacactgcaaaggaagacagtgcagagtcagatcgggcctcctcttactgactctcgacctttaggtagcccgcccaatgctacacgagtccttacccccccgcaagcagcaggggatggcattctggccactaccgccaatcagcgcttctcatctccggccccaagttccgatggcaaggtctctcctggcaccctctccatcggttcagcactcactgtccccagttttccagccaatagcaccgccatggtggacctgactaattctctcagagcgtttatggacgttaacggggagatcgagattaacatgctggacgagaagcttatcaaattccttgcactccaacggattcaccagctgttccccagccgcgtgcagcccagtcctggaagtgtgggaactcatcagctcgcctctggcgggcaccatattgagggggctcatgtgcacacctgccatcacattatccgtagcccactttacgtatgcgagtggtctccctgtctgcacggtgagtcggagttgccagttagtcagacaagtctttgcgcatttcacgggctcaacaaagccccatggtttttctccgaggagtctcgcaataaaatggcgaccaccgcattctag

SEQ ID NO: 108999 - DNA, 3080 bp, Artificial Sequence
  derived and/or modified sequence
cgggtggctttgcgggcgctcgcggtaagtttgcgccaagtgcgcggcagccgggacgcagacggcggcggcggcgagaggcggagcccggggaccaccccccatcaccctccccccagtcacctcacgtaccacaacctcacgtaacctctcaccccccctccgatacccccagccccgggatggcagcgcccgccagccttcccggccggaccggctgtcgccagtgccggctttagcctgtgggactaggccccgccgaggcctgacccccggagccgggacccactgtgcagccagcagccgggccgggactgaggggccgctcccccctcgcggcccgtcgggaggacgctgtcgtcccggggactgggggccggggggtgggggggagccagggcgaggaagtcgggacccgtattgggaaaaaagcggggccggggtcaggagcgccccctcccctcacctcccccctccccccggggttgggggggccggagcagagagcacccagcccgggaggtggatgaatgtgggagaaaatggagaccaagacgatcgtgtacgacttggacacatcaggggggctgatggagcaaatccaagctctgctggctccccccaagacggacgaggcagaaaagcgcagtcggaagcctgagaaggagccccggagaagcggcagggccaccaaccacgacagctgcgatagctgcaaggaaggtggagatctcctgtgctgcgaccactgcccggctgccttccacctcctggtctaccaggactttgtagcacccatctctttgtttcatggtacttttcatgatgggcccacctgttcatttgcacagaaacgagagcagaaaaaggagctgggtcatgtcaatggactggtggacaaatctggcaaacggactacatcccccagcagtgacactgacttgttggacagatcggccagcaaaactgaactaaaggccattgcccatgcccggatcctggaaaggagagccagcaggcctggcacacccacatccagcgccagcacagagactcccacctctgagcagaatgatgtcgacgaagacatcattgacgtggatgaggaaccagtagcagcggagccagactatgtgcagccccagctgaggcggccctttgagctgctgattgctgccgccatggagcggaaccccacccaatttcagttgcccaatgaactgacttgtaccactgcactaccaggttctagcaagaggagaagaaaggaggaaaccacagggaaaaatgttaagaagacacagcatgaattagatcacaatggtctcgttcccttacccgtcaaagtctgcttcacgtgtaacaggagttgccgtgtggctcctctcatccagtgtgactattgccctctcctgtttcacatggattgcctcgagccgccgctcactgccatgcccctgggcagatggatgtgtccgaatcacatcgaacatgtggtgctgaaccagaagaatatgacactgagcaatcggtgccaggtgtttgatcgtttccaggacaccgtttcgcagcatgtcgtcaaagtggacttcctgaaccgaatccacaagaagcacccccctaaccggcgtgtgctccagtcggtcaaaagaagaagcttgaaggttcctgatgctataaaatctcagtaccagtttccaccccctctcattgcacccgcggccattcgggacggggagctgatctgcaatgggatccctgaggaatcacagatgcaccttttgaactctgagcacttagccacccaagcagagcagcaagagtggctctgtagtgttgttgcgctccagtgcagcatattgaaacatttatctgctaagcagatgccttcgcattgggactctgaacagacagagaaggctgatattaagcctgttattgtgactgacagctcagtcaccacctccctgcaaacagctgacaagacacctacaccttcccactaccccttgtcctgcccctcagggattagcacccagaattccctgagctgctctccaccccaccagtccccagccctagaggacatcggctgcagttcttgtgcggaaaaatccaagaaaaccccttgtgggactgccaatgggccagtgaacacagaggtgaaagctaatggcccacacctctacagcagccctactgattccacggacccccggcgacttccaggcgctaacaccccactaccaggcctctcacaccggcaaggctggccccggcccctcacgccaccagcggctgggggccttcagaaccacaccgtcggcatcattgtgaagacagagaatgccactggccccagctcttgcccccagaggagtttggttcctgtcccaagcctgcccccttccattcccagctcttgtgccagcatcgagaacaccagcactttgcaaagaaagactgtccaatcacagataggacctccgttgacagattcaaggccactgggctcacccccaaacgccacccgggtgctcactcccccgcaagcagcaggagatggtatcttggccacaacagccaaccaacgattcagctcaccagcgccatcgtcagatggcaaggtcagccccggcacgttatccataggaagcgctttaaccgtaccctctttcccagccaactctactgccatggtggacctcaccaactcacttcgagcatttatggatgtcaatggagaaatcgagataaatatgctggacgagaagctgatcaagtttctggccttgcagagaatacatcagcttttcccctcccgggtccaaccttcaccgggcagtgtcgggacacatcagctggcttctggagggcaccacatagaaggtgcgcatgtacacacctgtcaccacatcatcagatctcccctctacgtgtgcgaatggtcaccttgcctccatggagaatctgagcttccagtatctcaaacctccttgtgtgcttttcatgggcttaataaagcaccatggtttttttctgaagagagcaggaacaagatggcaaccacagctttctga

SEQ ID NO: 109000 - DNA, 2550 bp, Artificial Sequence
  derived and/or modified sequence
atgtgggagaagatggagaccaagaccatcgtgtatgacctggacaccagcggcggcctgatggagcagatccaggccctgctggccccacccaagacagatgaggccgagaagaggagcaggaagccagagaaggagccccggcgcagcggccgggccaccaaccacgacagctgtgacagctgcaaggagggcggggacctgctgtgctgtgaccactgcccagctgccttccacctgctggtgtaccaggactttgtggcccccatcagcctcttccacggcaccttccatgatggccccacctgcagctttgcccagaagcgggagcagaagaaggagctgggccacgtgaatggcctggtggacaagagcggcaagaggaccaccagccccagcagtgacacagacctgctggacagaagtgccagcaagacagagctgaaggccatcgcccacgcccgcatcctggagcggcgggccagccggcccggcacccccaccagcagcgccagcacagagacccccaccagcgagcagaatgatgtggatgaggacatcattgatgtggatgaggagcctgtggccgctgagccagactatgtgcagccccagctgcggcggccctttgagctgctgattgctgctgccatggagaggaaccccacccagttccagctgcccaatgagctgacctgcaccacagccctgcccggcagcagcaagagaagaaggaaggaggagaccaccgggaagaatgtgaagaagacccagcacgagctggaccacaacggcctggtgcccctgcctgtgaaggtgtgcttcacctgcaacagaagctgccgggtggcccccctcatccagtgtgactactgccccctgctcttccacatggactgcctggagccccccctgacagccatgcccctgggccgctggatgtgccccaaccacattgaacatgtggtgctgaaccagaagaacatgaccctgagcaaccgctgccaggtgtttgaccgcttccaggacacagtgtcccagcacgtggtgaaggtggacttcctgaaccgcatccacaagaagcacccccccaacagaagagtgctgcagagcgtgaagaggaggagcctgaaggtgcctgatgccatcaagagccagtaccagttccccccacccctcatcgccccagctgccatcagagatggagagctgatctgcaatggcatccctgaggagagccagatgcacctgctgaacagcgagcacctggccacccaggccgagcagcaggagtggctgtgcagcgtggtggccctgcagtgcagcatcctgaagcacctgagcgccaagcagatgcccagccactgggacagcgagcagacagagaaggctgacatcaagcctgtgattgtgacagacagctctgtgaccaccagcctgcagacagctgacaagacccccacccccagccactaccccctgagctgccccagcggcatcagcacccagaacagcctgagctgcagccccccccaccagagccctgccctggaggacatcggctgcagcagctgtgccgagaagagcaagaagaccccctgtggcacagccaacggccctgtgaacacagaggtgaaggccaacggcccccacctgtacagcagccccacagacagcacagacccccggcggctgcccggggccaacacccccctgcccggcctgagccaccggcagggctggccccggcccctgaccccacctgctgctgggggcctgcagaaccacacagtgggcatcatcgtgaagacagaaaatgccaccggccccagcagctgcccccagaggagcctggtgcctgtgcccagcctgcccccatccatccccagcagctgtgccagcattgagaacaccagcaccctgcagaggaagacagtgcagagccagatcggcccccccctgacagacagccggcccctgggcagccccccaaatgccaccagggtgctgaccccaccccaggccgctggagatggcatcctggccaccacagccaaccagcgcttcagcagccctgcccccagcagtgatggcaaggtgtccccaggcaccctgagcatcggcagcgccctgactgtgcccagcttccctgccaacagcacagccatggtggacctgaccaacagcctgcgggccttcatggatgtgaatggagaaattgagatcaacatgctggatgagaagctgatcaagttcctggccctgcagaggatccaccagctgttccccagccgggtgcagcccagccctggctctgtgggcacccaccagctggccagcggcggccaccacattgaaggagcccacgtgcacacctgccaccacatcatccgcagccccctgtatgtgtgtgagtggagcccctgcctgcatggagagagcgagctgcctgtgtcccagaccagcctgtgtgccttccacggcctgaacaaggccccctggttcttcagcgaggagagcaggaacaagatggccaccacagccttctag

SEQ ID NO: 109001 - DNA, 2550 bp, Artificial Sequence
  derived and/or modified sequence
atgtgggagaagatggagaccaagaccatcgtgtacgacctggacacctctggcgggctcatggagcagatccaggcactcttggcgcccccaaagacagacgaggcagaaaagcgaagtcggaaacccgagaaggaaccgcgcaggtccgggagggcaacaaaccacgacagttgcgactcttgtaaagagggcggagaccttttgtgttgtgaccactgccctgcggccttccatttgttggtctatcaggattttgtggcgccgatatcccttttccacggcacctttcatgatgggccaacctgctcttttgctcaaaagcgggagcagaaaaaggaactggggcatgttaatgggctggttgacaagtcagggaagcgaacaactagtcccagctccgacacggatctgttagaccggagtgcctccaagacggagttaaaggctattgcccatgcacggattctggagcgacgtgcctcccgaccaggcacccccacaagtagcgccagtactgaaactcccactagcgagcagaatgatgtcgacgaggacatcattgatgtagatgaagaacccgttgctgctgagcctgactacgtgcaaccgcaactccgaagaccatttgaattgttgatcgccgccgctatggaaagaaatcccactcagtttcaacttcctaacgaactcacttgcacaacagcattgcccggcagcagtaagcgcaggagaaaggaggaaaccaccggcaaaaatgtgaaaaagacacagcacgaactggatcacaatggactggtgcccttaccagtgaaggtgtgttttacatgtaacagaagctgccgggttgcaccactcatccagtgtgattactgtcctctgctgttccatatggactgtctcgaaccacctttgaccgccatgcccttaggcagatggatgtgtcctaaccacatcgaacatgttgtgctgaatcagaagaacatgacccttagcaaccggtgccaggtattcgataggtttcaagatacagtgtcgcagcacgtggtgaaagtcgatttccttaaccggatccacaagaagcaccctccgaaccgtagagtgctgcagagcgttaagcgaaggtcactgaaagttccagacgcaattaagagccaataccaattccctcccccactcatcgcccctgccgctatacgcgacggagaactcatttgtaacggcattcccgaggagagccaaatgcacctgcttaactcggaacatctggctacccaggccgaacagcaggagtggctgtgctctgtcgttgcccttcaatgcagcatcctcaaacacctctcagccaagcagatgccctcccattgggattccgagcagacagaaaaggctgatatcaaacccgtgatcgtcaccgattcctcggtgactacttcgctgcagacagccgacaaaactcccaccccctcccactaccccctgtcttgccctagtggaataagcactcagaactccctgtcctgttctccacctcaccagtctcccgcactggaagatatcggatgcagcagttgcgccgagaaatccaagaaaaccccgtgtggcacagccaacggtccagttaacaccgaagtcaaggcaaacggccctcacctgtactcatcaccaactgattcaaccgatccacgaaggctccctggcgccaatacacctctgccaggtctaagtcatcggcaggggtggccccgcccacttacgcctcccgcggccggaggcctacagaatcatactgtcggcattatcgttaaaaccgagaacgccaccggaccctctagttgcccccagagatccctagtgcctgtaccgagcctacccccgagtattccaagctcctgcgccagcattgagaacaccagcaccctgcaaaggaaaaccgtgcagtcacagattggtccccctctaactgatagccgaccgcttgggagcccgcccaacgcaacccgagttctgacaccacctcaagctgctggagatggcatcctggccactaccgcgaaccagaggttttcttcaccagccccatctagcgacggaaaagtgtcaccgggaactctatccatcggaagtgctctcaccgttcccagctttcccgctaattcaaccgccatggtggatctgaccaacagccttagggccttcatggacgtcaacggcgagattgagatcaacatgcttgacgaaaagctgatcaagttcttggccctccaaaggatccatcagctgttcccatcaagagtgcaaccctcgcctggttctgtggggacccaccaactcgcatcaggcggtcatcatattgagggtgcccacgtgcacacctgccatcacatcatacgaagccctctctacgtctgcgagtggagcccttgtttacacggggaaagcgagctgcccgtgtcccagacaagcctgtgcgccttccatggtcttaacaaagctccatggttcttctccgaagagtcacgtaataagatggccactacggcgttctag

SEQ ID NO: 109002 - DNA, 2550 bp, Artificial Sequence
  derived and/or modified sequence
atgtgggagaaaatggaaaccaaaaccatagtttatgatctggacacatccggcggattgatggaacaaattcaggcacttctcgcccctcctaagaccgacgaggccgaaaaacggagcagaaagccagaaaaggagcctcgacgctcaggtagagcaactaaccacgactcgtgtgactcgtgtaaggagggtggcgatctcctctgttgcgaccattgcccagccgcattccacctcttggtttaccaggatttcgttgcccctatatctctgtttcatggcacattccatgatggccctacatgtagttttgcacaaaagagggaacagaagaaggaactcggccatgtgaacggactggttgataagtcgggaaaacgcaccacctcacccagttccgacactgatctactcgacagatcagcgagcaagaccgagttgaaggccatagcacacgctcggatcctagagcgaagggccagcaggccaggcactcctacgtctagcgcatcgacagagactccaacatccgagcaaaatgatgtggatgaggatatcatcgatgtcgacgaggagccagttgccgctgagccggattacgtgcagccgcagttgcgacggccattcgaactcctgatcgcagccgctatggagcggaaccctactcagtttcagctgcccaatgagctaacgtgcacgactgcacttcccggatcttcaaaacgacggagaaaggaggaaactaccggcaaaaatgtaaagaaaacgcagcatgagctggatcacaatggactcgtccccttgccggtcaaggtctgcttcacgtgtaatagatcctgcagagttgctcctctgatccaatgcgactattgcccccttctgttccacatggactgtcttgaacctcccttgacggcaatgcctctcgggcgttggatgtgccctaaccacatcgagcacgttgtcctcaaccagaagaatatgacgttgagcaacagatgtcaggtcttcgaccgcttccaggacactgtatctcagcacgtggtgaaagttgactttctgaacaggattcacaagaagcacccacctaaccgcagagtactgcagagcgttaaaaggcgatcactcaaagttcccgacgctataaaatcacaataccaatttcccccacctctgattgcacccgcagctattagagatggtgaactgatctgtaacggcattcccgaagagtcgcaaatgcacctgctgaattccgagcatctagctacccaggctgagcagcaggaatggctgtgctctgtggtagccctgcaatgcagcatcctcaagcacctgtccgcaaagcaaatgccgagccattgggacagtgaacagaccgaaaaggccgacatcaagcccgtcatagtgactgattccagcgtaactactagcctgcagactgcagataagacgcctaccccgagccattaccctctgtcgtgcccttccgggatctctacccagaactcgctcagttgttcgcctccacatcaatcccccgcactcgaagacattgggtgttcctcatgcgcagagaagtctaaaaagacaccctgtggaacggcgaacggccctgttaacactgaagtgaaagctaatggaccccatctttatagctcacccacagattcaacggatccccgtaggcttccaggcgcaaatactcccctgcccggactgtctcataggcaagggtggcctaggcctttaaccccccctgccgcaggcggtctgcagaatcatacggtaggaattatagtgaaaaccgagaacgccaccgggccatcatcctgccctcagcgctcgctggtgcctgtgccctcgcttccgcctagtatcccgtcctcttgtgcgtccattgaaaacacgtccactctgcaaaggaagaccgtccaaagccagattggcccaccgttgacagactccagacctcttgggtcccctccaaacgcaaccagagtgctcacaccaccccaggcagccggagacgggattctggccacaacagccaaccaacggttctcctcacccgctcccagctctgatgggaaagtgagccctgggactttgtcaatcggaagtgccctgactgtgccgtctttccccgctaatagtactgctatggtagacctcaccaactctctgcgtgccttcatggatgtgaatggcgagattgagatcaacatgcttgatgagaaactgataaagttcctcgcgcttcagaggatccatcagttattcccgtcaagagttcagccctcccccggttctgtaggcactcaccaattggcctctgggggtcaccatatcgagggagctcatgtgcacacctgccaccacattatacggtcaccattgtatgtctgtgagtggtctccctgtctgcacggagaaagcgagctacctgtgtctcagacgtctttgtgtgcctttcatggactgaacaaggcaccatggtttttcagcgaagagagccggaacaagatggccaccactgcattttag

SEQ ID NO: 109003 - DNA, 2550 bp, Artificial Sequence
  derived and/or modified sequence
atgtgggagaagatggagaccaagaccatcgtgtacgacctggacaccagcggcggcctgatggagcagatccaggccctgctggccccccccaagaccgacgaggccgagaagagaagcagaaagcccgagaaggagcccagaagaagcggcagagccaccaaccacgacagctgcgacagctgcaaggagggcggcgacctgctgtgctgcgaccactgccccgccgccttccacctgctggtgtaccaggacttcgtggcccccatcagcctgttccacggcaccttccacgacggccccacctgcagcttcgcccagaagagagagcagaagaaggagctgggccacgtgaacggcctggtggacaagagcggcaagagaaccaccagccccagcagcgacaccgacctgctggacagaagcgccagcaagaccgagctgaaggccatcgcccacgccagaatcctggagagaagagccagcagacccggcacccccaccagcagcgccagcaccgagacccccaccagcgagcagaacgacgtggacgaggacatcatcgacgtggacgaggagcccgtggccgccgagcccgactacgtgcagccccagctgagaagacccttcgagctgctgatcgccgccgccatggagagaaaccccacccagttccagctgcccaacgagctgacctgcaccaccgccctgcccggcagcagcaagagaagaagaaaggaggagaccaccggcaagaacgtgaagaagacccagcacgagctggaccacaacggcctggtgcccctgcccgtgaaggtgtgcttcacctgcaacagaagctgcagagtggcccccctgatccagtgcgactactgccccctgctgttccacatggactgcctggagccccccctgaccgccatgcccctgggcagatggatgtgccccaaccacatcgagcacgtggtgctgaaccagaagaacatgaccctgagcaacagatgccaggtgttcgacagattccaggacaccgtgagccagcacgtggtgaaggtggacttcctgaacagaatccacaagaagcacccccccaacagaagagtgctgcagagcgtgaagagaagaagcctgaaggtgcccgacgccatcaagagccagtaccagttccccccccccctgatcgcccccgccgccatcagagacggcgagctgatctgcaacggcatccccgaggagagccagatgcacctgctgaacagcgagcacctggccacccaggccgagcagcaggagtggctgtgcagcgtggtggccctgcagtgcagcatcctgaagcacctgagcgccaagcagatgcccagccactgggacagcgagcagaccgagaaggccgacatcaagcccgtgatcgtgaccgacagcagcgtgaccaccagcctgcagaccgccgacaagacccccacccccagccactaccccctgagctgccccagcggcatcagcacccagaacagcctgagctgcagccccccccaccagagccccgccctggaggacatcggctgcagcagctgcgccgagaagagcaagaagaccccctgcggcaccgccaacggccccgtgaacaccgaggtgaaggccaacggcccccacctgtacagcagccccaccgacagcaccgaccccagaagactgcccggcgccaacacccccctgcccggcctgagccacagacagggctggcccagacccctgaccccccccgccgccggcggcctgcagaaccacaccgtgggcatcatcgtgaagaccgagaacgccaccggccccagcagctgcccccagagaagcctggtgcccgtgcccagcctgccccccagcatccccagcagctgcgccagcatcgagaacaccagcaccctgcagagaaagaccgtgcagagccagatcggcccccccctgaccgacagcagacccctgggcagcccccccaacgccaccagagtgctgacccccccccaggccgccggcgacggcatcctggccaccaccgccaaccagagattcagcagccccgcccccagcagcgacggcaaggtgagccccggcaccctgagcatcggcagcgccctgaccgtgcccagcttccccgccaacagcaccgccatggtggacctgaccaacagcctgagagccttcatggacgtgaacggcgagatcgagatcaacatgctggacgagaagctgatcaagttcctggccctgcagagaatccaccagctgttccccagcagagtgcagcccagccccggcagcgtgggcacccaccagctggccagcggcggccaccacatcgagggcgcccacgtgcacacctgccaccacatcatcagaagccccctgtacgtgtgcgagtggagcccctgcctgcacggcgagagcgagctgcccgtgagccagaccagcctgtgcgccttccacggcctgaacaaggccccctggttcttcagcgaggagagcagaaacaagatggccaccaccgccttctag

SEQ ID NO: 109004 - protein, 523 aa, Artificial Sequence
  derived and/or modified sequence
MTPQSLLQTTLFLLSLLFLVQGAHGRGHREDFRFCSQQLQSLESKLTSVRFMGDMVSFEEDRINATVWKLQPTAGLQDLHIHSRQEEEQSEIMEYSVLLPRTLFQRTKGRSGEAEKRLLLVDFSSQALFQDKNSSQVLGEKVLGIVVQNTKVANLTEPVVLTFQHQLQPKNVTLQCVFWVEDPTLSSPGHWSSAGCETVRRETQTSCFCNHLTYFAVLMVSSVEVDAVHKHYLSLLSYVGCVVSALACLVTIAAYLCSRVPLPCRRKPRDYTIKVHMNLLLAVFLLDTSFLLSEPVALTGSEAGCRASAIFLHFSLLTCLSWMGLEGYNLYRLVVEVFGTYVPGYLLKLSAMGWGFPIFLVTLVALVDVDNYGPIILAVHRTPEGVIYPSMCWIRDSLVSYITNLGLFSLVFLFNMAMLATMVVQILRLRPHTQKWSHVLTLLGLSLVLGLPWALIFFSFASGTFQLVVLYLFSIITSFQGFLIFIWYWSMRLQARGGPSPLKSNSDSARLPISSGSTSSSRI

SEQ ID NO: 109005 - DNA, 3174 bp, Artificial Sequence
  derived and/or modified sequence
aagcagggtctcactctgtcacccaggctggagtgcagtggcgcagttatagctcactgcagcctcgacctcctgggctcaagtgatccttccacctcagcctccctagtagctgggaccacaggtggtgacttccaagagtgactccgtcggaggaaaatgactccccagtcgctgctgcagacgacactgttcctgctgagtctgctcttcctggtccaaggtgcccacggcaggggccacagggaagactttcgcttctgcagccagcagttgcagagcctggagtcgaaactgacctctgtgagattcatgggggacatggtgtccttcgaggaggaccggatcaacgccacggtgtggaagctccagcccacagccggcctccaggacctgcacatccactcccggcaggaggaggagcagagcgagatcatggagtactcggtgctgctgcctcgaacactcttccagaggacgaaaggccggagcggggaggctgagaagagactcctcctggtggacttcagcagccaagccctgttccaggacaagaattccagccaagtcctgggtgagaaggtcttggggattgtggtacagaacaccaaagtagccaacctcacggagcccgtggtgctcactttccagcaccagctacagccgaagaatgtgactctgcaatgtgtgttctgggttgaagaccccacattgagcagcccggggcattggagcagtgctgggtgtgagaccgtcaggagagaaacccaaacatcctgcttctgcaaccacttgacctactttgcagtgctgatggtctcctcggtggaggtggacgccgtgcacaagcactacctgagcctcctctcctacgtgggctgtgtcgtctctgccctggcctgccttgtcaccattgccgcctacctctgctccagggtgcccctgccgtgcaggaggaaacctcgggactacaccatcaaggtgcacatgaacctgctgctggccgtcttcctgctggacacgagcttcctgctcagcgagccggtggccctgacaggctctgaggctggctgccgagccagtgccatcttcctgcacttctccctgctcacctgcctttcctggatgggcctcgaggggtacaacctctaccgactcgtggtggaggtctttggcacctatgtccctggctacctactcaagctgagcgccatgggctggggcttccccatctttctggtgacgctggtggccctggtggatgtggacaactatggccccatcatcttggctgtgcataggactccagagggcgtcatctacccttccatgtgctggatccgggactccctggtcagctacatcaccaacctgggcctcttcagcctggtgtttctgttcaacatggccatgctagccaccatggtggtgcagatcctgcggctgcgcccccacacccaaaagtggtcacatgtgctgacactgctgggcctcagcctggtccttggcctgccctgggccttgatcttcttctcctttgcttctggcaccttccagcttgtcgtcctctaccttttcagcatcatcacctccttccaaggcttcctcatcttcatctggtactggtccatgcggctgcaggcccggggtggcccctcccctctgaagagcaactcagacagcgccaggctccccatcagctcgggcagcacctcgtccagccgcatctaggcctccagcccacctgcccatgtgatgaagcagagattcggcctcgtcgcacactgcctgtggcccccgagcccggcccagccccaggccagtcagccgcagactttggaaagcccaacgaccatggagagatgggccgttgccatggtggacggactcccgggctgggcttttgaattggccttggggactactcggctctcactcagctcccacgggactcagaagtgcgccgccatgctgcctagggtactgtccccacatctgtcccaacccagctggaggcctggtctctccttacaacccctgggcccagccctcattgctgggggccaggccttggatcttgagggtctggcacatccttaatcctgtgcccctgcctgggacagaaatgtggctccagttgctctgtctctcgtggtcaccctgagggcactctgcatcctctgtcattttaacctcaggtggcacccagggcgaatggggcccagggcagaccttcagggccagagccctggcggaggagaggccctttgccaggagcacagcagcagctcgcctacctctgagcccaggccccctccctccctcagccccccagtcctccctccatcttccctggggttctcctcctctcccagggcctccttgctccttcgttcacagctgggggtccccgattccaatgctgttttttggggagtggtttccaggagctgcctggtgtctgctgtaaatgtttgtctactgcacaagcctcggcctgcccctgagccaggctcggtaccgatgcgtgggctgggctaggtccctctgtccatctgggcctttgtatgagctgcattgcccttgctcaccctgaccaagcacacgcctcagaggggccctcagcctctcctgaagccctcttgtggcaagaactgtggaccatgccagtcccgtctggtttccatcccaccactccaaggactgagactgacctcctctggtgacactggcctagggcctgacactctcctaagaggttctctccaagcccccaaatagctccaggcgccctcggccgcccatcatggttaattctgtccaacaaacacacacgggtagattgctggcctgttgtaggtggtagggacacagatgaccgacctggtcactcctcctgccaacattcagtctggtatgtgaggcgtgcgtgaagcaagaactcctggagctacagggacagggagccatcattcctgcctgggaatcctggaagacttcctgcaggagtcagcgttcaatcttgaccttgaagatgggaaggatgttctttttacgtaccaattcttttgtcttttgatattaaaaagaagtacatgttcattgtagagaatttggaaactgtagaagagaatcaagaagaaaaataaaaatcagctgttgtaatcacctagc

SEQ ID NO: 109006 - DNA, 1572 bp, Artificial Sequence
  derived and/or modified sequence
atgacccctcaaagcctgctgcagactacgttgtttcttctctccttactgttcttagtgcaaggcgctcatgggcgaggccatagagaagactttcggttctgctcccagcagctgcagtctcttgaaagtaagctcacaagtgtgaggtttatgggcgacatggtttcctttgaggaagatcggattaacgcaaccgtgtggaaactccagcccacggcgggactccaagaccttcacatacactctagacaggaggaagagcaatctgaaatcatggagtacagcgtcctgctgccgaggaccctgttccaaagaaccaagggacgttccggcgaagctgagaaacgcctgctgcttgtcgatttctcaagccaggccctgttccaggacaaaaatagctcacaggtcctgggcgaaaaagtgcttggcatcgttgttcaaaacacaaaggtagccaatctgaccgagcccgtcgtgctaactttccagcaccagcttcagcctaagaatgtcaccttgcaatgcgtgttctgggtggaggacccaacactgagcagcccaggacactggtctagcgcagggtgcgaaacagtgcgacgggagacccagacttcatgtttctgtaaccaccttacctacttcgccgttcttatggtaagttctgtggaggtggacgcagtgcacaagcattatttgagccttctgagctatgtcgggtgcgtggtcagtgccctagcatgcctcgtgactatcgctgcgtacctctgctctagagtgccacttccttgtagaagaaagcctagggattatacaatcaaggtacatatgaaccttcttctggccgtgtttctgctagacacttcctttctactgtcagaacctgtcgcattgaccggcagtgaagcaggttgccgtgccagcgccatctttttgcacttcagccttcttacatgtcttagctggatgggcctggaagggtacaatctttataggctagtcgtagaagtctttggcacatatgtgccagggtatctgttgaagctctccgctatgggctggggatttcctatttttttggtgacactggtggccctcgttgatgtggacaactacggccctattatccttgctgtacacagaacccccgaaggggtgatctaccctagcatgtgctggatccgtgacagtctggtgtcctacattaccaatctcggcttattttccctggtgttcctgtttaacatggctatgctggcaaccatggttgtgcaaattctccgtctacgcccgcacacccaaaagtggtcgcatgttctaaccttactcggattgagcttggtgttggggttaccatgggctttaatcttcttctcctttgcaagcgggaccttccagttagtcgtcctctatctgttctccattatcacctcattccaggggtttttaattttcatttggtattggtccatgaggctgcaggccaggggcggaccttccccattgaagagcaattcggactcagcccggctgcccatcagcagcggcagcacctcgagcagccgcatctag

SEQ ID NO: 109007 - DNA, 1572 bp, Artificial Sequence
  derived and/or modified sequence
atgaccccccagagcctgctgcagaccaccctcttcctgctgagcctgctcttcctggtgcagggcgcccacggccggggccaccgggaggacttccgcttctgcagccagcagctgcagagcctggagagcaagctgacctctgtgcgcttcatgggagacatggtgtcctttgaggaggaccgcatcaatgccaccgtgtggaagctgcagcccacagctggcctgcaggacctgcacatccacagccggcaggaggaggagcagagcgagatcatggagtacagcgtgctgctgcccaggaccctcttccagaggaccaagggccgctctggagaggccgagaagaggctgctgctggtggacttcagcagccaggccctcttccaggacaagaacagcagccaggtgctgggggagaaggtgctgggcatcgtggtgcagaacaccaaggtggccaacctgacagagcctgtggtgctgaccttccagcaccagctgcagcccaagaatgtgaccctgcagtgtgtgttctgggtggaggaccccaccctgagcagccctggccactggagcagcgctggctgtgagaccgtgcggcgggagacccagaccagctgcttctgcaaccacctgacctactttgctgtgctgatggtgtcctctgtggaggtggatgctgtgcacaagcactacctgagcctgctgtcctatgtgggctgtgtggtgtctgccctggcctgcctggtgaccatcgccgcctacctgtgcagccgggtgcccctgccctgcaggaggaagccccgggactacaccatcaaggtgcacatgaacctgctgctggccgtgttcctgctggacaccagcttcctgctgtctgagcctgtggccctgactggaagtgaagctggctgccgggccagcgccatcttcctgcacttcagcctgctgacctgcctgtcctggatgggcctggagggctacaacctgtaccgcctggtggtggaggtgtttggcacctacgtgcccggctacctgctgaagctgagcgccatgggctggggcttccccatcttcctggtgaccctggtggccctggtggatgtggacaactacggccccatcatcctggccgtgcacaggaccccagagggcgtcatctaccccagcatgtgctggatccgggacagcctggtgtcctacatcaccaacctgggcctcttcagcctggtgttcctgttcaacatggccatgctggccaccatggtggtgcagatcctgcggctgcggccccacacccagaagtggagccacgtgctgaccctgctgggcctgagcctggtgctgggcctgccctgggccctgatcttcttctcctttgccagcggcaccttccagctggtggtgctgtacctgttcagcatcatcaccagcttccagggcttcctgatcttcatctggtactggagcatgaggctgcaggcccggggcggccccagccccctgaagagcaacagcgacagcgcccggctgcccatcagcagcggcagcaccagcagcagccgcatctag

SEQ ID NO: 109008 - DNA, 1572 bp, Artificial Sequence
  derived and/or modified sequence
atgaccccccagagcctgctgcagaccaccctgttcctgctgagcctgctgttcctggtccagggcgcacatggccggggacatagggaagattttcggttctgtagtcaacagctgcagagcctcgagtctaaactcacctccgtcaggtttatgggcgacatggtcagcttcgaagaggatcgcatcaacgctaccgtgtggaaactgcaacctacagctggactgcaagacctccatattcattcacggcaggaagaagaacaaagcgagatcatggaatactctgttctgctgccacgcactctctttcaacgcaccaaggggcgcagtggggaggccgaaaaacgactccttctggtggacttcagttcccaggctctctttcaagacaagaactcatcacaagtactaggagagaaagtacttggcatcgtcgtgcagaacacaaaagttgccaacctgacagagccagtggtcctgacattccaacatcagttacaacctaagaacgttacccttcagtgcgtcttttgggtggaagacccaaccctgtcctcgccaggtcattggtctagcgccggatgcgagacagtgaggagggagacccaaacatcctgcttctgcaatcacttgacatacttcgctgtgttgatggttagctctgttgaagtagacgcagtccacaagcactacttgtccctgctttcgtacgtgggatgcgtagtgtctgctttggcttgcctggtgaccatcgccgcctatctgtgctctagggtccctctgccatgtagacgcaaaccgagagactataccatcaaggtccatatgaacctgctattggccgtttttctcctggacacctctttccttctcagtgaaccagtagctctgacaggatccgaagccggctgccgcgcctctgctattttcttacatttctccctgttaacatgcctttcatggatggggttggaagggtataacttatatcgcctagtggtggaggtgtttggtacatatgtcccggggtatctgctcaaacttagcgccatggggtggggattccccattttcctcgtcaccctggtggcattggtggacgttgacaactatggacccatcatcctggccgtccaccgcaccccagaaggggtcatctacccatccatgtgctggattcgtgactccttggtgtcctatatcaccaatttaggactgttctccctggtgttcctgtttaatatggctatgctcgccaccatggtggtgcaaatcctgagacttcggccccatacgcagaagtggtcccacgtcctgacgctgctcggcctgagcctcgtgttgggactaccttgggcacttatctttttttcattcgcctctgggaccttccaactcgtggtactttacctgttttctatcatcacaagtttccaggggttcctgattttcatctggtactggtctatgagactccaggcgagaggaggtccatctcctttgaagtcaaactctgattctgctcggctacctatttcctctggctcgaccagttcaagccgtatttag

SEQ ID NO: 109009 - DNA, 1572 bp, Artificial Sequence
  derived and/or modified sequence
atgacaccgcagtctctcctgcagaccacacttttccttctgtccctgctctttcttgtgcagggggctcacgggagaggccaccgggaggacttccgcttttgcagccagcagctgcagagcttggaaagcaagctcacaagcgttcgcttcatgggcgacatggtgagttttgaagaggatcggattaacgctacagtgtggaagctgcagcctactgcaggactgcaggacctccacatccacagccgtcaggaagaagaacagagcgaaatcatggaatactcagtcctgctccctcgcaccctctttcagcgaactaaaggtaggtccggcgaagccgaaaagcgattgctcctcgtggacttttcttctcaggcccttttccaggacaaaaactcttcgcaggtgcttggtgaaaaggtcctgggcatcgtggtacagaatactaaggtagcgaatttgactgaacctgttgtactcacattccagcatcagctgcagccgaaaaatgtcaccctgcaatgcgtgttctgggtggaagatcctacattatcaagtccagggcattggtctagcgcgggttgtgagactgtgcggcgagagacacagaccagttgcttttgtaaccacttgacatatttcgccgtcctgatggtgagctcggttgaagtggatgccgtgcacaagcactacctatcactgctgtcttacgtcgggtgcgtcgtgagcgcattggcctgtctggtgacaatagctgcatacctctgttctagggtacccctgccttgccgccgaaaacctcgagactatactattaaggtccacatgaacctcctgcttgctgttttcctgcttgacacaagcttcctactcagtgaacccgttgcgttgaccgggagcgaggccggatgcagagccagcgccattttcctccacttcagtttactgacctgcttatcttggatggggttagaaggctataacctgtaccgacttgtggttgaggtattcgggacctatgtcccaggctacctcctgaagctatcagccatgggctgggggtttccgatttttttggtcaccctggtcgctctggtggacgtggacaattatggaccaattatccttgctgtgcaccgtaccccggagggggtgatttaccctagcatgtgctggatacgtgacagcttggtgtcctacataactaatttaggactgttctctctggtattcctgtttaacatggcaatgctcgctactatggtggtgcagattctgagattgaggccgcacactcagaaatggtcccacgttctgaccttgctaggtctttcactcgtgttgggcctcccatgggccctgatttttttctcatttgcaagcggtacttttcagcttgtggtgctctacctgttcagcatcataacatctttccaaggatttctgatctttatctggtactggagcatgaggctgcaggcgagagggggtccttcaccgctcaagtctaattcagactctgcaagactcccaatatcctcaggatctactagcagttctagaatctag

SEQ ID NO: 109010 - DNA, 1572 bp, Artificial Sequence
  derived and/or modified sequence
atgaccccccagagcctgctgcagaccaccctgttcctgctgagcctgctgttcctggtgcagggcgcccacggcagaggccacagagaggacttcagattctgcagccagcagctgcagagcctggagagcaagctgaccagcgtgagattcatgggcgacatggtgagcttcgaggaggacagaatcaacgccaccgtgtggaagctgcagcccaccgccggcctgcaggacctgcacatccacagcagacaggaggaggagcagagcgagatcatggagtacagcgtgctgctgcccagaaccctgttccagagaaccaagggcagaagcggcgaggccgagaagagactgctgctggtggacttcagcagccaggccctgttccaggacaagaacagcagccaggtgctgggcgagaaggtgctgggcatcgtggtgcagaacaccaaggtggccaacctgaccgagcccgtggtgctgaccttccagcaccagctgcagcccaagaacgtgaccctgcagtgcgtgttctgggtggaggaccccaccctgagcagccccggccactggagcagcgccggctgcgagaccgtgagaagagagacccagaccagctgcttctgcaaccacctgacctacttcgccgtgctgatggtgagcagcgtggaggtggacgccgtgcacaagcactacctgagcctgctgagctacgtgggctgcgtggtgagcgccctggcctgcctggtgaccatcgccgcctacctgtgcagcagagtgcccctgccctgcagaagaaagcccagagactacaccatcaaggtgcacatgaacctgctgctggccgtgttcctgctggacaccagcttcctgctgagcgagcccgtggccctgaccggcagcgaggccggctgcagagccagcgccatcttcctgcacttcagcctgctgacctgcctgagctggatgggcctggagggctacaacctgtacagactggtggtggaggtgttcggcacctacgtgcccggctacctgctgaagctgagcgccatgggctggggcttccccatcttcctggtgaccctggtggccctggtggacgtggacaactacggccccatcatcctggccgtgcacagaacccccgagggcgtgatctaccccagcatgtgctggatcagagacagcctggtgagctacatcaccaacctgggcctgttcagcctggtgttcctgttcaacatggccatgctggccaccatggtggtgcagatcctgagactgagaccccacacccagaagtggagccacgtgctgaccctgctgggcctgagcctggtgctgggcctgccctgggccctgatcttcttcagcttcgccagcggcaccttccagctggtggtgctgtacctgttcagcatcatcaccagcttccagggcttcctgatcttcatctggtactggagcatgagactgcaggccagaggcggccccagccccctgaagagcaacagcgacagcgccagactgcccatcagcagcggcagcaccagcagcagcagaatctag

SEQ ID NO: 109011 - protein, 512 aa, Artificial Sequence
  derived and/or modified sequence
MCELKRDLQLLSQFLKHPQKASRRPSAAPASQQLQSLESKLTSVRFMGDMVSFEEDRINATVWKLQPTAGLQDLHIHSRQEEEQSEIMEYSVLLPRTLFQRTKGRSGEAEKRLLLVDFSSQALFQDKNSSQVLGEKVLGIVVQNTKVANLTEPVVLTFQHQLQPKNVTLQCVFWVEDPTLSSPGHWSSAGCETVRRETQTSCFCNHLTYFAVLMVSSVEVDAVHKHYLSLLSYVGCVVSALACLVTIAAYLCSRRKPRDYTIKVHMNLLLAVFLLDTSFLLSEPVALTGSEAGCRASAIFLHFSLLTCLSWMGLEGYNLYRLVVEVFGTYVPGYLLKLSAMGWGFPIFLVTLVALVDVDNYGPIILAVHRTPEGVIYPSMCWIRDSLVSYITNLGLFSLVFLFNMAMLATMVVQILRLRPHTQKWSHVLTLLGLSLVLGLPWALIFFSFASGTFQLVVLYLFSIITSFQGFLIFIWYWSMRLQARGGPSPLKSNSDSARLPISSGSTSSSRI

SEQ ID NO: 109012 - protein, 117 aa, Artificial Sequence
  derived and/or modified sequence
MTVLEAVLEIQAITGSRLLSMVPGPARPPGSCWDPTQCTRTWLLSHTPRRRWISGLPRASCRLGEEPPPLPYCDQAYGEELSIRHRETWAWLSRTDTAWPGAPGVKQARILGELLLV

SEQ ID NO: 109013 - DNA, 1503 bp, Artificial Sequence
  derived and/or modified sequence
aaatggggtttcccaaacaggcgtgtgtattggacgcctcgggcggagcgcgggctggcgccgaggaccggccttgcgagcggcgcgcactataaaatggcgcgtgctgcaacccgcgcccgcttcggagagagaaatgctggggtgcagcttcaagcttaggaccacccaccatgcctatccaggtgctgaagggcctgaccatcactcattaagaacagaggaggctgcctgttactcctggtgttgcatccctccagacactctgctgtttcctgcctaggcgtggctgcagccatggctaggaaagcgctgccacccacccacctgggccagagctggttctgctcctgctgcagggacactgagctggctatctcggcgcttcgggcaagaactgcaacaggctctcctgggtcctgcaggtgtacagccgggcccctgccttgtgcctcagctctcgagagctgctgctgccgggtgacctgatccaacctgataaggtgccatcttcagctaccactgcaaggccctgagggcaacagcagcacggcactgcccacccggctgctgatggcctggtgccagctgggagtcctcccggcacttcgaggccactgagccacccttccagccccagcccaccatggacaggggtatccagcttcctcctcaacctcgtcctctgcccctgagccagtgacgcccaaggacatgcctgttacccaggtcctgtaccagcactagctggtcaagggcatgacagtgctggaggccgtcttggagatccaggccatcactggcagcaggctgctctccatggtgccagggcccgccaggccaccaggctcatgctgggacccaacccagtgcacaaggacttggctgctgagccacacacccaggagaaggtggataagtgggctaccaagggcttcctgcaggctaggggaggagccacccccgcttccctattgtgaccaggcctatggggaggagctgtccatacgccaccgtgagacctgggcctggctctcaaggacagacaccgcctggcctggtgctccaggggtgaagcaggccagaatcctgggggagctgctcctggtttgagctgcattcaggaagtgcgggacatggtaggggaggcaaaaagccttgggcactaccctccctgtggagctgttcggtgtccgtcgagctagccacaccctgacaccatgttcaagggtaccggaagagaagggtgtctgcccccaacctcccctgtgggtgtcactggccagatgtcatgagggaagcaggccttgtgagtggacactgaccatgagtccctggggggagtgatcccccaggcatcgtgtgccatgttgcacttctgcccaggcagcagggtgggtgggtaccatgggtgcccacccctccaccacatggggccccaaagcactgcaggccaagcagggcaaccccacacccttgacataaaagcatcttgaagctttt

SEQ ID NO: 109014 - DNA, 1666 bp, Artificial Sequence
  derived and/or modified sequence
tgaaatggggtttcccaaacaggcgtgtgtattggacgcctcgggcggagcgcgggctggcgccgaggaccggccttgcgagcggcgcgcactataaaatggcgcgtgctgcaacccgcgcccgcttcggagagagaaatgctgggagacagggtttcaccatattggccaggctggtctcgaactcctgacttcgtgatctgcccacctcggcttcccaaagtgctgaggttgcaggcgtgagccaccgtgcccggccgcgtttcctactctttaagctctgttagcttggcctctgtccctgaaggtgcagcttcaagcttaggaccacccaccatgcctatccaggtgctgaagggcctgaccatcactcattaagaacagaggaggctgcctgttactcctggtgttgcatccctccagacactctgctgtttcctgcctaggcgtggctgcagccatggctaggaaagcgctgccacccacccacctgggccagagctggttctgctcctgctgcagggacactgagctggctatctcggcgcttcgggcaagaactgcaacaggctctcctgggtcctgcaggtgtacagccgggcccctgccttgtgcctcagctctcgagagctgctgctgccgggtgacctgatccaacctgataaggtgccatcttcagctaccactgcaaggccctgagggcaacagcagcacggcactgcccacccggctgctgatggcctggtgccagctgggagtcctcccggcacttcgaggccactgagccacccttccagccccagcccaccatggacaggggtatccagcttcctcctcaacctcgtcctctgcccctgagccagtgacgcccaaggacatgcctgttacccaggtcctgtaccagcactagctggtcaagggcatgacagtgctggaggccgtcttggagatccaggccatcactggcagcaggctgctctccatggtgccagggcccgccaggccaccaggctcatgctgggacccaacccagtgcacaaggacttggctgctgagccacacacccaggagaaggtggataagtgggctaccaagggcttcctgcaggctaggggaggagccacccccgcttccctattgtgaccaggcctatggggaggagctgtccatacgccaccgtgagacctgggcctggctctcaaggacagacaccgcctggcctggtgctccaggggtgaagcaggccagaatcctgggggagctgctcctggtttgagctgcattcaggaagtgcgggacatggtaggggaggcaaaaagccttgggcactaccctccctgtggagctgttcggtgtccgtcgagctagccacaccctgacaccatgttcaagggtaccggaagagaagggtgtctgcccccaacctcccctgtgggtgtcactggccagatgtcatgagggaagcaggccttgtgagtggacactgaccatgagtccctggggggagtgatcccccaggcatcgtgtgccatgttgcacttctgcccaggcagcagggtgggtgggtaccatgggtgcccacccctccaccacatggggccccaaagcactgcaggccaagcagggcaaccccacacccttgacataaaagcatcttgaagctttt

SEQ ID NO: 109015 - DNA, 354 bp, Artificial Sequence
  derived and/or modified sequence
atgaccgtgctggaggccgtgctggagatccaggccatcaccggcagcagactgctgagcatggtgcccggccccgccagaccccccggcagctgctgggaccccacccagtgcaccagaacctggctgctgagccacacccccagaagaagatggatcagcggcctgcccagagccagctgcagactgggcgaggagcccccccccctgccctactgcgaccaggcctacggcgaggagctgagcatcagacacagagagacctgggcctggctgagcagaaccgacaccgcctggcccggcgcccccggcgtgaagcaggccagaatcctgggcgagctgctgctggtgtag

SEQ ID NO: 109016 - DNA, 354 bp, Artificial Sequence
  derived and/or modified sequence
atgaccgtgttggaggccgtgcttgaaatccaagctatcaccggctctaggctgctttctatggtaccaggaccagcccgcccccccggctcctgctgggaccccacccaatgtacacggacctggctgttaagccatacaccccgcaggcgctggattagcggcctgcctcgtgcatcttgccgccttggagaggaaccccctcctctcccatattgcgaccaagcctatggagaagaacttagcatacgtcaccgggaaacttgggcatggctgtcaagaaccgatactgcatggccaggcgccccaggagttaaacaggcaagaatacttggcgagctattgctggtctag

SEQ ID NO: 109017 - DNA, 354 bp, Artificial Sequence
  derived and/or modified sequence
atgacagttcttgaagcagtgttagagatacaggccattacgggttcacgcctactttccatggttcctggccctgcgaggccacccgggtcctgctgggatcccacacagtgtacccgaacgtggctgctgtctcacaccccacgtagacgctggatttcgggcctgcctcgcgcatcatgtcggctgggagaggagcccccacctttgccatattgcgaccaagcctatggtgaggagctgagcatccgccacagggagacatgggcctggctgagccgcacagacacagcctggcctggggcacccggcgtgaagcaagctcgcattctgggcgaactgttgctggtgtag

SEQ ID NO: 109018 - DNA, 354 bp, Artificial Sequence
  derived and/or modified sequence
atgacagtgctggaggccgtgctggagatccaggccatcaccggcagccggctgctgtccatggtgcccggccctgcccggcccccaggcagctgctgggaccccacccagtgcaccaggacctggctgctgagccacaccccaagaagacgctggatcagcggcctgccccgggccagctgccgcctgggggaggagcccccacccctgccctactgtgaccaggcctatggagaggagctgagcatccgccaccgggagacctgggcctggctgagcaggacagacacagcctggccaggggcccctggggtgaagcaggcccgcatcctgggggagctgctgctggtgtag

SEQ ID NO: 109019 - DNA, 354 bp, Artificial Sequence
  derived and/or modified sequence
atgaccgtgctggaggccgtgctggagatccaggccatcaccggctctcgtcttctgtccatggtgcccgggcccgcccggccaccaggatcatgctgggacccgacacagtgcacccggacctggcttctctctcacacgccacggagacgctggatcagtggactaccaagagcctcctgccgcctcggcgaggagccacccccactcccttattgtgaccaggcttatggagaggaactctcaatccgtcaccgcgaaacctgggcctggctcagcaggacagacactgcctggcccggcgcacccggagtcaagcaggcccggattctgggtgagctgttgctggtgtag

SEQ ID NO: 109020 - DNA, 354 bp, Artificial Sequence
  derived and/or modified sequence
atgaccgtgctggaggccgtgctggagatccaggccatcaccggcagcaggttactgtccatggtgcctggccctgcacgtccacccggaagctgctgggacccgacccaatgcacgcgaacttggctcctcagccatacccccagaaggcgatggatatcggggctaccgcgagccagctgcaggctcggtgaggaaccaccccctcttccttattgcgatcaggcctatggcgaggagctatctattcgccaccgcgagacttgggcctggttatcccgtaccgacactgcttggcctggcgcccctggagtgaagcaggctagaatactgggcgaattgctactcgtgtag

SEQ ID NO: 109021 - DNA, 354 bp, Artificial Sequence
  derived and/or modified sequence
atgaccgtcctggaagctgtgctagaaatccaggccattaccgggtccagactcctttcaatggtcccaggacccgctaggcccccaggatcatgttgggacccgacccaatgtacccggacatggcttctttcccacactcccagacgtcgctggatcagcggccttcctcgagcaagttgtagactgggtgaggagccccctcccctgccctattgcgaccaagcttatggggaagagcttagcattagacatagagaaacctgggcttggctgtctcgtacagatacagcgtggccaggcgctcccggagttaagcaagcgagaatcctgggcgagctactcttagtttag

SEQ ID NO: 109022 - DNA, 354 bp, Artificial Sequence
  derived and/or modified sequence
atgaccgtgctagaagccgtcctggagatccaagctattaccggatcacgactgttgtcaatggtcccgggtcccgcacggcctcctggctcatgttgggatcccacccagtgcactcggacctggctcttgtcgcacacaccgcgtcgccgatggattagcggcctccccagggcctcttgtcgactgggcgaggagcctcctccactcccatattgtgaccaggcctacggagaggaactgtccatcagacacagagaaacctgggcctggctgtccagaacagacacagcatggcccggtgcccctggcgtgaaacaggcccgaattcttggggagctgttgctggtgtag

SEQ ID NO: 109023 - protein, 689 aa, Artificial Sequence
  derived and/or modified sequence
MDFNLILESLCRGNSVERKIYIPLNKTAPCVRLLNATHQIGCQSSISGDTGVIHVVEKEEDLQWVLTDGPNPPYMVLLESKHFTRDLMEKLKGRTSRIAGLAVSLTKPSPASGFSPSVQCPNDGFGVYSNSYGPEFAHCREIQWNSLGNGLAYEDFSFPIFLLEDENETKVIKQCYQDHNLSQNGSAPTFPLCAMQLFSHMHAVISTATCMRRSSIQSTFSINPEIVCDPLSDYNVWSMLKPINTTGTLKPDDRVVVAATRLDSRSFFWNVAPGAESAVASFVTQLAAAEALQKAPDVTTLPRNVMFVFFQGETFDYIGSSRMVYDMEKGKFPVQLENVDSFVELGQVALRTSLELWMHTDPVSQKNESVRNQVEDLLATLEKSGAGVPAVILRRPNQSQPLPPSSLQRFLRARNISGVVLADHSGAFHNKYYQSIYDTAENINVSYPEWLSPEEDLNFVTDTAKALADVATVLGRALYELAGGTNFSDTVQADPQTVTRLLYGFLIKANNSWFQSILRQDLRSYLGDGPLQHYIAVSSPTNTTYVVQYALANLTGTVVNLTREQCQDPSKVPSENKDLYEYSWVQGPLHSNETDRLPRCVRSTARLARALSPAFELSQWSSTEYSTWTESRWKDIRARIFLIASKELELITLTVGFGILIFSLIVTYCINAKADVLFIAPREPGAVSY

SEQ ID NO: 109024 - protein, 451 aa, Artificial Sequence [sequence omitted]

SEQ ID NO: 109025 - DNA, 2070 bp, Artificial Sequence
  derived and/or modified sequence
atggattttaatctgattctggaatctttgtgcaggggcaactcagtcgagcgcaagatttacatccccctgaacaagaccgccccttgtgtgcgactcctaaatgcgactcaccaaattggctgccaatcttcaataagcggagacactggcgtcatccacgtggtggagaaggaagaagatctgcagtgggtgctaacagatggtcctaatcctccatatatggttctgctggagagcaaacattttacccgtgatctcatggagaagttaaaaggcagaacatcccgtatcgcgggcctggccgtctcactgaccaaaccaagtcccgcttctggcttctctcccagcgtgcagtgcccaaatgacgggttcggagtgtactccaattcctatggtcctgaattcgcacattgtcgcgagattcaatggaactctctggggaatggcctggcatacgaggatttcagtttccccattttcctgctggaagacgagaacgagactaaagtcatcaaacagtgttaccaggatcacaacctctctcagaacggtagcgcaccaaccttcccactgtgtgccatgcagttattcagtcacatgcacgccgtgatcagcaccgcgacttgtatgagaagaagttcaatccaaagtacattttccattaatccggagatagtttgtgatcctctatctgattacaacgtctggagcatgctaaagcctattaacacaacgggtacgttgaagcctgacgaccgagtggtcgtggctgcgacccgcctggattctaggtcctttttttggaacgtcgcacctggagccgaatccgctgtggctagcttcgtcacgcagctggctgcagccgaggcacttcaaaaggctcctgatgtgactactctgccgagaaacgtcatgttcgtatttttccagggggagacctttgactatattggctcttcaaggatggtatacgatatggaaaaaggcaaattcccggtgcaactggaaaacgtggatagcttcgtggaacttggacaagtggctttaagaacctctttggaactctggatgcatacggatccagtgagtcagaagaatgagagtgtccgaaatcaggttgaggacttactcgctaccctggagaaatccggcgcaggtgtgcccgcagttattcttagacggcccaatcagagtcagcctcttccaccatcttccctgcaacgattcctcagggcccggaatatttcgggagttgtccttgcagatcacagcggcgcctttcacaacaagtactaccagtcgatctacgacaccgccgagaatattaacgtaagctatcccgagtggctaagtccagaagaggacctaaacttcgtgaccgacacagccaaggcactggccgacgttgcaacagtcctggggcgagcactatacgagcttgcaggcggcaccaatttttctgacaccgtgcaagctgaccctcagaccgtgactcggctgctgtacggatttctcattaaggctaacaattcatggttccaatccatccttaggcaggacctaaggtcctatctgggggatggtccactccagcattacattgccgtctcctcaccaactaacacaacttatgttgttcaatatgcgctggctaatttaacaggaacagtcgttaatctgacacgggagcaatgccaggatccaagcaaagtgccgagtgagaataaggatctctacgagtactcctgggttcagggtccgctgcactctaacgaaacggacaggctgcccagatgtgtaagaagcacagctaggttggctagggctctgtcaccggcgtttgaactgtcccagtggtcttcaaccgagtactctacatggactgagtcacggtggaaggatattcgagcaagaatctttctgatagccagcaaagagcttgaactgataactctgacagtcggattcggtatcctcattttctccctgattgtgacttactgcatcaatgcaaaggctgatgtgctgttcatcgctccaagggaacctggcgccgtaagttattag

SEQ ID NO: 109026 - DNA, 2070 bp, Artificial Sequence
  derived and/or modified sequence
atggactttaacctcatcttggaaagtctctgtagaggtaactctgtggagcgaaagatctatatcccactgaacaaaacagccccctgcgttaggcttctcaatgctacccaccagattggctgtcagtctagtatcagtggcgacaccggcgtaatacatgttgtggaaaaggaggaggacctgcagtgggtcctcacggatggccctaatcccccttatatggtcttgctggagtccaagcactttactcgcgatttgatggaaaagctgaagggacgcaccagccgaatcgctggcctggcggtttccctgaccaagccatctcctgcaagcggcttttctccgtctgtgcagtgtccaaatgacgggttcggcgtgtacagtaattcctacggacccgagttcgctcattgccgcgagatccagtggaatagtctgggaaatggcctagcatatgaagatttttcctttccaatctttctgcttgaggatgagaacgagaccaaagtgataaaacagtgttatcaggaccataatctctctcagaatggctcagcaccaacattccctctgtgcgcaatgcagctcttcagtcacatgcatgccgtcatctctacagcaacttgcatgcgtaggtcctcaatccagagcaccttcagtatcaatcccgaaatcgtgtgtgaccctttaagtgattacaatgtgtggtcaatgttgaagcccattaacacgaccggaactttgaagccggacgacagagtcgttgtcgctgccacaagattggattctcggtcattcttctggaacgtggcacctggcgccgaatcagcggtggcttcttttgtcacccagttggctgcagcagaggcactgcagaaagcgccggatgtaactacattgccaagaaacgtcatgtttgtcttctttcagggggagaccttcgattacattgggagctctaggatggtctacgacatggagaagggcaaatttccagtgcaactggagaacgtggattcctttgtggaactcggacaagttgccctaagaactagcctagaactctggatgcacacagaccccgtgagccagaaaaacgagtccgtccgaaatcaggtggaggacttgcttgcgacattggaaaagagcggagcgggcgtccccgccgtgatcctccgcagacctaaccagagccaacccctgcccccttcctccctacaacggttcctgcgcgctcgtaatattagtggcgtggttctagcggaccattcaggggccttccataacaagtactaccagagcatatacgacactgctgagaacattaacgtgtcatatcccgagtggttaagcccagaagaggatctcaattttgtcacggacaccgcgaaggctctcgcagacgtggccactgtgcttggtagggctctgtatgaactggccggtggcactaacttcagcgacacagttcaggccgaccctcagaccgtcacacggctactgtacggctttctgattaaagcgaacaatagctggtttcagtccattctccgccaggatctaaggtcctatctgggcgacggaccactccaacattatatcgccgtcagctcgcctaccaacactacatacgtggtgcagtatgcactcgccaatctgaccggaactgtggtcaatctgacccgagagcagtgtcaggacccttcgaaggtgccttcagaaaacaaggacctgtatgaatattcctgggtgcagggcccgctacattcaaacgaaacagatagactgcccaggtgtgtgcgtagcacagccaggttagcccgagctttgagccccgccttcgagctgtctcaatggtccagtacagagtatagcacctggacagagtctaggtggaaggacattagagcccggatctttctcattgcctctaaggaactggaactgattactttaaccgtgggatttggcatactcatcttctcccttatcgtgacctattgcatcaacgccaaggccgatgtgctgttcatcgcacctcgcgagcccggcgctgtcagctattag

SEQ ID NO: 109027 - DNA, 2070 bp, Artificial Sequence
  derived and/or modified sequence
atggacttcaacctgatcctggagagcctgtgccggggcaacagcgtggagaggaagatctacatccccctgaacaagacagccccctgtgtgcggctgctgaatgccacccaccagatcggctgccagagcagcatcagcggggacaccggggtcatccacgtggtggagaaggaggaggacctgcagtgggtgctgacagatggccccaaccccccctacatggtgctgctggagagcaagcacttcacccgggacctgatggagaagctgaagggccgcaccagcagaattgctggcctggccgtgtccctgaccaagcccagccctgccagcggcttcagccccagcgtgcagtgccccaatgatggctttggagtgtacagcaacagctatggccctgagtttgcccactgccgggagatccagtggaacagcctgggcaatggcctggcctatgaggacttctccttccccatcttcctgctggaggatgaaaatgagaccaaggtgatcaagcagtgctaccaggaccacaacctgagccagaatggcagcgcccccaccttccccctgtgtgccatgcagctgttcagccacatgcatgctgtgatcagcacagccacctgcatgaggaggagcagcatccagagcaccttcagcatcaaccctgagatcgtgtgtgaccccctgagtgactacaacgtgtggagcatgctgaagcccatcaacaccaccggcaccctgaagccagatgacagagtggtggtggccgccacccggctggacagccgctccttcttctggaatgtggcccctggagctgagagcgctgtggccagctttgtgacccagctggccgctgctgaggccctgcagaaggccccagatgtgaccaccctgcccagaaatgtgatgtttgtgttcttccagggcgagacctttgactacatcggcagcagcaggatggtgtatgacatggagaagggcaagtttcctgtgcagctggagaatgtggacagctttgtggagctgggccaggtggccctgcggaccagcctggagctgtggatgcacacagatcctgtgtcccagaagaatgaatctgtgaggaaccaggtggaggacctgctggccaccctggagaagagcggggccggcgtgcctgctgtgatcctgcggcggcccaaccagagccagcccctgccccccagcagcctgcagcgcttcctgcgggccaggaacatctctggagtggtgctggccgaccacagcggggccttccacaacaagtactaccagagcatctatgacacagctgagaacatcaacgtgtcctacccagagtggctgagccctgaggaggacctgaactttgtgacagacacagccaaggccctggctgatgtggccaccgtgctgggccgggccctgtatgagctggccggcggcaccaacttcagtgacacagtgcaggccgacccccagacagtgacccggctgctgtatggcttcctgatcaaggccaacaacagctggttccagagcatcctgcggcaggacctgcggagctacctgggagatggccccctgcagcactacatcgctgtgagcagccccaccaacaccacctacgtggtgcagtatgccctggccaacctgactggaacagtggtgaacctgacccgggagcagtgccaggaccccagcaaggtgcccagcgagaacaaggacctgtatgagtacagctgggtgcagggccccctgcacagcaatgaaacagaccggctgccccgctgtgtgcgcagcacagcccggctggcccgggccctgagccctgcctttgagctgagccagtggagcagcacagagtacagcacctggacagagagccgctggaaggacatccgggcccgcatcttcctgattgccagcaaggagctggagctgatcaccctgactgtgggcttcggcatcctgatcttcagcctgattgtgacctactgcatcaatgccaaggcagatgtgctcttcatcgccccccgggagcccggggctgtgtcctactag

SEQ ID NO: 109028 - DNA, 2070 bp, Artificial Sequence
  derived and/or modified sequence
atggacttcaacctgatcctggagagcctgtgccggggcaacagcgtcgagaggaaaatttatataccacttaataaaaccgccccctgcgtccggctactgaacgcaactcatcagataggttgccaaagctccatcagcggtgataccggcgtgattcatgttgtcgaaaaggaagaggacctgcaatgggtcctgactgatggacccaatccaccctatatggtcctcctcgagtcaaagcacttcacaagggacctcatggagaaactaaagggtaggacaagccgcatcgccgggctggcagtgagcctcaccaaaccaagtccggcctcaggattctccccatcagtacagtgtcctaatgatgggtttggagtatacagcaatagctacggaccagaatttgctcattgccgggaaatccaatggaactccctcggaaacgggttggcttacgaggatttcagcttcccaatatttctcttagaggacgagaatgaaaccaaagttataaagcagtgctaccaagatcacaacctgagccaaaacggttctgcaccaactttccctctgtgtgcaatgcagctcttctcccacatgcatgccgtgatctccacagctacttgcatgcgtagatctagtattcaaagcactttctctatcaatcctgagattgtttgtgatccactctccgattacaacgtatggtcaatgttgaagccaatcaataccacgggcaccttgaaaccggatgatagggtcgtcgtagctgccaccagactggacagcagatctttcttctggaacgtcgctccaggtgctgagtcagctgtagcgtcctttgttacccagctcgccgccgccgaggcactccagaaggctccggatgtgaccacgctcccccgcaatgtaatgtttgtctttttccagggagagacctttgactatattgggtccagccggatggtgtatgatatggagaagggcaaatttcccgtgcagttagagaacgtggactcattcgttgaactggggcaagtcgctctgcgaacctccttggaactgtggatgcataccgacccggtgtcccagaagaatgagtcagtccgcaaccaggtggaggacctcctggcaactctcgaaaagagtggagccggagtcccggccgtaattttgcggcggccgaatcagtctcagcccctgcctccgagttccctccaacggttcctcagagcgagaaacattagcggggttgtcctggctgatcatagtggcgcattccataataagtattatcagtcaatttacgatacagctgagaatatcaatgtctcatatcccgaatggctctcccctgaggaagatctcaatttcgtgacagacacagccaaagcactcgccgatgtggccactgtcttagggagagctctgtacgagcttgccggcggaacaaactttagtgataccgtgcaggctgaccctcaaacagtcacgcggctcctgtacgggttcttgataaaggctaacaactcatggtttcaaagcatactgcgacaggacttgaggagttatctgggcgatggccctctccaacactacatagctgtttcatcaccgaccaacaccacgtatgtggtgcaatatgctttggcaaatctgaccggaacagtggtaaatctgaccagagagcagtgtcaggatccttccaaagtcccttcagagaacaaggatctgtatgaatattcttgggttcagggccctttgcatagcaatgagactgacagactgccaaggtgcgtgagatctacagcccggcttgctagagctttgagccccgcattcgagttatcacagtggagtagcacagagtactcaacgtggaccgagtcccgctggaaggacataagggcacgaatcttcctcattgcttcaaaggagctggaactgatcacacttaccgtcggttttgggatccttatcttcagtctcatcgttacctattgcattaacgccaaagccgacgtactttttatagcaccgcgcgagcccggagcggtgtcatactag

SEQ ID NO: 109029 - DNA, 2070 bp, Artificial Sequence
  derived and/or modified sequence
atggacttcaacctgatcctggagagcctgtgccggggcaacagcgtggagcgaaaaatctacatacccctcaataagacagctccttgcgtccgcctgctgaacgccacccaccagatcgggtgtcagagcagcatctctggggacacaggagtgatccacgtggtcgagaaggaggaagacctacagtgggtgctgactgatggcccgaatcctccttacatggttttattggaatccaaacacttcactagggacctcatggagaagctcaagggccgtactagtaggatcgctggtctggcagtaagtctgactaagccaagtcccgcctctggtttttctccatccgttcagtgcccaaatgacggcttcggagtgtattcaaatagctatggacctgaattcgcccactgtagagagatacaatggaacagcctaggcaacggactcgcctacgaagacttctcgtttcctatctttctgctggaggatgagaacgagaccaaggtaatcaaacagtgttatcaggaccataatctgagccagaacggttccgccccgaccttccctctttgcgcaatgcaactgttcagtcatatgcacgccgtgatctcaaccgcaacgtgtatgcgtcggagctccattcagtccaccttttctataaatccggagattgtttgtgacccgctgtccgactacaacgtgtggagcatgctcaagccaatcaatactaccggtacactcaaaccggatgatcgggttgtggtggccgcgacccgtttagattcgagaagcttcttctggaacgtcgctccaggagccgaatcagccgttgcatcattcgtgactcaattggccgctgccgaggcactacagaaggctcccgacgtgactactttgcctcgcaacgtaatgtttgtgttcttccagggggagaccttcgattatattgggtcctcccgaatggtttacgatatggagaaggggaaatttccagtgcagctggaaaatgtggatagcttcgtcgagctgggacaggttgcattgcgcacatcccttgagctatggatgcacacggacccagtttcacagaagaatgagtctgtccggaatcaagtcgaagatctgctggcgacccttgaaaagtccggggctggggttccagcagtcattctacggcggcccaaccagtctcagcctctgccgcccagttcactgcagcgatttttgagagcccggaacatcagtggcgtggtgctggctgatcacagtggtgctttccataacaagtactaccaatcgatctacgacaccgccgagaacatcaacgtcagctaccccgaatggctgagcccagaagaggacctgaacttcgtgactgatactgctaaggctcttgccgacgtagcgaccgtgctggggcgggctctgtacgaactggctggcggcacaaacttttccgataccgtccaggctgatccgcagacagtgacacgcctgctgtacggctttctcatcaaagcgaataactcgtggtttcagagcatcctccgccaagacctgcgcagttatttgggcgacggccctttgcagcactatatcgcggttagtagtcccactaacacaacttatgtcgtgcaatatgctttggcaaatctgacaggaacagtggtcaacctgacccgcgaacaatgccaagacccctctaaagtgccttcagagaacaaagacctgtacgagtacagttgggtgcagggaccactccacagcaatgaaacagacaggctgccacggtgcgtcagatcaacagccagacttgcgcgggctctaagcccagctttcgaactgagtcagtggtcctctactgaatattcgacttggacagagtcccgatggaaggacatccgggcgagaatcttcctgatagcatcaaaagagttggagctgatcacactcaccgtggggttcggcatccttattttctcattaatcgtgacctactgtattaatgcaaaggctgacgtgcttttcatcgcgccacgggagccgggcgctgtctcttactag

SEQ ID NO: 109030 - DNA, 3031 bp, Artificial Sequence
  derived and/or modified sequence
agagacggtgtcagtggtagcctagagaggccgctaacagacaggagccgaacgggggcttccgctcagcagagaggcaagatggctacggcagggggtggctctggggctgacccgggaagtcggggtctccttcgccttctgtctttctgcgtcctactagcagtgtcactgtcaatggcgctacatggactttgtaataaccctttgaggcacatagctgggtgccatgtagaacatgtatctgttacgataagtgtgtgcccaagaaatcagaagaatggactttaatctcattttagaaagtttgtgcaggggaaactcagtggagaggaagatatatatccccttaaataaaacagctccctgtgttcgcctgctcaacgccactcatcagattggctgccagtcttcaattagtggagacacaggggttatccacgtagtagagaaagaggaggacctacagtgggtattgactgatggccccaaccccccttacatggttctgctggagagcaagcattttaccagggatttaatggagaagctgaaagggagaaccagccgaattgctggtcttgcagtgtccttgaccaagcccagtcctgcctcaggcttctctcctagtgtacagtgcccaaatgatgggtttggtgtttactccaattcctatgggccagagtttgctcactgcagagaaatacagtggaattcgctgggcaatggtttggcttatgaagactttagtttccccatctttcttcttgaagatgaaaatgaaaccaaagtcatcaagcagtgctatcaagatcacaacctgagtcagaatggctcagcaccaaccttcccactatgtgccatgcagctcttttcacacatgcatgctgtcatcagcactgccacctgcatgcggcgcagctccatccaaagcaccttcagcatcaacccagaaatcgtctgtgaccccctgtctgattacaatgtgtggagcatgctaaagcctataaatacaactgggacattaaagcctgacgacagggttgtggttgctgccacccggctggatagtcgttcctttttctggaatgtggccccaggggctgaaagcgcagtggcttcctttgtcacccagctggctgctgctgaagctttgcaaaaggcacctgatgtgaccaccctgccccgcaatgtcatgtttgtcttctttcaaggggaaacttttgactacattggcagctcgaggatggtctacgatatggagaagggcaagtttcccgtgcagttagagaatgttgactcatttgtggagctgggacaggtggccttaagaacttcattagagctttggatgcacacagatcctgtttctcagaaaaatgagtctgtacggaaccaggtggaggatctcctggccacattggagaagagtggtgctggtgtccctgctgtcatcctcaggaggccaaatcagtcccagcctctcccaccatcttccctgcagcgatttcttcgagctcgaaacatctctggcgttgttctggctgaccactctggtgccttccataacaaatattaccagagtatttacgacactgctgagaacattaatgtgagctatcccgaatggctgagccctgaagaggacctgaactttgtaacagacactgccaaggccctggcagatgtggccacggtgctgggacgtgctctgtatgagcttgcaggaggaaccaacttcagcgacacagttcaggctgatccccaaacggttacccgcctgctctatgggttcctgattaaagccaacaactcatggttccagtctatcctcaggcaggacctaaggtcctacttgggtgacgggcctcttcaacattacatcgctgtctccagccccaccaacaccacttatgttgtacagtatgccttggcaaatttgactggcacagtggtcaacctcacccgagagcagtgccaggatccaagtaaagtcccaagtgaaaacaaggatctgtatgagtactcatgggtccagggccctttgcattctaatgagacggaccgactcccccggtgtgtgcgttctactgcacgattagccagggccttgtctcctgcctttgaactgagtcagtggagctctactgaatactctacatggactgagagccgctggaaagatatccgtgcccggatatttctcatcgccagcaaagagcttgagttgatcaccctgacagtgggcttcggcatcctcatcttctccctcatcgtcacctactgcatcaatgccaaagctgatgtccttttcattgctccccgggagccaggagctgtgtcatactgaggaggaccccagcttttcttgccagctcagcagttcacttcctagagcatctgtcccactgggacacaaccactaatttgtcactggaacctccctgggcctgtctcagattgggattaacataaaagagtggaactatccaaaagagacagggagaaataaataaattgcctcccttcctccgctcccctttcccatcaccccttccccatttcctcttccttctctactcatgccagattttgggattacaaatagaagcttcttgctcctgtttaactccctagttacccaccctaatttgcccttcaggacccttctactttttccttcctgccctgtacctctctctgctcctcacccccacccctgtacccagccaccttcctgactgggaaggacataaaaggtttaatgtcagggtcaaactacattgagcccctgaggacaggggcatctctgggctgagcctactgtctccttcccactgtcctttctccaggccctcagatggcacattagggtgggcgtgctgcgggtgggtatcccacctccagcccacagtgctcagttgtactttttattaagctgtaatatctatttttgtttttgtctttttcctttattctttttgtaaatatatatataatgagtttcattaaaatagattatcccacacga

SEQ ID NO: 109031 - DNA, 2745 bp, Artificial Sequence
  derived and/or modified sequence
atggactttaatctcattttagaaagtttgtgcaggggaaactcagtggagaggaagatatatatccccttaaataaaacagctccctgtgttcgcctgctcaacgccactcatcagattggctgccagtcttcaattagtggagacacaggggttatccacgtagtagagaaagaggaggacctacagtgggtattgactgatggccccaaccccccttacatggttctgctggagagcaagcattttaccagggatttaatggagaagctgaaagggagaaccagccgaattgctggtcttgcagtgtccttgaccaagcccagtcctgcctcaggcttctctcctagtgtacagtgcccaaatgatgggtttggtgtttactccaattcctatgggccagagtttgctcactgcagagaaatacagtggaattcgctgggcaatggtttggcttatgaagactttagtttccccatctttcttcttgaagatgaaaatgaaaccaaagtcatcaagcagtgctatcaagatcacaacctgagtcagaatggctcagcaccaaccttcccactatgtgccatgcagctcttttcacacatgcatgctgtcatcagcactgccacctgcatgcggcgcagctccatccaaagcaccttcagcatcaacccagaaatcgtctgtgaccccctgtctgattacaatgtgtggagcatgctaaagcctataaatacaactgggacattaaagcctgacgacagggttgtggttgctgccacccggctggatagtcgttcctttttctggaatgtggccccaggggctgaaagcgcagtggcttcctttgtcacccagctggctgctgctgaagctttgcaaaaggcacctgatgtgaccaccctgccccgcaatgtcatgtttgtcttctttcaaggggaaacttttgactacattggcagctcgaggatggtctacgatatggagaagggcaagtttcccgtgcagttagagaatgttgactcatttgtggagctgggacaggtggccttaagaacttcattagagctttggatgcacacagatcctgtttctcagaaaaatgagtctgtacggaaccaggtggaggatctcctggccacattggagaagagtggtgctggtgtccctgctgtcatcctcaggaggccaaatcagtcccagcctctcccaccatcttccctgcagcgatttcttcgagctcgaaacatctctggcgttgttctggctgaccactctggtgccttccataacaaatattaccagagtatttacgacactgctgagaacattaatgtgagctatcccgaatggctgagccctgaagaggacctgaactttgtaacagacactgccaaggccctggcagatgtggccacggtgctgggacgtgctctgtatgagcttgcaggaggaaccaacttcagcgacacagttcaggctgatccccaaacggttacccgcctgctctatgggttcctgattaaagccaacaactcatggttccagtctatcctcaggcaggacctaaggtcctacttgggtgacgggcctcttcaacattacatcgctgtctccagccccaccaacaccacttatgttgtacagtatgccttggcaaatttgactggcacagtggtcaacctcacccgagagcagtgccaggatccaagtaaagtcccaagtgaaaacaaggatctgtatgagtactcatgggtccagggccctttgcattctaatgagacggaccgactcccccggtgtgtgcgttctactgcacgattagccagggccttgtctcctgcctttgaactgagtcagtggagctctactgaatactctacatggactgagagccgctggaaagatatccgtgcccggatatttctcatcgccagcaaagagcttgagttgatcaccctgacagtgggcttcggcatcctcatcttctccctcatcgtcacctactgcatcaatgccaaagctgatgtccttttcattgctccccgggagccaggagctgtgtcatactgaggaggaccccagcttttcttgccagctcagcagttcacttcctagagcatctgtcccactgggacacaaccactaatttgtcactggaacctccctgggcctgtctcagattgggattaacataaaagagtggaactatccaaaagagacagggagaaataaataaattgcctcccttcctccgctcccctttcccatcaccccttccccatttcctcttccttctctactcatgccagattttgggattacaaatagaagcttcttgctcctgtttaactccctagttacccaccctaatttgcccttcaggacccttctactttttccttcctgccctgtacctctctctgctcctcacccccacccctgtacccagccaccttcctgactgggaaggacataaaaggtttaatgtcagggtcaaactacattgagcccctgaggacaggggcatctctgggctgagcctactgtctccttcccactgtcctttctccaggccctcagatggcacattagggtgggcgtgctgcgggtgggtatcccacctccagcccacagtgctcagttgtactttttattaagctgtaatatctatttttgtttttgtctttttcctttattctttttgtaaatatatatataatgagtttcattaaaatagattatccc

SEQ ID NO: 109032 - DNA, 2070 bp, Artificial Sequence
  derived and/or modified sequence
atggatttcaatctgattctggagtccctctgcaggggcaactcagtggaacggaagatatatatcccactgaataaaaccgccccttgcgttaggttgcttaatgccacgcatcagattggctgccaatccagcatcagtggggatactggagtgatacacgtggtcgagaaggaggaagatttgcagtgggtgctgacagacggtcccaacccaccttacatggtgctactggaatcaaagcactttacacgcgatctgatggagaagttaaaggggaggacttcgcgaatcgctggtctggcagtctctctgacaaagccttcaccggcaagtggatttagcccatccgttcagtgccccaatgatggcttcggcgtgtatagcaattcctatggaccagagttcgcccattgccgagaaatccagtggaactctctggggaacggactggcatacgaggatttttcctttcctatctttctgctcgaagatgaaaacgaaacaaaggtaattaagcaatgctaccaggaccataacctctcacaaaacggcagcgctccaaccttccccctttgtgccatgcagttatttagccatatgcatgcagtaattagcactgctacttgtatgaggagatcctctatacagtccactttcagcatcaacccggaaatcgtgtgcgaccccttatctgactacaatgtgtggtcgatgttgaaacctattaacaccaccgggaccttgaaaccagatgaccgagtggtcgtagccgctacccgactggacagtcgtagcttcttctggaacgtggcacccggagccgagagtgccgtagccagcttcgtcacccagctagcagccgctgaggctcttcagaaggctccagacgtaaccaccttacccagaaatgtcatgtttgtgttttttcaaggggagacgtttgactacatcggctcctctcggatggtctatgacatggagaagggtaagtttcctgttcagctggaaaatgtggacagttttgtcgagcttggacaggtagctctgcgcacatcactagagctgtggatgcacacggaccctgtgagccagaaaaatgaatcggtaagaaatcaggttgaggatctactggcaaccctcgaaaaaagtggagcaggcgtgcccgcagtcattctgcggaggccgaatcagtcgcagccattaccgccatcctctttgcaacgcttcctccgcgcacgtaatattagcggtgtggtgctcgcagaccattcaggcgcttttcacaacaaatattatcagtcaatttatgacactgctgagaatattaacgtgagctatcctgagtggctgagtcccgaagaggatcttaatttcgtaacagatacagcaaaggcactggctgacgtggccactgtgctgggacgcgcattatacgagttggctggaggtaccaactttagtgacacagtccaggcagatccacagactgtgactaggctcctttatggatttctcattaaagcgaacaattcctggtttcagtctattctgaggcaggatcttaggtcatacctgggagacgggccactacagcattacattgccgtgtcttccccaaccaacactacgtacgtggttcagtacgcactcgcgaacctgactggcactgtagtgaatttaactagagaacaatgtcaggaccccagcaaagtgccttcggagaataaggacctctatgaatatagttgggttcaagggccacttcacagcaacgagaccgacaggctgccccgttgtgtgaggtctacagcaaggcttgccagagctctgagccccgcattcgaactgtcccaatggtcttcaacagagtacagcacatggactgaaagccgctggaaggacattagagcacggatcttcttaattgccagcaaggagttggagcttattacactcaccgtgggcttcggaatcctcatcttctctttgatcgtgacttactgcattaatgccaaggccgacgttctgttcatcgcccctagggagccaggcgctgtgagttactag

SEQ ID NO: 109033 - DNA, 2070 bp, Artificial Sequence
  derived and/or modified sequence
atggactttaaccttattcttgagagcctgtgtcgtggtaacagtgttgagagaaaaatttatattcctctgaacaagaccgcaccttgcgttcggctgctaaacgcgactcaccagatagggtgtcagtcctccatcagcggtgatacgggcgtgatccacgttgtggagaaagaggaggatctgcagtgggtccttacagacggcccaaatccaccatacatggtgctcctcgagagcaagcatttcacccgggatttaatggaaaagctcaagggccgtacctcaaggatcgcgggtctggctgtgagcttgacaaaaccttctcccgcttccgggttcagcccatccgttcagtgtcctaatgatggcttcggcgtgtattccaactcctacggaccagaatttgcacactgtagagaaattcagtggaattcgttaggtaatggactggcatatgaggactttagcttccccatcttcttgctcgaggatgaaaatgagactaaggtgatcaagcagtgttatcaggaccacaacttaagtcaaaacggttcagcccctacatttccactgtgtgcaatgcagctgttttcacacatgcatgccgttatttccacggcaacatgcatgcggaggtctagcatccaatctaccttttcaattaacccagagattgtgtgcgatccacttagcgactataacgtctggtcaatgctcaagcctattaacaccacaggaacactaaagcccgacgaccgggtggtggtggctgccacccgactggacagtagatcttttttctggaacgtcgcaccaggggctgagagtgccgtcgcaagctttgtaactcaactggcagcggcagaggccctgcagaaggctcccgacgttacaaccctgccgcgaaacgtgatgtttgttttctttcaaggagagacatttgactacatcggaagttctaggatggtgtacgatatggaaaaagggaaattccctgtgcagttagaaaacgtggactcgttcgtggaacttggacaggtagctcttaggacctcactggagctgtggatgcacactgatccagtcagtcagaagaatgagtctgtgcgcaaccaggtggaagatctccttgccacactagagaaaagcggagccggagtgcccgcagtgattctgagaagacccaatcaaagccagcccttacccccaagctccctgcagagattcttgcgagccaggaatatttccggcgtcgtgctcgcagaccactcaggcgcatttcacaacaagtactaccagagcatttatgacactgctgaaaatattaacgtctcatatccagagtggctgtccccagaggaggatcttaactttgttaccgacaccgccaaagcattagccgacgtggccacagtcttgggcagagcactctacgaactagcaggcggaaccaacttctctgacacagtccaggccgacccccaaacagttaccaggctgttgtacggctttctgatcaaagctaacaacagctggttccagagtatcctgcggcaagacctgcgctcttatttaggagacggacccctgcaacactacatcgcagtgtccagtcccactaacaccacctacgtggtccagtacgcgctcgcaaatctgactgggaccgtcgtgaatctgacacgcgagcagtgccaggatccctccaaggtcccaagcgagaacaaggacctgtatgaatattcctgggtgcaaggccctctgcacagtaacgaaactgatcggcttcccagatgtgtaaggtcaacggctcggctcgcgagggcactttccccagccttcgaactttcccagtggtcctctaccgaatactctacgtggactgaaagccggtggaaggacatccgagctcgcatctttctcattgcgtccaaagaactggagctgatcactctgactgtaggatttggcatcttaatcttttctcttattgtgacatactgcatcaatgccaaggcagacgtgctgtttatcgcccctcgggaacctggggcagtttcatactag

SEQ ID NO: 109034 - DNA, 2070 bp, Artificial Sequence
  derived and/or modified sequence
atggacttcaacctgatcctggagagcctgtgcagaggcaacagcgtggagagaaagatctacatccccctgaacaagaccgccccctgcgtgagactgctgaacgccacccaccagatcggctgccagagcagcatcagcggcgacaccggcgtgatccacgtggtggagaaggaggaggacctgcagtgggtgctgaccgacggccccaaccccccctacatggtgctgctggagagcaagcacttcaccagagacctgatggagaagctgaagggcagaaccagcagaatcgccggcctggccgtgagcctgaccaagcccagccccgccagcggcttcagccccagcgtgcagtgccccaacgacggcttcggcgtgtacagcaacagctacggccccgagttcgcccactgcagagagatccagtggaacagcctgggcaacggcctggcctacgaggacttcagcttccccatcttcctgctggaggacgagaacgagaccaaggtgatcaagcagtgctaccaggaccacaacctgagccagaacggcagcgcccccaccttccccctgtgcgccatgcagctgttcagccacatgcacgccgtgatcagcaccgccacctgcatgagaagaagcagcatccagagcaccttcagcatcaaccccgagatcgtgtgcgaccccctgagcgactacaacgtgtggagcatgctgaagcccatcaacaccaccggcaccctgaagcccgacgacagagtggtggtggccgccaccagactggacagcagaagcttcttctggaacgtggcccccggcgccgagagcgccgtggccagcttcgtgacccagctggccgccgccgaggccctgcagaaggcccccgacgtgaccaccctgcccagaaacgtgatgttcgtgttcttccagggcgagaccttcgactacatcggcagcagcagaatggtgtacgacatggagaagggcaagttccccgtgcagctggagaacgtggacagcttcgtggagctgggccaggtggccctgagaaccagcctggagctgtggatgcacaccgaccccgtgagccagaagaacgagagcgtgagaaaccaggtggaggacctgctggccaccctggagaagagcggcgccggcgtgcccgccgtgatcctgagaagacccaaccagagccagcccctgccccccagcagcctgcagagattcctgagagccagaaacatcagcggcgtggtgctggccgaccacagcggcgccttccacaacaagtactaccagagcatctacgacaccgccgagaacatcaacgtgagctaccccgagtggctgagccccgaggaggacctgaacttcgtgaccgacaccgccaaggccctggccgacgtggccaccgtgctgggcagagccctgtacgagctggccggcggcaccaacttcagcgacaccgtgcaggccgacccccagaccgtgaccagactgctgtacggcttcctgatcaaggccaacaacagctggttccagagcatcctgagacaggacctgagaagctacctgggcgacggccccctgcagcactacatcgccgtgagcagccccaccaacaccacctacgtggtgcagtacgccctggccaacctgaccggcaccgtggtgaacctgaccagagagcagtgccaggaccccagcaaggtgcccagcgagaacaaggacctgtacgagtacagctgggtgcagggccccctgcacagcaacgagaccgacagactgcccagatgcgtgagaagcaccgccagactggccagagccctgagccccgccttcgagctgagccagtggagcagcaccgagtacagcacctggaccgagagcagatggaaggacatcagagccagaatcttcctgatcgccagcaaggagctggagctgatcaccctgaccgtgggcttcggcatcctgatcttcagcctgatcgtgacctactgcatcaacgccaaggccgacgtgctgttcatcgcccccagagagcccggcgccgtgagctactag

SEQ ID NO: 109035 - protein, 255 aa, Artificial Sequence
  derived and/or modified sequence
MATAGGGSGADPGSRGLLRLLSFCVLLAGLCRGNSVERKIYIPLNKTAPCVRLLNATHQIGCQSSISGDTGVIHVVEKEEDLQWVLTDGPNPPYMVLLESKHFTRDLMEKLKGRTSRIAGLAVSLTKPSPASGFSPSVQCPNDGFGVYSNSYGPEFAHCREIQWNSLGNGLAYEDFSFPIFLLEDENETKVIKQETFDYIGSSRMVYDMEKGKFPVQLENVDSFVELGQVALRTSLELWMHTDPVSQKNESVRNQ

SEQ ID NO: 109036 - protein, 571 aa, Artificial Sequence
  derived and/or modified sequence
MATAGGGSGADPGSRGLLRLLSFCVLLAGLCRGNSVERKIYIPLNKTAPCVRLLNATHQIGCQSSISGDTGVIHVVEKEEDLQWVLTDGPNPPYMVLLESKHFTRDLMEKLKGRTSRIAGLAVSLTKPSPASGFSPSVQCPNDGFGVYSNSYGPEFAHCREIQWNSLGNGLAYEDFSFPIFLLEDENETKVIKQETFDYIGSSRMVYDMEKGKFPVQLENVDSFVELGQVALRTSLELWMHTDPVSQKNESVRNQVEDLLATLEKSGAGVPAVILRRPNQSQPLPPSSLQRFLRARNISGVVLADHSGAFHNKYYQSIYDTAENINVSYPEWLSPEEDLNFVTDTAKALADVATVLGRALYELAGGTNFSDTVQADPQTVTRLLYGFLIKANNSWFQSILRQDLRSYLGDGPLQHYIAVSSPTNTTYVVQYALANLTGTVVNLTREQCQDPSKVPSENKDLYEYSWVQGPLHSNETDRLPRCVRSTARLARALSPAFELSQWSSTEYSTWTESRWKDIRARIFLIASKELELITLTVGFGILIFSLIVTYCINAKADVLFIAPREPGAVSY

SEQ ID NO: 109037 - DNA, 768 bp, Artificial Sequence
  derived and/or modified sequence
atggcaacagcaggtggaggcagcggcgccgaccctgggtccagaggactcttgcgcctcttgagcttctgcgtgctgctggcagggttgtgccgggggaattccgttgagaggaaaatctatattccactgaacaaaaccgctccttgtgtgagactactgaacgccactcaccagatcggatgccagtctagcatcagtggggacaccggtgttatacacgtggtagaaaaagaggaggacttacagtgggtgctaaccgacggcccaaacccaccctacatggtgcttctggaatctaaacattttacccgggacctgatggagaagctcaagggtaggaccagcaggatagcaggattggctgtgtcgcttaccaaaccttcacccgctagcgggttctcgccctctgttcaatgtccaaatgatggatttggggtgtattcaaattcctatgggcccgaatttgcacattgtcgggagatacagtggaactctctaggcaatggtctggcttacgaagatttttcgttccccatctttctgttagaggacgagaatgaaactaaagtgattaagcaggagaccttcgactacattggttccagtcgcatggtgtacgacatggagaaagggaagttcccagtacaactcgaaaatgttgactcgtttgtcgagttgggacaggtggccctgagaacctcgctggaactgtggatgcacactgacccagtgagccagaagaacgagtctgtgagaaaccaatag

SEQ ID NO: 109038 - DNA, 1716 bp, Artificial Sequence
  derived and/or modified sequence
atggcaaccgcagggggcggttctggcgccgaccctggcagccgtggattactgcgcctgctgagcttctgcgtactcctggcgggactttgcagaggcaatagcgtggagcgaaagatctacattcccctgaataagaccgccccatgcgtcagattactgaacgccactcaccagatcgggtgtcagagctccatcagtggagacacaggagtcatccatgtcgtggagaaagaagaagatctgcagtgggttctgacagatgggcccaaccctccttatatggttttgctggagtctaagcatttcacccgcgacctgatggaaaaactgaaggggaggacctcaaggattgcgggtctggccgtgtcgttgacaaagccctcccctgcatccggtttttccccttccgtgcagtgtcccaacgatggtttcggtgtttatagcaacagctacggtcccgaattcgcccactgccgagaaatccagtggaacagcctcgggaacggcctcgcgtatgaggacttctcatttccaatttttctcctggaagacgaaaacgagacaaaggtgatcaagcaggaaacctttgattatatcggatccagtcggatggtgtatgatatggaaaaaggtaaattccctgttcaactcgagaacgtggacagtttcgtggagctgggtcaggttgccctgcgtacatctctagagctttggatgcatactgatcctgtgtcccagaaaaatgagtctgttagaaaccaagtcgaagaccttcttgcaactctggaaaagtctggtgccggggtccccgcggtcatactaagacgccccaaccagagccagccactgcccccttcgtccttacagcgatttctgagggcccgcaatatttcaggtgtggttttggctgaccactcaggagcctttcacaacaagtattatcaatctatctacgacacagcagaaaatatcaacgtcagttacccggagtggctgtcccccgaggaggatctgaacttcgtcactgatactgccaaggctctggccgacgtggcaaccgttctgggaagagcactgtatgaactggcggggggaacaaatttcagtgacaccgtgcaagctgatccccaaaccgttactcgcttactgtatggctttctgatcaaagccaacaatagctggtttcagagcatactgcggcaggatcttcgctcttatctgggagacggacccctgcagcattatattgctgtctcttcccccaccaacacaacttacgtggtacagtacgccttagccaacctcactgggaccgtggtgaatctgacccgggaacaatgtcaagacccttcaaaggtccccagcgagaacaaggatctctatgaatattcctgggtgcaggggccattgcattcaaacgagaccgatcggctcccccgctgtgtgaggagcactgccagattggcccgcgccctctcaccagcattcgagttgtcacaatggagctccacggagtatagcacgtggaccgaaagtagatggaaagatattagggcgaggatcttcttaatagcttccaaggaactggaattaattacacttaccgtcggctttggaattctcatttttagcctcattgttacatactgtatcaatgctaaagccgacgtgctgtttattgcccccagggaacctggcgctgtgtcttactag

SEQ ID NO: 109039 - DNA, 768 bp, Artificial Sequence
  derived and/or modified sequence
atggccacagctgggggcggcagcggggctgaccccggcagccggggcctgctgcggctgctgtccttctgtgtgctgctggccggcctgtgccggggcaacagcgtggagaggaagatctacatccccctgaacaagacagccccctgtgtgcggctgctgaatgccacccaccagatcggctgccagagcagcatcagcggggacaccggggtcatccacgtggtggagaaggaggaggacctgcagtgggtgctgacagatggccccaaccccccctacatggtgctgctggagagcaagcacttcacccgggacctgatggagaagctgaagggccgcaccagcagaattgctggcctggccgtgtccctgaccaagcccagccctgccagcggcttcagccccagcgtgcagtgccccaatgatggctttggagtgtacagcaacagctatggccctgagtttgcccactgccgggagatccagtggaacagcctgggcaatggcctggcctatgaggacttctccttccccatcttcctgctggaggatgaaaatgagaccaaggtgatcaagcaggagacctttgactacatcggcagcagcaggatggtgtatgacatggagaagggcaagtttcctgtgcagctggagaatgtggacagctttgtggagctgggccaggtggccctgcggaccagcctggagctgtggatgcacacagatcctgtgtcccagaagaatgaatctgtgaggaaccagtag

SEQ ID NO: 109040 - DNA, 1716 bp, Artificial Sequence
  derived and/or modified sequence
atggccacagctgggggcggcagcggggctgaccccggcagccggggcctgctgcggctgctgtccttctgtgtgctgctggccggcctgtgccggggcaacagcgtggagaggaagatctacatccccctgaacaagacagccccctgtgtgcggctgctgaatgccacccaccagatcggctgccagagcagcatcagcggggacaccggggtcatccacgtggtggagaaggaggaggacctgcagtgggtgctgacagatggccccaaccccccctacatggtgctgctggagagcaagcacttcacccgggacctgatggagaagctgaagggccgcaccagcagaattgctggcctggccgtgtccctgaccaagcccagccctgccagcggcttcagccccagcgtgcagtgccccaatgatggctttggagtgtacagcaacagctatggccctgagtttgcccactgccgggagatccagtggaacagcctgggcaatggcctggcctatgaggacttctccttccccatcttcctgctggaggatgaaaatgagaccaaggtgatcaagcaggagacctttgactacatcggcagcagcaggatggtgtatgacatggagaagggcaagtttcctgtgcagctggagaatgtggacagctttgtggagctgggccaggtggccctgcggaccagcctggagctgtggatgcacacagatcctgtgtcccagaagaatgaatctgtgaggaaccaggtggaggacctgctggccaccctggagaagagcggggccggcgtgcctgctgtgatcctgcggcggcccaaccagagccagcccctgccccccagcagcctgcagcgcttcctgcgggccaggaacatctctggagtggtgctggccgaccacagcggggccttccacaacaagtactaccagagcatctatgacacagctgagaacatcaacgtgtcctacccagagtggctgagccctgaggaggacctgaactttgtgacagacacagccaaggccctggctgatgtggccaccgtgctgggccgggccctgtatgagctggccggcggcaccaacttcagtgacacagtgcaggccgacccccagacagtgacccggctgctgtatggcttcctgatcaaggccaacaacagctggttccagagcatcctgcggcaggacctgcggagctacctgggagatggccccctgcagcactacatcgctgtgagcagccccaccaacaccacctacgtggtgcagtatgccctggccaacctgactggaacagtggtgaacctgacccgggagcagtgccaggaccccagcaaggtgcccagcgagaacaaggacctgtatgagtacagctgggtgcagggccccctgcacagcaatgaaacagaccggctgccccgctgtgtgcgcagcacagcccggctggcccgggccctgagccctgcctttgagctgagccagtggagcagcacagagtacagcacctggacagagagccgctggaaggacatccgggcccgcatcttcctgattgccagcaaggagctggagctgatcaccctgactgtgggcttcggcatcctgatcttcagcctgattgtgacctactgcatcaatgccaaggcagatgtgctcttcatcgccccccgggagcccggggctgtgtcctactag

SEQ ID NO: 109041 - DNA, 768 bp, Artificial Sequence
  derived and/or modified sequence
atggccaccgccggcggcggcagcggcgccgaccccggcagccggggcctgcttagattgctttccttctgcgttctcctggcggggctgtgccggggaaattcagtggagagaaagatttacatccccctgaataagaccgctccctgtgtcaggctgttaaacgctacacatcagattggctgccaatctagcattagtggtgacacaggagtcattcacgtggtagagaaggaagaggacttgcagtgggtgctgaccgacgggcccaatcccccttacatggtgctgcttgaatcgaagcacttcaccagggacctcatggagaagctgaaagggcggacgagcagaatcgctggccttgcagtgtcactgactaaaccatcaccagcctcaggcttttctccctctgtgcagtgtcccaatgacggatttggtgtttactcaaatagctacggtccagagtttgcccactgccgggaaatccagtggaactcgttaggaaatgggctggcatacgaagactttagcttccctatattccttctggaggatgaaaacgagactaaggtcatcaagcaggaaacatttgactatatcgggagctcaaggatggtatacgatatggaaaaggggaagttccctgttcagctggaaaatgtcgatagctttgttgaattagggcaggtagctctgcggacctcactagagctgtggatgcacactgaccctgtcagtcagaagaacgagtccgtccggaatcagtag

SEQ ID NO: 109042 - DNA, 1716 bp, Artificial Sequence
  derived and/or modified sequence
atggccaccgccggcggcggcagcggcgccgaccccggcagccggggacttctgaggctgctgagtttctgcgtgcttctggctggattgtgcaggggaaacagcgtggaaaggaagatctacattccactcaacaagaccgcgccttgcgtgcgtcttttgaacgcaactcatcagatcggctgccagtcttctatttctggtgacactggtgtgattcacgttgttgagaaagaagaggacctacagtgggtactgaccgacggccctaacccaccttacatggtactacttgagagcaagcacttcacccgagatcttatggaaaagctgaaagggcgcaccagtaggatcgctgggctcgccgtctccttgaccaagccgtcgcctgcttctggctttagcccctccgtgcagtgccctaatgatggtttcggcgtgtatagcaatagctatgggccagaattcgcccactgtcgagagatccagtggaattctctcgggaatgggttggcttatgaggacttcagcttccccatcttcttgctcgaagacgagaacgaaacaaaggttattaagcaggaaactttcgattacataggcagcagcagaatggtctacgacatggagaagggtaaatttcctgtgcagctcgagaacgtcgactctttcgtcgagctcggccaagtggctctgcgcactagccttgaactgtggatgcacaccgacccagttagccagaaaaacgagtctgtgaggaaccaggtagaagatcttctggccacactggagaagagcggcgcgggggtgcccgccgtcattctgcgccgccctaaccagtctcagcccctgccaccttcttccctgcagcgcttccttagagccaggaatatctccggcgtcgtcctggcggatcactctggagcattccacaataagtattatcaaagcatttatgatacagctgaaaacattaatgtgtcataccccgagtggctcagtccagaggaggacctgaacttcgtaaccgataccgccaaggccttagcagacgtcgccacggtattaggtcgggctttgtacgaattggcaggaggaacgaactttagcgacaccgtgcaggcagatccccagacagtaacacgactgctgtatggctttctcatcaaagctaacaatagctggtttcaatccatacttcggcaggacctgagaagttatctgggcgatggccccctacagcattacattgcggtgtcctcacccacaaatacgacctatgttgtgcagtacgccctcgctaatcttactgggaccgtcgtaaatctaacaagggagcagtgtcaagatccgtccaaggtacccagtgagaacaaagacttgtatgaatacagctgggtgcagggacctctgcacagtaacgaaacagaccgtttaccccgctgcgtaaggtctaccgctcgacttgcgcgggccctgagtcccgcgtttgagctgtcccaatggtctagcacggaatattccacctggaccgagagcagatggaaagacatcagggctagaatctttttaattgcgagcaaagagctcgaattaattacattgacagtgggattcggaattttgattttcagtttaatcgttacgtattgtataaatgccaaagcggatgttctattcatcgccccccgggagccgggagccgtctcctactag

SEQ ID NO: 109043 - DNA, 776 bp, Artificial Sequence
  derived and/or modified sequence
agagaggcaagatggctacggcagggggtggctctggggctgacccgggaagtcggggtctccttcgccttctgtctttctgcgtcctactagcaggtttgtgcaggggaaactcagtggagaggaagatatatatccccttaaataaaacagctccctgtgttcgcctgctcaacgccactcatcagattggctgccagtcttcaattagtggagacacaggggttatccacgtagtagagaaagaggaggacctacagtgggtattgactgatggccccaaccccccttacatggttctgctggagagcaagcattttaccagggatttaatggagaagctgaaagggagaaccagccgaattgctggtcttgcagtgtccttgaccaagcccagtcctgcctcaggcttctctcctagtgtacagtgcccaaatgatgggtttggtgtttactccaattcctatgggccagagtttgctcactgcagagaaatacagtggaattcgctgggcaatggtttggcttatgaagactttagtttccccatctttcttcttgaagatgaaaatgaaaccaaagtcatcaagcaggaaacttttgactacattggcagctcgaggatggtctacgatatggagaagggcaagtttcccgtgcagttagagaatgttgactcatttgtggagctgggacaggtggccttaagaacttcattagagctttggatgcacacagatcctgtttctcagaaaaatgagtctgtacggaaccag

SEQ ID NO: 109044 - DNA, 1979 bp, Artificial Sequence
  derived and/or modified sequence
agagaggcaagatggctacggcagggggtggctctggggctgacccgggaagtcggggtctccttcgccttctgtctttctgcgtcctactagcaggtttgtgcaggggaaactcagtggagaggaagatatatatccccttaaataaaacagctccctgtgttcgcctgctcaacgccactcatcagattggctgccagtcttcaattagtggagacacaggggttatccacgtagtagagaaagaggaggacctacagtgggtattgactgatggccccaaccccccttacatggttctgctggagagcaagcattttaccagggatttaatggagaagctgaaagggagaaccagccgaattgctggtcttgcagtgtccttgaccaagcccagtcctgcctcaggcttctctcctagtgtacagtgcccaaatgatgggtttggtgtttactccaattcctatgggccagagtttgctcactgcagagaaatacagtggaattcgctgggcaatggtttggcttatgaagactttagtttccccatctttcttcttgaagatgaaaatgaaaccaaagtcatcaagcaggaaacttttgactacattggcagctcgaggatggtctacgatatggagaagggcaagtttcccgtgcagttagagaatgttgactcatttgtggagctgggacaggtggccttaagaacttcattagagctttggatgcacacagatcctgtttctcagaaaaatgagtctgtacggaaccaggtggaggatctcctggccacattggagaagagtggtgctggtgtccctgctgtcatcctcaggaggccaaatcagtcccagcctctcccaccatcttccctgcagcgatttcttcgagctcgaaacatctctggcgttgttctggctgaccactctggtgccttccataacaaatattaccagagtatttacgacactgctgagaacattaatgtgagctatcccgaatggctgagccctgaagaggacctgaactttgtaacagacactgccaaggccctggcagatgtggccacggtgctgggacgtgctctgtatgagcttgcaggaggaaccaacttcagcgacacagttcaggctgatccccaaacggttacccgcctgctctatgggttcctgattaaagccaacaactcatggttccagtctatcctcaggcaggacctaaggtcctacttgggtgacgggcctcttcaacattacatcgctgtctccagccccaccaacaccacttatgttgtacagtatgccttggcaaatttgactggcacagtggtcaacctcacccgagagcagtgccaggatccaagtaaagtcccaagtgaaaacaaggatctgtatgagtactcatgggtccagggccctttgcattctaatgagacggaccgactcccccggtgtgtgcgttctactgcacgattagccagggccttgtctcctgcctttgaactgagtcagtggagctctactgaatactctacatggactgagagccgctggaaagatatccgtgcccggatatttctcatcgccagcaaagagcttgagttgatcaccctgacagtgggcttcggcatcctcatcttctccctcatcgtcacctactgcatcaatgccaaagctgatgtccttttcattgctccccgggagccaggagctgtgtcatactgaggaggaccccagcttttcttgccagctcagcagttcacttcctagagcatctgtcccactgggacacaaccactaatttgtcactggaacctccctgggcctgtctcagattgggattaacataaaagagtggaactatccaaaagagacagggagaaataaataaattgcctcccttcctccgctcccctttcccatcaccccttccccatttcctcttccttctctactcatgccagattttgggattac

SEQ ID NO: 109045 - DNA, 768 bp, Artificial Sequence
  derived and/or modified sequence
atggccactgccggaggcggatccggcgctgatcctggctcacgtgggctgctgcgactgctgtctttctgcgtcctcttggctggcctctgccggggtaattccgtggaaagaaagatttacattccactaaacaaaaccgcaccatgtgtcagactgttgaacgccacacaccagattggatgtcagtccagcatatctggagacacaggagtcatccacgtggtcgagaaagaggaagaccttcagtgggttctcaccgatggccctaacccaccttacatggtactcctcgaatccaagcatttcacccgcgacctgatggagaagttaaaggggagaacttctagaattgcaggcctggcagtcagcctgaccaagcccagccccgcaagcggtttttctccctccgtgcagtgccccaacgacgggttcggtgtttatagcaattcatacggccctgagttcgcgcactgccgggagattcagtggaactctttaggtaacggcctggcttacgaagacttttcttttcccatctttctgctggaagacgagaatgaaaccaaggtaattaagcaggagacttttgactatatcggcagtagtagaatggtctacgacatggaaaaggggaaattccccgtacaactggagaatgtcgatagtttcgtggagctaggccaagttgctctgcgtacctccctggaattatggatgcacacagaccccgtgtctcagaagaatgaatctgttaggaaccagtag

SEQ ID NO: 109046 - DNA, 1716 bp, Artificial Sequence
  derived and/or modified sequence
atggccaccgcaggcggaggatcgggtgccgaccccggtagccgagggctgctcagattgttgtctttctgtgtgctccttgccggtctatgccgtggcaactccgtcgaacgaaagatctacatcccgctcaataaaactgccccttgcgtgcgcctgcttaatgcaacacaccaaatcggctgccagagttcaatctccggggacacaggggtcatccacgttgtggagaaggaagaagatctgcagtgggttctcacggacggcccaaatccaccttacatggtcctgcttgaatctaaacattttaccagagacctgatggagaagttaaagggccgtacctccagaatcgcgggtctggcggtcagccttaccaagccatcccctgccagcggcttttcgccttctgttcaatgccccaacgatgggttcggagtgtattctaattcctacggcccagaatttgcccattgcagagagattcagtggaatagcctgggaaatggtcttgcctacgaggacttctcctttcctatttttcttctggaggacgaaaatgagactaaagtgattaaacaggagacgttcgattacattggctcatccagaatggtctacgatatggagaaaggcaagttccccgtgcagctggagaatgttgatagtttcgttgagcttggacaagtcgccctcagaacgagccttgaactgtggatgcatactgatccagttagtcagaagaacgagtccgtccgaaatcaggtggaggaccttctggcgacgctggagaaatcaggggcaggtgtgcctgcagtgattctcagaaggccaaaccagtctcagcccctgcctccctcatctctgcagcggtttttgagagcccgtaacatcagcggtgtggtgctcgccgatcattccggggcattccacaacaagtattaccagtccatctacgatactgcagagaatatcaacgtctcttacccggagtggttaagtcctgaagaggacttgaacttcgttactgacactgcaaaagctcttgcagatgtcgccaccgtgctgggacgcgctttgtatgaattagctgggggaacaaacttctctgatacagttcaggccgacccacagacagtgacacggttgctctacgggttcctgattaaagcaaacaattcctggttccagtctatcctgcgccaagatctacggtcgtacttgggggacgggccactgcagcactacatcgccgttagtagtcctactaatactacttacgtagtccaatacgccctcgctaacctcactggcactgtggtgaacctcacccgggaacagtgccaagatccaagtaaggttccgagtgagaacaaagatctttacgaatactcctgggtgcagggacctctgcattctaatgagaccgatcgcctcccacgatgtgtgaggtcaacagcaagactggctcgggctttgtcgccagctttcgagctttcgcagtggagctctactgaatacagcacttggacagagagccgatggaaggacattagagcccgtatctttctgatcgcgagtaaagaactcgagcttattacacttacagtcggctttggcattttgatttttagcctgattgtcacctactgtatcaatgccaaggcagatgtcctcttcattgcacccagggaacctggcgctgtatcttactag

SEQ ID NO: 109047 - DNA, 768 bp, Artificial Sequence
  derived and/or modified sequence
atggccaccgccggcggcggcagcggcgccgaccccggcagcagaggcctgctgagactgctgagcttctgcgtgctgctggccggcctgtgcagaggcaacagcgtggagagaaagatctacatccccctgaacaagaccgccccctgcgtgagactgctgaacgccacccaccagatcggctgccagagcagcatcagcggcgacaccggcgtgatccacgtggtggagaaggaggaggacctgcagtgggtgctgaccgacggccccaaccccccctacatggtgctgctggagagcaagcacttcaccagagacctgatggagaagctgaagggcagaaccagcagaatcgccggcctggccgtgagcctgaccaagcccagccccgccagcggcttcagccccagcgtgcagtgccccaacgacggcttcggcgtgtacagcaacagctacggccccgagttcgcccactgcagagagatccagtggaacagcctgggcaacggcctggcctacgaggacttcagcttccccatcttcctgctggaggacgagaacgagaccaaggtgatcaagcaggagaccttcgactacatcggcagcagcagaatggtgtacgacatggagaagggcaagttccccgtgcagctggagaacgtggacagcttcgtggagctgggccaggtggccctgagaaccagcctggagctgtggatgcacaccgaccccgtgagccagaagaacgagagcgtgagaaaccagtag

SEQ ID NO: 109048 - DNA, 1716 bp, Artificial Sequence
  derived and/or modified sequence
atggccaccgccggcggcggcagcggcgccgaccccggcagcagaggcctgctgagactgctgagcttctgcgtgctgctggccggcctgtgcagaggcaacagcgtggagagaaagatctacatccccctgaacaagaccgccccctgcgtgagactgctgaacgccacccaccagatcggctgccagagcagcatcagcggcgacaccggcgtgatccacgtggtggagaaggaggaggacctgcagtgggtgctgaccgacggccccaaccccccctacatggtgctgctggagagcaagcacttcaccagagacctgatggagaagctgaagggcagaaccagcagaatcgccggcctggccgtgagcctgaccaagcccagccccgccagcggcttcagccccagcgtgcagtgccccaacgacggcttcggcgtgtacagcaacagctacggccccgagttcgcccactgcagagagatccagtggaacagcctgggcaacggcctggcctacgaggacttcagcttccccatcttcctgctggaggacgagaacgagaccaaggtgatcaagcaggagaccttcgactacatcggcagcagcagaatggtgtacgacatggagaagggcaagttccccgtgcagctggagaacgtggacagcttcgtggagctgggccaggtggccctgagaaccagcctggagctgtggatgcacaccgaccccgtgagccagaagaacgagagcgtgagaaaccaggtggaggacctgctggccaccctggagaagagcggcgccggcgtgcccgccgtgatcctgagaagacccaaccagagccagcccctgccccccagcagcctgcagagattcctgagagccagaaacatcagcggcgtggtgctggccgaccacagcggcgccttccacaacaagtactaccagagcatctacgacaccgccgagaacatcaacgtgagctaccccgagtggctgagccccgaggaggacctgaacttcgtgaccgacaccgccaaggccctggccgacgtggccaccgtgctgggcagagccctgtacgagctggccggcggcaccaacttcagcgacaccgtgcaggccgacccccagaccgtgaccagactgctgtacggcttcctgatcaaggccaacaacagctggttccagagcatcctgagacaggacctgagaagctacctgggcgacggccccctgcagcactacatcgccgtgagcagccccaccaacaccacctacgtggtgcagtacgccctggccaacctgaccggcaccgtggtgaacctgaccagagagcagtgccaggaccccagcaaggtgcccagcgagaacaaggacctgtacgagtacagctgggtgcagggccccctgcacagcaacgagaccgacagactgcccagatgcgtgagaagcaccgccagactggccagagccctgagccccgccttcgagctgagccagtggagcagcaccgagtacagcacctggaccgagagcagatggaaggacatcagagccagaatcttcctgatcgccagcaaggagctggagctgatcaccctgaccgtgggcttcggcatcctgatcttcagcctgatcgtgacctactgcatcaacgccaaggccgacgtgctgttcatcgcccccagagagcccggcgccgtgagctactag

SEQ ID NO: 109049 - protein, 322 aa, Artificial Sequence
  derived and/or modified sequence
MPVTVTRTTITTTTTSSSGLGSPMIVGSPRALTQPLGLLRLLQLVSTCVAFSLVASVGAWTGSMGNWSMFTWCFCFSVTLIILIVELCGLQARFPLSWRNFPITFACYAALFCLSASIIYPTTYVQFLSHGRSRDHAIAATFFSCIACVAYATEVAWTRARPGEITGYMATVPGLLKVLETFVACIIFAFISDPNLYQHQPALEWCVAVYAICFILAAIAILLNLGECTNVLPIPFPSFLSGLALLSVLLYATALVLWPLYQFDEKYGGQPRRSRDVSCSRSHAYYVCAWDRRLAVAILTAINLLAYVADLVHSAHLVFVKV

SEQ ID NO: 109050 - protein, 147 aa, Artificial Sequence
  derived and/or modified sequence
MPVTVTRTTITTTTTSSSGLGSPMIVGSPRALTQPLGLLRLLQLVSTCVAFSLVASVGAWTGSMGNWSMFTWCFCFSVTLIILIVELCGLQARFPLSWRNFPITFACYAALFCLSASIIYPTTYVQFLSHGRSRDHAIAATFFSCIA

SEQ ID NO: 109051 - protein, 285 aa, Artificial Sequence
  derived and/or modified sequence
MPVTVTRTTITTTTTSSSGLGSPMIVGSPRALTQPLGLLRLLQLVSTCVAFSLVASVGAWTGSMGNWSMFTWCFCFSVTLIILIVELCGLQARFPLSWRNFPITFFSCIACVAYATEVAWTRARPGEITGYMATVPGLLKVLETFVACIIFAFISDPNLYQHQPALEWCVAVYAICFILAAIAILLNLGECTNVLPIPFPSFLSGLALLSVLLYATALVLWPLYQFDEKYGGQPRRSRDVSCSRSHAYYVCAWDRRLAVAILTAINLLAYVADLVHSAHLVFVKV

SEQ ID NO: 109052 - protein, 242 aa, Artificial Sequence
  derived and/or modified sequence
MPVTVTRTTITTTTTSSSGLGSPMIVGSPRALTQPLGLLRLLQLVSTCVAFSLVASVGAWTGSMGNWSMFTWCFCFSVTLIILIVELCGLQARFPLSWRNFPITFACYAALFCLSASIIYPTTYVQFLSHGRSRDHAIAATFFSCIACVAYATEVAWTRARPGEITGYMATVPGLLKVLETFVACIIFAFISDPNLYQHQPALEWCVAVYAICFILAAIAILLNLGECTNVLPIPFPSFLSG

SEQ ID NO: 109053 - protein, 259 aa, Artificial Sequence
  derived and/or modified sequence
MPVTVTRTTITTTTTSSSGLGSPMIVGSPRALTQPLGLLRLLQLVSTCVAFSLVASVGAWTGSMGNWSMFTWCFCFSVTLIILIVELCGLQARFPLSWRNFPITFACYAALFCLSASIIYPTTYVQFLSHGRSRDHAIAATFFSCIACVAYATEVAWTRARPGEITGYMATVPGLLKVLETFVACIIFAFISDPNLYQHQPALEWCVAVYAICFILAAIAILLNLGECTNVLPIPFPSFLSGLALLSVLLYATALVLWP

SEQ ID NO: 109054 - protein, 188 aa, Artificial Sequence
  derived and/or modified sequence
MPVTVTRTTITTTTTSSSGLGSPMIVGSPRALTQPLGLLRLLQLVSTCVAFSLVASVGAWTGSMGNWSMFTWCFCFSVTLIILIVELCGLQARFPLSWRNFPITFACYAALFCLSASIIYPTTYVQFLSHGRSRDHAIAATFFSCIACVAYATEVAWTRARPGEITGYMATVPGLLKVLETFVACIIF

SEQ ID NO: 109055 - DNA, 969 bp, Artificial Sequence
  derived and/or modified sequence
atgccagtgactgtcactcggacaaccatcacgactaccaccacctcatcctccggccttggctctccaatgatcgttggctccccaagggcactgactcagccactgggcctattgaggctgctgcaactcgtctccacctgcgtcgccttctcattggtcgcgagtgtcggcgcctggacaggctccatgggaaactggagcatgttcacctggtgtttctgcttctccgtgacactgatcattctgattgtcgagctttgcggactccaggcccggttcccccttagttggagaaatttccccattactttcgcatgctatgcagccctgttctgcttatccgcctcaatcatttatcctacaacctacgttcaatttctgtctcacggacgctccagagatcatgccattgctgctacatttttctcctgtatcgcgtgcgttgcttatgcaaccgaagtagcctggacccgagcccgccccggcgaaattacgggctacatggccacagtccccggtctgctcaaggtcctggagacttttgtggcttgcataattttcgcctttatcagcgatcctaacctctatcagcaccagcccgctctggagtggtgtgttgccgtctacgctatatgttttatactggcagccatagctattctgttgaacctcggcgaatgcactaatgttctgcccattcccttcccgagctttctcagcggtctggcccttctgtcagtcctcttgtatgcaacagctctcgttctgtggccactgtatcagttcgatgaaaagtacggcgggcagccccgccggtcccgtgatgtgtcgtgtagccgatctcacgcttattacgtttgtgcttgggataggcggttggcagtggctatcctcacagcgataaatttgctggcctatgttgctgatctggtgcatagcgcccatcttgtgttcgttaaggtatag

SEQ ID NO: 109056 - DNA, 969 bp, Artificial Sequence
  derived and/or modified sequence
atgccggtaactgttacccgaacaaccataaccaccaccaccacctcttcctctggactaggtagtcccatgatcgtgggtagcccccgcgctctgacccaacctctgggattgctgagattactacagttagtctctacttgtgtcgctttctcacttgtagcgagcgtaggagcttggactggcagcatgggtaactggtccatgttcacttggtgtttttgtttctctgtgaccctgattatcctgatagtcgagctatgcgggctgcaggcccgatttccgttgtcctggcggaattttcctatcactttcgcttgctatgccgcacttttctgtctcagcgcatcaattatttaccctacaacctacgtgcagttcctgagtcatgggagaagtagagatcacgccatcgccgcaacttttttttcctgcatagcctgtgtcgcttacgctaccgaagtggcctggacccgcgcccgcccgggtgaaataaccgggtacatggccaccgttccggggctccttaaggttctggagaccttcgtggcttgcattatatttgctttcatctcagatcctaatctgtaccagcatcagcctgccttggaatggtgtgtggccgtttatgcaatctgcttcatcctagctgcaatcgctatcctcctcaacctaggggagtgcactaacgttctgccgatcccctttccttctttcctgagcggtctggctttgctatctgtgctcctgtacgcaaccgctctcgttttatggccactctaccagttcgacgaaaagtatggagggcagcccaggcgaagccgcgacgtgagctgctcaaggtcccacgcatactacgtgtgtgcatgggatcgacgcttggcggtcgcaattctgaccgcaatcaatctgcttgcttatgtagctgatttggtgcactctgctcatctcgtcttcgtgaaggtgtag

SEQ ID NO: 109057 - DNA, 969 bp, Artificial Sequence
  derived and/or modified sequence
atgcctgtaaccgttacaagaacaactataactacaaccacaaccagttcgagcggacttgggtccccgatgattgtgggcagcccgagagctctcacacagcccctggggcttctgaggctgctacagctggtgtctacctgtgtagctttttctctggtcgcaagtgtcggcgcctggaccgggagcatgggtaattggagcatgttcacgtggtgtttctgctttagcgttaccttgattatactgatcgttgagctttgcggactacaggcgcgctttccgttatcatggcgcaattttccaattaccttcgcctgttacgccgcccttttctgcttatcagcctccattatctaccccacaacttacgtgcagtttttaagccacggccggtccagagatcatgccattgctgcgacttttttttcctgcattgcatgtgtcgcttacgcgaccgaggtggcttggacaagagcgagacccggtgaaatcaccggctacatggctacggttccgggccttttgaaagtcctggagacctttgttgcctgtataatctttgcatttatttccgatcccaacctctaccagcatcagccagcacttgagtggtgtgtggctgtgtatgccatttgtttcattcttgccgcgatagcgattctactgaacctaggcgagtgcactaacgtccttccaattccattccccagttttttgagtggcttggcgctgctctccgtgcttctttatgcaaccgcactcgttttgtggcctttgtatcagttcgacgagaagtatggggggcagccgcgccgaagcagggatgtgagctgcagccgctcccacgcgtattatgtgtgcgcatgggaccgcaggcttgccgtagctattcttaccgccattaacctcctggcctacgtggcagacctggtgcactccgcccatctggtgtttgtgaaagtttag

SEQ ID NO: 109058 - DNA, 969 bp, Artificial Sequence
  derived and/or modified sequence
atgcccgtcactgttacccgcacaacaatcaccaccacgaccacgtcctcaagtgggctcggctctcctatgatcgtgggttcacctagagccctcacccagccacttggcctcctgagactgttacagttagttagcacctgcgtggccttctctctcgttgcaagcgtcggcgcgtggacagggtctatgggtaattggtccatgtttacttggtgcttttgtttcagcgtcactctcattatcctaattgttgaattgtgcggcttgcaagcgcgatttcccctcagctggagaaactttccgattaccttcgcttgttacgccgctctattttgtctctcagcatccatcatttacccgacaacttatgtgcagttcctctcccatggaagaagcagagatcacgccatcgcggccactttcttctcgtgtatagcctgtgttgcctacgccactgaagtcgcctggactcgggcacgccctggtgagatcacaggctacatggctaccgtacccggactcctgaaagtcctggagacctttgttgcgtgcattatctttgccttcatcagcgatcctaatctgtaccaacaccaaccagccctggagtggtgcgtggccgtgtacgcaatctgctttatactagccgccattgctattctcttgaatctaggggaatgcacaaacgtgctccccataccctttccttcatttctctcaggtctggctctactctctgtgctgctgtatgcaacagcactggtgctgtggcccctgtaccagttcgacgagaaatacggaggccagccacgccgttcaagagacgtgtcctgcagtaggagtcacgcttactacgtttgcgcgtgggaccgcaggctcgccgtggccattctcacagctattaacctcctcgcatacgtggccgatcttgtacactccgcccaccttgtctttgtgaaggtgtag

SEQ ID NO: 109059 - DNA, 969 bp, Artificial Sequence
  derived and/or modified sequence
atgcctgtaacggtgactagaacgactattacgaccacaacaacatcaagctctggacttggatctccgatgatcgtaggttccccacgcgccctcacacagcccttgggcctgttgagactactgcaacttgtgtcaacgtgcgtcgcattctcactggttgcgtccgtcggagcctggacgggatccatgggaaattggtccatgttcacctggtgcttttgcttctcggttaccctgatcattcttatcgttgagttgtgtggactgcaggccagattccccctgtcttggagaaattttccgatcacattcgcttgctacgcagctcttttttgtctatctgctagcattatatatcccaccacttacgtgcagtttcttagccatggaagatcacgtgatcacgcaatagccgccaccttcttttcctgtatcgcatgtgttgcttatgcaacggaggtagcgtggacccgtgcaaggccaggtgaaatcactggatatatggccacagtgcctggtctcttaaaagtgcttgaaactttcgtggcatgtattattttcgcatttatatcggaccccaatctttatcagcaccagcctgccctcgaatggtgcgtcgccgtgtatgctatatgcttcatcttggccgccatcgccatccttctgaatctgggagagtgtacaaacgttcttccgatcccctttccatcattccttagcgggctggctctgctatccgttctgctgtatgcaactgcgctagtcctctggcctctctaccagtttgacgagaaatacggcggtcagcccaggagatctcgagacgtcagctgcagtcggtcgcacgcgtattatgtatgtgcctgggatcgacgtctggctgtggcgatactgacagcgattaacctacttgcgtacgtcgccgatttggtgcacagcgcccacctggtttttgtgaaggtatag

SEQ ID NO: 109060 - DNA, 444 bp, Artificial Sequence
  derived and/or modified sequence
atgcccgtcactgtcacccgtacaaccataacgaccaccacaacttcttcctccggcttggggtcacccatgattgtcgggtccccccgcgcactgacccagcccctcggtctcctccggcttctgcaattagtgtctacgtgcgtggcattttctctggtcgcttctgtaggtgcttggactggctcgatgggcaattggagcatgttcacttggtgtttttgtttctcagttactcttatcatcctgatcgtagaattatgcggcctgcaggcaaggtttcctctgagttggcggaactttcctataacgtttgcatgttacgcagcactgttctgcttatcagcatctatcatctacccaacaacctacgtgcaatttctctcccacggtcggtccagagaccacgcaatagctgcaacatttttctcctgtatcgcctag

SEQ ID NO: 109061 - DNA, 858 bp, Artificial Sequence
  derived and/or modified sequence
atgccagtaaccgttactagaactacgatcacaaccactactacttcttcctccggtctgggaagccccatgatcgtggggtcacccagggcactgacacagcccttaggacttctgcgacttctgcagttagtcagcacatgtgtagcattctctctggtcgcttctgtgggcgcctggaccggatctatggggaattggagcatgttcacctggtgcttctgttttagcgttaccctgattatcctgattgttgaactctgtgggcttcaggcaaggtttcctctttcttggaggaattttcctattaccttcttctcatgtatcgcctgtgttgcctacgcgaccgaggtcgcatggacgagggcccggccaggagagataactggatacatggccacagttcctgggcttctgaaggtcctggagacttttgttgcttgcattattttcgcattcatcagcgatccaaatctctatcaacaccaaccagccctggaatggtgcgtagccgtctacgcaatctgtttcattctggctgcgatagccatcctgctcaacctgggagagtgcaccaatgtgcttcctatcccgtttccgtctttcttatcaggcctcgcactactttccgtactgttgtatgccactgcactggtgttatggccactataccagtttgacgaaaagtacggaggtcagccgaggagaagccgggacgtgtcatgctctagatctcatgcctactacgtgtgcgcctgggacagaagactggccgtggccatcctgacagctattaatctgttggcttatgtggcagacctcgtgcattctgcgcacttagttttcgtcaaggtgtag

SEQ ID NO: 109062 - DNA, 729 bp, Artificial Sequence
  derived and/or modified sequence
atgcccgttaccgtgacacgcaccacaatcactactacaactacgtcgtcctctggcctgggctccccaatgattgtagggtcccctcgggctctaacacagccactgggccttctccggctattgcagctggtttcgacctgtgtggcctttagcctcgtggcatcagtcggcgcctggacaggatctatgggaaattggtcaatgtttacctggtgtttctgttttagcgtgacactcattattctcattgtggaactgtgtggcctgcaggcccgattccctttgtcatggcggaattttcctatcactttcgcatgctatgccgctcttttttgtctgtccgcaagcataatctatcccaccacttacgtgcagtttttgtcacacggccgctctcgggaccacgccatcgccgcaacctttttttcatgtatcgcctgtgtcgcatacgccactgaggtggcctggacccgagccagacctggcgaaatcactggttacatggcaacagttcctggtctgctcaaagttttagaaaccttcgtggcctgcatcatttttgcattcatctccgatccaaacctttatcagcatcagcctgccctggagtggtgtgtggctgtatacgccatctgctttatcctcgctgccatcgccattctgctcaatcttggagagtgtacaaatgtcctgcctattcctttcccctctttcctaagtgggtag

SEQ ID NO: 109063 - DNA, 780 bp, Artificial Sequence
  derived and/or modified sequence
atgccggtcactgttacacgcacgactattacaacaacaactacctctagcagtggcctggggagtccaatgatcgttggaagcccacgagctctgacgcagccgctcggcctcctgagactgctgcagctcgtgtctacatgtgtagcatttagcttagtggcctcagtcggtgcctggacggggtccatgggaaactggtctatgtttacatggtgcttctgcttttcggtaacacttattatcctgatagtggagctgtgtggccttcaggccagattccccctctcttggaggaacttcccaatcaccttcgcctgctacgctgccctcttctgccttagcgcctccataatttaccccacgacgtacgtccagtttctctcacacggaaggagtcgggatcatgcaattgccgccaccttcttctcatgtattgcgtgtgtggcgtatgccacagaggtcgcctggacccgcgccagacccggggagattacaggatacatggcaacggtaccaggactcttgaaagtgctggagaccttcgtggcctgcattatatttgcttttatttctgacccaaacttatatcaacatcagcctgctttggagtggtgcgttgccgtttatgctatttgcttcattctggctgcaatcgccatcttactcaatctgggggaatgtacaaatgttcttccaatcccgttcccaagctttctgtcgggcttagctctcttgagtgtcttactgtacgctacagctttagtgctgtggccctag

SEQ ID NO: 109064 - DNA, 567 bp, Artificial Sequence
  derived and/or modified sequence
atgcccgtgactgttacaagaacaaccatcacgactacaacaacctcctcaagtgggctaggatcccctatgatcgtaggatctccgcgggccctcacacagcctctgggtctgcttcggcttctgcaactggttagtacttgtgtggccttcagtctggttgcctctgttggtgcctggactgggagcatgggaaactggagtatgtttacctggtgcttctgtttctctgtcacactgatcatcctgattgtggagctgtgcgggcttcaggcacgattccctctgagctggagaaactttcccatcacattcgcctgctatgccgcactcttctgcctgtcagcctctatcatttatcccacaacctacgtacaatttctctcccacggaagaagccgggaccacgctattgctgccaccttcttcagctgtatcgcatgcgtggcgtatgccacagaggtggcctggactcgtgctaggcccggagagatcacaggatacatggctactgttccggggctccttaaagtgctcgagactttcgtagcatgcattatcttctag

SEQ ID NO: 109065 - DNA, 969 bp, Artificial Sequence
  derived and/or modified sequence
atgcctgtgacagtgaccaggaccaccatcaccaccaccaccaccagcagcagcggcctgggcagccccatgattgtgggcagcccccgggccctgacccagcccctgggcctgctgcggctgctgcagctggtgtccacctgtgtggccttcagcctggtggcctctgtgggcgcctggacaggctccatgggcaactggagcatgttcacctggtgcttctgcttctctgtgaccctcatcatcctgattgtggagctgtgtggcctgcaggcccgcttccccctgtcctggaggaacttccccatcacctttgcctgctatgctgccctcttctgcctgagcgccagcatcatctaccccaccacctacgtgcagttcctgagccacggccgcagccgggaccacgccatcgccgccaccttcttcagctgcatcgcctgtgtggcctatgccacagaggtggcctggacccgggcccggcctggagagatcaccggctacatggccaccgtgcccggcctgctgaaggtgctggagacctttgtggcctgcatcatctttgccttcatcagtgaccccaacctgtaccagcaccagcctgccctggagtggtgtgtggccgtgtatgccatctgcttcatcctggccgccatcgccatcctgctgaacctgggagaatgtaccaacgtgctgcccatccccttccccagcttcctgagcggcctggccctgctgtctgtgctgctgtatgccacagccctggtgctgtggcccctgtaccagtttgatgagaagtatggaggccagccccggcgcagcagagatgtgtcctgcagccgcagccacgcctactacgtgtgtgcctgggaccggcggctggccgtggccatcctgacagccatcaacctgctggcctacgtggccgacctggtgcacagcgcccacctggtgtttgtgaaggtgtag

SEQ ID NO: 109066 - DNA, 444 bp, Artificial Sequence
  derived and/or modified sequence
atgcctgtgacagtgaccaggaccaccatcaccaccaccaccaccagcagcagcggcctgggcagccccatgattgtgggcagcccccgggccctgacccagcccctgggcctgctgcggctgctgcagctggtgtccacctgtgtggccttcagcctggtggcctctgtgggcgcctggacaggctccatgggcaactggagcatgttcacctggtgcttctgcttctctgtgaccctcatcatcctgattgtggagctgtgtggcctgcaggcccgcttccccctgtcctggaggaacttccccatcacctttgcctgctatgctgccctcttctgcctgagcgccagcatcatctaccccaccacctacgtgcagttcctgagccacggccgcagccgggaccacgccatcgccgccaccttcttcagctgcatcgcctag

SEQ ID NO: 109067 - DNA, 858 bp, Artificial Sequence
  derived and/or modified sequence
atgcctgtgacagtgaccaggaccaccatcaccaccaccaccaccagcagcagcggcctgggcagccccatgattgtgggcagcccccgggccctgacccagcccctgggcctgctgcggctgctgcagctggtgtccacctgtgtggccttcagcctggtggcctctgtgggcgcctggacaggctccatgggcaactggagcatgttcacctggtgcttctgcttctctgtgaccctcatcatcctgattgtggagctgtgtggcctgcaggcccgcttccccctgtcctggaggaacttccccatcaccttcttcagctgcatcgcctgtgtggcctatgccacagaggtggcctggacccgggcccggcctggagagatcaccggctacatggccaccgtgcccggcctgctgaaggtgctggagacctttgtggcctgcatcatctttgccttcatcagtgaccccaacctgtaccagcaccagcctgccctggagtggtgtgtggccgtgtatgccatctgcttcatcctggccgccatcgccatcctgctgaacctgggggagtgcaccaacgtgctgcccatccccttccccagcttcctgagcggcctggccctgctgtctgtgctgctgtatgccacagccctggtgctgtggcccctgtaccagtttgatgagaagtatggaggccagcccaggaggagcagagatgtgtcctgcagccgcagccacgcctactacgtgtgtgcctgggaccggcggctggccgtggccatcctgacagccatcaacctgctggcctacgtggccgacctggtgcacagcgcccacctggtgtttgtgaaggtgtag

SEQ ID NO: 109068 - DNA, 729 bp, Artificial Sequence
  derived and/or modified sequence
atgcctgtgacagtgaccaggaccaccatcaccaccaccaccaccagcagcagcggcctgggcagccccatgattgtgggcagcccccgggccctgacccagcccctgggcctgctgcggctgctgcagctggtgtccacctgtgtggccttcagcctggtggcctctgtgggcgcctggacaggctccatgggcaactggagcatgttcacctggtgcttctgcttctctgtgaccctcatcatcctgattgtggagctgtgtggcctgcaggcccgcttccccctgtcctggaggaacttccccatcacctttgcctgctatgctgccctcttctgcctgagcgccagcatcatctaccccaccacctacgtgcagttcctgagccacggccgcagccgggaccacgccatcgccgccaccttcttcagctgcatcgcctgtgtggcctatgccacagaggtggcctggacccgggcccggcctggagagatcaccggctacatggccaccgtgcccggcctgctgaaggtgctggagacctttgtggcctgcatcatctttgccttcatcagtgaccccaacctgtaccagcaccagcctgccctggagtggtgtgtggccgtgtatgccatctgcttcatcctggccgccatcgccatcctgctgaacctgggagaatgtaccaacgtgctgcccatccccttccccagcttcctgtctggatag

SEQ ID NO: 109069 - DNA, 780 bp, Artificial Sequence
  derived and/or modified sequence
atgcctgtgacagtgaccaggaccaccatcaccaccaccaccaccagcagcagcggcctgggcagccccatgattgtgggcagcccccgggccctgacccagcccctgggcctgctgcggctgctgcagctggtgtccacctgtgtggccttcagcctggtggcctctgtgggcgcctggacaggctccatgggcaactggagcatgttcacctggtgcttctgcttctctgtgaccctcatcatcctgattgtggagctgtgtggcctgcaggcccgcttccccctgtcctggaggaacttccccatcacctttgcctgctatgctgccctcttctgcctgagcgccagcatcatctaccccaccacctacgtgcagttcctgagccacggccgcagccgggaccacgccatcgccgccaccttcttcagctgcatcgcctgtgtggcctatgccacagaggtggcctggacccgggcccggcctggagagatcaccggctacatggccaccgtgcccggcctgctgaaggtgctggagacctttgtggcctgcatcatctttgccttcatcagtgaccccaacctgtaccagcaccagcctgccctggagtggtgtgtggccgtgtatgccatctgcttcatcctggccgccatcgccatcctgctgaacctgggagaatgtaccaacgtgctgcccatccccttccccagcttcctgagcggcctggccctgctgtctgtgctgctgtatgccacagccctggtgctgtggccctag

SEQ ID NO: 109070 - DNA, 567 bp, Artificial Sequence
  derived and/or modified sequence
atgcctgtgacagtgaccaggaccaccatcaccaccaccaccaccagcagcagcggcctgggcagccccatgattgtgggcagcccccgggccctgacccagcccctgggcctgctgcggctgctgcagctggtgtccacctgtgtggccttcagcctggtggcctctgtgggcgcctggacaggctccatgggcaactggagcatgttcacctggtgcttctgcttctctgtgaccctcatcatcctgattgtggagctgtgtggcctgcaggcccgcttccccctgtcctggaggaacttccccatcacctttgcctgctatgctgccctcttctgcctgagcgccagcatcatctaccccaccacctacgtgcagttcctgagccacggccgcagccgggaccacgccatcgccgccaccttcttcagctgcatcgcctgtgtggcctatgccacagaggtggcctggacccgggcccggcctggagagatcaccggctacatggccaccgtgcccggcctgctgaaggtgctggagacctttgtggcctgcatcatcttctag

SEQ ID NO: 109071 - DNA, 3047 bp, Artificial Sequence
  derived and/or modified sequence
accaggccccgcccagcggccgcagccagccaggccgcgcccgggacgactgcagagcgcggtgctcttacagcctgttccaagtgtggcttaatccgtctccaccaccagatctttctccgtggattcctctgctaagaccgctgccatgccagtgacggtaacccgcaccaccatcacaaccaccacgacgtcatcttcgggcctggggtcccccatgatcgtggggtcccctcgggccctgacacagcccctgggtctccttcgcctgctgcagctggtgtctacctgcgtggccttctcgctggtggctagcgtgggcgcctggacggggtccatgggcaactggtccatgttcacctggtgcttctgcttctccgtgaccctgatcatcctcatcgtggagctgtgcgggctccaggcccgcttccccctgtcttggcgcaacttccccatcaccttcgcctgctatgcggccctcttctgcctctcggcctccatcatctaccccaccacctatgtccagttcctgtcccacggccgttcgcgggaccacgccatcgccgccaccttcttctcctgcatcgcgtgtgtggcttacgccaccgaagtggcctggacccgggcccggcccggcgagatcactggctatatggccaccgtacccgggctgctgaaggtgctggagaccttcgttgcctgcatcatcttcgcgttcatcagcgaccccaacctgtaccagcaccagccggccctggagtggtgcgtggcggtgtacgccatctgcttcatcctagcggccatcgccatcctgctgaacctgggggagtgcaccaacgtgctacccatccccttccccagcttcctgtcggggctggccttgctgtctgtcctcctctatgccaccgcccttgttctctggcccctctaccagttcgatgagaagtatggcggccagcctcggcgctcgagagatgtaagctgcagccgcagccatgcctactacgtgtgtgcctgggaccgccgactggctgtggccatcctgacggccatcaacctactggcgtatgtggctgacctggtgcactctgcccacctggtttttgtcaaggtctaagactctcccaagaggctcccgttccctctccaacctctttgttcttcttgcccgagttttctttatggagtacttctttcctccgcctttcctctgttttcctcttcctgtctcccctccctcccacctttttctttccttcccaattccttgcactctaaccagttcttggatgcatcttcttccttccctttcctcttgctgtttccttcctgtgttgttttgttgcccacatcctgttttcacccctgagctgtttctctttttcttttcttttttttttttttttttttttaagacggattctcactctgtggcccaggctggagtgcagtggtgcgatctcgactcactgcaacccccgcctcctgggttcaagcgattctcctgccccagcctcccaagtagctgggaggacaggtgtgagctgccgcacccagcctgtttctctttttccactcttcttttttctcatctcttttctgggttgcctgtcggctttcttatctgcctgttttgcaagcaccttctcctgtgtccttgggagccctgagacttctttctctccttgcctccacccacctccaaaggtgctgagctcacatccacaccccttgcagccgtccatgccacagccccccaaggggccccattgccaaagcatgcctgcccaccctcgctgtgccttagtcagtgtgtacgtgtgtgtgtgtgtgtgtgtgtgtgtgtgtgtttggggggtggggggtgggtagctggggattgggccctctttctcccagtggaggaaggtgtgcagtgtacttcccctttaaattaaaaaacatatatatatatatatttggaggtcagtaatttccaatgggcgggaggctttaagcaccgaccctgggtccctaggccccgcctggcactcagccttgccagagattggctccagaatttttgccaggcttacagaacacccactgcctagaggccatcttaaaggaagcaggggctggatgcctttcatcccaactattctctgtggtatcaaaaagaaaaaaaaaaaaaaagaaggagtcggggccgggcgtggtggctcacgcctgtaatcccagcactttgggagaccaagtcaggcaatcatctgaagtcaggagttcaagaccagcctggccaacatggtgaaagcatgtctctattaaaaatacaaaaattagccgggcgtggtggcgggcgcctgtaatcccaggtatttggggggactgagacaggagaatcccttcaacccgggaggtggaggttgcagtaagtcaagatggcaccactgtgctccagcctgggggacagagcgagactccatctcaaaaaaaaaaaggaatcggacgaagaaccacaggatgttgaagacaactgtctgaagtatttgtgagggacagcgatgtggccctctgtgttaagaataacgtgtcctgctttggcagagagaagaaaatagccactgcccgctttcaaggcaagatcgaccttttctgttttgttttgtttttctttctttttcctggccatgaggacaaaaattactgagtggcccttaaagagggaagtttgttttcagctgttctcttttgcccgtaggtgggagggtggggattgctgcgtcctagctagaggaatggctttgcttgaatgtgtagtgcacacgcacgggtgtttctgtgtgctagttgcttcttgctgctgcttcctgcttgtctgggactcacatacataacgtgatatatatatatatatatataaatgtataaatatatattttatttttttttaaatccctggagcttctggttcctatcagttcctgttgttaatcgtagaaccgttgtcccttcccccattcccgtatccatcatgttctttttcttttaaatatcaatataaaggt

SEQ ID NO: 109072 - DNA, 1492 bp, Artificial Sequence
  derived and/or modified sequence
ccggctctggctgggccgcccgcctccacagccgccgcccagggttctcccgccactgccgcccgcacccccgcccccgcggggttaagatcacacacgcgcccacgccggcccgcggggcgtgcactttcgctgggttccgtccgccgcagcccaaacagttaactgaacggggaggggagggggcggggcttacccggggtcaccgccagggccctgctgggttccacgccacgttcctgtctccgcagggcgttcgatccctagagggaggagcctgtccaaacggacgctaacggcctacctccccctcaggtgctcttacagcctgttccaagtgtggcttaatccgtctccaccaccagatctttctccgtggattcctctgctaagaccgctgccatgccagtgacggtaacccgcaccaccatcacaaccaccacgacgtcatcttcgggcctggggtcccccatgatcgtggggtcccctcgggccctgacacagcccctgggtctccttcgcctgctgcagctggtgtctacctgcgtggccttctcgctggtggctagcgtgggcgcctggacggggtccatgggcaactggtccatgttcacctggtgcttctgcttctccgtgaccctgatcatcctcatcgtggagctgtgcgggctccaggcccgcttccccctgtcttggcgcaacttccccatcaccttcgcctgctatgcggccctcttctgcctctcggcctccatcatctaccccaccacctatgtccagttcctgtcccacggccgttcgcgggaccacgccatcgccgccaccttcttctcctgcatcgcgtgtgtggcttacgccaccgaagtggcctggacccgggcccggcccggcgagatcactggctatatggccaccgtacccgggctgctgaaggtgctggagaccttcgttgcctgcatcatcttcgcgttcatcagcgaccccaacctgtaccagcaccagccggccctggagtggtgcgtggcggtgtacgccatctgcttcatcctagcggccatcgccatcctgctgaacctgggggagtgcaccaacgtgctacccatccccttccccagcttcctgtcggggctggccttgctgtctgtcctcctctatgccaccgcccttgttctctggcccctctaccagttcgatgagaagtatggcggccagcctcggcgctcgagagatgtaagctgcagccgcagccatgcctactacgtgtgtgcctgggaccgccgactggctgtggccatcctgacggccatcaacctactggcgtatgtggctgacctggtgcactctgcccacctggtttttgtcaaggtctaagactctcccaagaggctcccgttccctctccaacctctttgttcttcttgcccgagttttctttatggagtacttctttcctccgcctttcctctgttttcctcttcctgtctcccctccc

SEQ ID NO: 109073 - DNA, 3186 bp, Artificial Sequence
  derived and/or modified sequence
gccgactcgaagcccttataaggcgcggagacaccggctctggctgggccgcccgcctccacagccgccgcccagggttctcccgccactgccgcccgcacccccgcccccgcggggttaagatcacacacgcgcccacgccggcccgcggggcgtgcactttcgctgggttccgtccgccgcagcccaaacagtgctcttacagcctgttccaagtgtggcttaatccgtctccaccaccagatctttctccgtggattcctctgctaagaccgctgccatgccagtgacggtaacccgcaccaccatcacaaccaccacgacgtcatcttcgggcctggggtcccccatgatcgtggggtcccctcgggccctgacacagcccctgggtctccttcgcctgctgcagctggtgtctacctgcgtggccttctcgctggtggctagcgtgggcgcctggacggggtccatgggcaactggtccatgttcacctggtgcttctgcttctccgtgaccctgatcatcctcatcgtggagctgtgcgggctccaggcccgcttccccctgtcttggcgcaacttccccatcaccttcgcctgctatgcggccctcttctgcctctcggcctccatcatctaccccaccacctatgtccagttcctgtcccacggccgttcgcgggaccacgccatcgccgccaccttcttctcctgcatcgcgtgtgtggcttacgccaccgaagtggcctggacccgggcccggcccggcgagatcactggctatatggccaccgtacccgggctgctgaaggtgctggagaccttcgttgcctgcatcatcttcgcgttcatcagcgaccccaacctgtaccagcaccagccggccctggagtggtgcgtggcggtgtacgccatctgcttcatcctagcggccatcgccatcctgctgaacctgggggagtgcaccaacgtgctacccatccccttccccagcttcctgtcggggctggccttgctgtctgtcctcctctatgccaccgcccttgttctctggcccctctaccagttcgatgagaagtatggcggccagcctcggcgctcgagagatgtaagctgcagccgcagccatgcctactacgtgtgtgcctgggaccgccgactggctgtggccatcctgacggccatcaacctactggcgtatgtggctgacctggtgcactctgcccacctggtttttgtcaaggtctaagactctcccaagaggctcccgttccctctccaacctctttgttcttcttgcccgagttttctttatggagtacttctttcctccgcctttcctctgttttcctcttcctgtctcccctccctcccacctttttctttccttcccaattccttgcactctaaccagttcttggatgcatcttcttccttccctttcctcttgctgtttccttcctgtgttgttttgttgcccacatcctgttttcacccctgagctgtttctctttttcttttcttttttttttttttttttttttaagacggattctcactctgtggcccaggctggagtgcagtggtgcgatctcgactcactgcaacccccgcctcctgggttcaagcgattctcctgccccagcctcccaagtagctgggaggacaggtgtgagctgccgcacccagcctgtttctctttttccactcttcttttttctcatctcttttctgggttgcctgtcggctttcttatctgcctgttttgcaagcaccttctcctgtgtccttgggagccctgagacttctttctctccttgcctccacccacctccaaaggtgctgagctcacatccacaccccttgcagccgtccatgccacagccccccaaggggccccattgccaaagcatgcctgcccaccctcgctgtgccttagtcagtgtgtacgtgtgtgtgtgtgtgtgtgtgtgtgtgtgtgtttggggggtggggggtgggtagctggggattgggccctctttctcccagtggaggaaggtgtgcagtgtacttcccctttaaattaaaaaacatatatatatatatatttggaggtcagtaatttccaatgggcgggaggctttaagcaccgaccctgggtccctaggccccgcctggcactcagccttgccagagattggctccagaatttttgccaggcttacagaacacccactgcctagaggccatcttaaaggaagcaggggctggatgcctttcatcccaactattctctgtggtatcaaaaagaaaaaaaaaaaaaaagaaggagtcggggccgggcgtggtggctcacgcctgtaatcccagcactttgggagaccaagtcaggcaatcatctgaagtcaggagttcaagaccagcctggccaacatggtgaaagcatgtctctattaaaaatacaaaaattagccgggcgtggtggcgggcgcctgtaatcccaggtatttggggggactgagacaggagaatcccttcaacccgggaggtggaggttgcagtaagtcaagatggcaccactgtgctccagcctgggggacagagcgagactccatctcaaaaaaaaaaaggaatcggacgaagaaccacaggatgttgaagacaactgtctgaagtatttgtgagggacagcgatgtggccctctgtgttaagaataacgtgtcctgctttggcagagagaagaaaatagccactgcccgctttcaaggcaagatcgaccttttctgttttgttttgtttttctttctttttcctggccatgaggacaaaaattactgagtggcccttaaagagggaagtttgttttcagctgttctcttttgcccgtaggtgggagggtggggattgctgcgtcctagctagaggaatggctttgcttgaatgtgtagtgcacacgcacgggtgtttctgtgtgctagttgcttcttgctgctgcttcctgcttgtctgggactcacatacataacgtgatatatatatatatatatataaatgtataaatatatattttatttttttttaaatccctggagcttctggttcctatcagttcctgttgttaatcgtagaaccgttgtcccttcccccattcccgtatccatcatgttctttttcttttaaatatcaatataaaggtaaaagaa

SEQ ID NO: 109074 - DNA, 3056 bp, Artificial Sequence
  derived and/or modified sequence
agacccttccagctgccgctgtcgtctttgcttcagccgcagtcgccactggctgcctgaggtgctcttacagcctgttccaagtgtggcttaatccgtctccaccaccagatctttctccgtggattcctctgctaagaccgctgccatgccagtgacggtaacccgcaccaccatcacaaccaccacgacgtcatcttcgggcctggggtcccccatgatcgtggggtcccctcgggccctgacacagcccctgggtctccttcgcctgctgcagctggtgtctacctgcgtggccttctcgctggtggctagcgtgggcgcctggacggggtccatgggcaactggtccatgttcacctggtgcttctgcttctccgtgaccctgatcatcctcatcgtggagctgtgcgggctccaggcccgcttccccctgtcttggcgcaacttccccatcaccttcgcctgctatgcggccctcttctgcctctcggcctccatcatctaccccaccacctatgtccagttcctgtcccacggccgttcgcgggaccacgccatcgccgccaccttcttctcctgcatcgcgtgtgtggcttacgccaccgaagtggcctggacccgggcccggcccggcgagatcactggctatatggccaccgtacccgggctgctgaaggtgctggagaccttcgttgcctgcatcatcttcgcgttcatcagcgaccccaacctgtaccagcaccagccggccctggagtggtgcgtggcggtgtacgccatctgcttcatcctagcggccatcgccatcctgctgaacctgggggagtgcaccaacgtgctacccatccccttccccagcttcctgtcggggctggccttgctgtctgtcctcctctatgccaccgcccttgttctctggcccctctaccagttcgatgagaagtatggcggccagcctcggcgctcgagagatgtaagctgcagccgcagccatgcctactacgtgtgtgcctgggaccgccgactggctgtggccatcctgacggccatcaacctactggcgtatgtggctgacctggtgcactctgcccacctggtttttgtcaaggtctaagactctcccaagaggctcccgttccctctccaacctctttgttcttcttgcccgagttttctttatggagtacttctttcctccgcctttcctctgttttcctcttcctgtctcccctccctcccacctttttctttccttcccaattccttgcactctaaccagttcttggatgcatcttcttccttccctttcctcttgctgtttccttcctgtgttgttttgttgcccacatcctgttttcacccctgagctgtttctctttttcttttcttttttttttttttttttttttaagacggattctcactctgtggcccaggctggagtgcagtggtgcgatctcgactcactgcaacccccgcctcctgggttcaagcgattctcctgccccagcctcccaagtagctgggaggacaggtgtgagctgccgcacccagcctgtttctctttttccactcttcttttttctcatctcttttctgggttgcctgtcggctttcttatctgcctgttttgcaagcaccttctcctgtgtccttgggagccctgagacttctttctctccttgcctccacccacctccaaaggtgctgagctcacatccacaccccttgcagccgtccatgccacagccccccaaggggccccattgccaaagcatgcctgcccaccctcgctgtgccttagtcagtgtgtacgtgtgtgtgtgtgtgtgtgtgtgtgtgtgtgtttggggggtggggggtgggtagctggggattgggccctctttctcccagtggaggaaggtgtgcagtgtacttcccctttaaattaaaaaacatatatatatatatatttggaggtcagtaatttccaatgggcgggaggctttaagcaccgaccctgggtccctaggccccgcctggcactcagccttgccagagattggctccagaatttttgccaggcttacagaacacccactgcctagaggccatcttaaaggaagcaggggctggatgcctttcatcccaactattctctgtggtatcaaaaagaaaaaaaaaaaaaaagaaggagtcggggccgggcgtggtggctcacgcctgtaatcccagcactttgggagaccaagtcaggcaatcatctgaagtcaggagttcaagaccagcctggccaacatggtgaaagcatgtctctattaaaaatacaaaaattagccgggcgtggtggcgggcgcctgtaatcccaggtatttggggggactgagacaggagaatcccttcaacccgggaggtggaggttgcagtaagtcaagatggcaccactgtgctccagcctgggggacagagcgagactccatctcaaaaaaaaaaaggaatcggacgaagaaccacaggatgttgaagacaactgtctgaagtatttgtgagggacagcgatgtggccctctgtgttaagaataacgtgtcctgctttggcagagagaagaaaatagccactgcccgctttcaaggcaagatcgaccttttctgttttgttttgtttttctttctttttcctggccatgaggacaaaaattactgagtggcccttaaagagggaagtttgttttcagctgttctcttttgcccgtaggtgggagggtggggattgctgcgtcctagctagaggaatggctttgcttgaatgtgtagtgcacacgcacgggtgtttctgtgtgctagttgcttcttgctgctgcttcctgcttgtctgggactcacatacataacgtgatatatatatatatatatataaatgtataaatatatattttatttttttttaaatccctggagcttctggttcctatcagttcctgttgttaatcgtagaaccgttgtcccttcccccattcccgtatccatcatgttctttttcttttaaatatcaatataaaggtaaaagaagg

SEQ ID NO: 109075 - DNA, 3111 bp, Artificial Sequence
  derived and/or modified sequence
agacccttccagctgccgctgtcgtctttgcttcagccgcagtcgccactggctgcctgagggcgttcgatccctagagggaggagcctgtccaaacggacgctaacggcctacctccccctcaggtgctcttacagcctgttccaagtgtggcttaatccgtctccaccaccagatctttctccgtggattcctctgctaagaccgctgccatgccagtgacggtaacccgcaccaccatcacaaccaccacgacgtcatcttcgggcctggggtcccccatgatcgtggggtcccctcgggccctgacacagcccctgggtctccttcgcctgctgcagctggtgtctacctgcgtggccttctcgctggtggctagcgtgggcgcctggacggggtccatgggcaactggtccatgttcacctggtgcttctgcttctccgtgaccctgatcatcctcatcgtggagctgtgcgggctccaggcccgcttccccctgtcttggcgcaacttccccatcaccttcgcctgctatgcggccctcttctgcctctcggcctccatcatctaccccaccacctatgtccagttcctgtcccacggccgttcgcgggaccacgccatcgccgccaccttcttctcctgcatcgcgtgtgtggcttacgccaccgaagtggcctggacccgggcccggcccggcgagatcactggctatatggccaccgtacccgggctgctgaaggtgctggagaccttcgttgcctgcatcatcttcgcgttcatcagcgaccccaacctgtaccagcaccagccggccctggagtggtgcgtggcggtgtacgccatctgcttcatcctagcggccatcgccatcctgctgaacctgggggagtgcaccaacgtgctacccatccccttccccagcttcctgtcggggctggccttgctgtctgtcctcctctatgccaccgcccttgttctctggcccctctaccagttcgatgagaagtatggcggccagcctcggcgctcgagagatgtaagctgcagccgcagccatgcctactacgtgtgtgcctgggaccgccgactggctgtggccatcctgacggccatcaacctactggcgtatgtggctgacctggtgcactctgcccacctggtttttgtcaaggtctaagactctcccaagaggctcccgttccctctccaacctctttgttcttcttgcccgagttttctttatggagtacttctttcctccgcctttcctctgttttcctcttcctgtctcccctccctcccacctttttctttccttcccaattccttgcactctaaccagttcttggatgcatcttcttccttccctttcctcttgctgtttccttcctgtgttgttttgttgcccacatcctgttttcacccctgagctgtttctctttttcttttcttttttttttttttttttttttaagacggattctcactctgtggcccaggctggagtgcagtggtgcgatctcgactcactgcaacccccgcctcctgggttcaagcgattctcctgccccagcctcccaagtagctgggaggacaggtgtgagctgccgcacccagcctgtttctctttttccactcttcttttttctcatctcttttctgggttgcctgtcggctttcttatctgcctgttttgcaagcaccttctcctgtgtccttgggagccctgagacttctttctctccttgcctccacccacctccaaaggtgctgagctcacatccacaccccttgcagccgtccatgccacagccccccaaggggccccattgccaaagcatgcctgcccaccctcgctgtgccttagtcagtgtgtacgtgtgtgtgtgtgtgtgtgtgtgtgtgtgtgtttggggggtggggggtgggtagctggggattgggccctctttctcccagtggaggaaggtgtgcagtgtacttcccctttaaattaaaaaacatatatatatatatatttggaggtcagtaatttccaatgggcgggaggctttaagcaccgaccctgggtccctaggccccgcctggcactcagccttgccagagattggctccagaatttttgccaggcttacagaacacccactgcctagaggccatcttaaaggaagcaggggctggatgcctttcatcccaactattctctgtggtatcaaaaagaaaaaaaaaaaaaaagaaggagtcggggccgggcgtggtggctcacgcctgtaatcccagcactttgggagaccaagtcaggcaatcatctgaagtcaggagttcaagaccagcctggccaacatggtgaaagcatgtctctattaaaaatacaaaaattagccgggcgtggtggcgggcgcctgtaatcccaggtatttggggggactgagacaggagaatcccttcaacccgggaggtggaggttgcagtaagtcaagatggcaccactgtgctccagcctgggggacagagcgagactccatctcaaaaaaaaaaaggaatcggacgaagaaccacaggatgttgaagacaactgtctgaagtatttgtgagggacagcgatgtggccctctgtgttaagaataacgtgtcctgctttggcagagagaagaaaatagccactgcccgctttcaaggcaagatcgaccttttctgttttgttttgtttttctttctttttcctggccatgaggacaaaaattactgagtggcccttaaagagggaagtttgttttcagctgttctcttttgcccgtaggtgggagggtggggattgctgcgtcctagctagaggaatggctttgcttgaatgtgtagtgcacacgcacgggtgtttctgtgtgctagttgcttcttgctgctgcttcctgcttgtctgggactcacatacataacgtgatatatatatatatatatataaatgtataaatatatattttatttttttttaaatccctggagcttctggttcctatcagttcctgttgttaatcgtagaaccgttgtcccttcccccattcccgtatccatcatgttctttttcttttaaatatcaatataaaggt

SEQ ID NO: 109076 - DNA, 592 bp, Artificial Sequence
  derived and/or modified sequence
gcctgttccaagtgtggcttaatccgtctccaccaccagatctttctccgtggattcctctgctaagaccgctggttgcccaggctggtctccaactcctgggctcaagcaatcctcctgcctcagcctcttggagtgctgggattacagccatgccagtgacggtaacccgcaccaccatcacaaccaccacgacgtcatcttcgggcctggggtcccccatgatcgtggggtcccctcgggccctgacacagcccctgggtctccttcgcctgctgcagctggtgtctacctgcgtggccttctcgctggtggctagcgtgggcgcctggacggggtccatgggcaactggtccatgttcacctggtgcttctgcttctccgtgaccctgatcatcctcatcgtggagctgtgcgggctccaggcccgcttccccctgtcttggcgcaacttccccatcaccttcgcctgctatgcggccctcttctgcctctcggcctccatcatctaccccaccacctatgtccagttcctgtcccacggccgttcgcgggaccacgccatcgccgccaccttcttctcctgcatcgc

SEQ ID NO: 109077 - DNA, 1376 bp, Artificial Sequence
  derived and/or modified sequence
agacccttccagctgccgctgtcgtctttgcttcagccgcagtcgccactggctgcctgaggtgctcttacagcctgttccaagtgtggcttaatccgtctccaccaccagatctttctccgtggattcctctgctaagaccgctgccatgccagtgacggtaacccgcaccaccatcacaaccaccacgacgtcatcttcgggcctggggtcccccatgatcgtggggtcccctcgggccctgacacagcccctgggtctccttcgcctgctgcagctggtgtctacctgcgtggccttctcgctggtggctagcgtgggcgcctggacggggtccatgggcaactggtccatgttcacctggtgcttctgcttctccgtgaccctgatcatcctcatcgtggagctgtgcgggctccaggcccgcttccccctgtcttggcgcaacttccccatcaccttcttctcctgcatcgcgtgtgtggcttacgccaccgaagtggcctggacccgggcccggcccggcgagatcactggctatatggccaccgtacccgggctgctgaaggtgctggagaccttcgttgcctgcatcatcttcgcgttcatcagcgaccccaacctgtaccagcaccagccggccctggagtggtgcgtggcggtgtacgccatctgcttcatcctagcggccatcgccatcctgctgaacctgggggagtgcaccaacgtgctacccatccccttccccagcttcctgtcggggctggccttgctgtctgtcctcctctatgccaccgcccttgttctctggcccctctaccagttcgatgagaagtatggcggccagcctcggcgctcgagagatgtaagctgcagccgcagccatgcctactacgtgtgtgcctgggaccgccgactggctgtggccatcctgacggccatcaacctactggcgtatgtggctgacctggtgcactctgcccacctggtttttgtcaaggtctaagactctcccaagaggctcccgttccctctccaacctctttgttcttcttgcccgagttttctttatggagtacttctttcctccgcctttcctctgttttcctcttcctgtctcccctccctcccacctttttctttccttcccaattccttgcactctaaccagttcttggatgcatcttcttccttccctttcctcttgctgtttccttcctgtgttgttttgttgcccacatcctgttttcacccctgagctgtttctctttttcttttcttttttttttttttttttttttaagacggattctcactctgtggcccaggctggagtgcagtggtgcgatctcgactcactgcaacccccgcctcct

SEQ ID NO: 109078 - DNA, 1009 bp, Artificial Sequence
  derived and/or modified sequence
ccactcctggactcggcctccacccctgggcttggcctcaaagcctcctcagttgtcggccctggaaggtgcccagcggcggcagcgccagacgcgccccgttagctcagcgtcgctgagcatccgcagccgccaccaggccccgcccagcggccgcagccagccaggccgcgcccgggacgactgcagagcgcggtgctcttacagcctgttccaagtgtggcttaatccgtctccaccaccagatctttctccgtggattcctctgctaagaccgctgccatgccagtgacggtaacccgcaccaccatcacaaccaccacgacgtcatcttcgggcctggggtcccccatgatcgtggggtcccctcgggccctgacacagcccctgggtctccttcgcctgctgcagctggtgtctacctgcgtggccttctcgctggtggctagcgtgggcgcctggacggggtccatgggcaactggtccatgttcacctggtgcttctgcttctccgtgaccctgatcatcctcatcgtggagctgtgcgggctccaggcccgcttccccctgtcttggcgcaacttccccatcaccttcgcctgctatgcggccctcttctgcctctcggcctccatcatctaccccaccacctatgtccagttcctgtcccacggccgttcgcgggaccacgccatcgccgccaccttcttctcctgcatcgcgtgtgtggcttacgccaccgaagtggcctggacccgggcccggcccggcgagatcactggctatatggccaccgtacccgggctgctgaaggtgctggagaccttcgttgcctgcatcatcttcgcgttcatcagcgaccccaacctgtaccagcaccagccggccctggagtggtgcgtggcggtgtacgccatctgcttcatcctagcggccatcgccatcctgctgaacctgggggagtgcaccaacgtgctacccatccccttccccagcttcctgtcggggc

SEQ ID NO: 109079 - DNA, 841 bp, Artificial Sequence
  derived and/or modified sequence
agacccttccagctgccgctgtcgtctttgcttcagccgcagtcgccactggctgcctgagccatgccagtgacggtaacccgcaccaccatcacaaccaccacgacgtcatcttcgggcctggggtcccccatgatcgtggggtcccctcgggccctgacacagcccctgggtctccttcgcctgctgcagctggtgtctacctgcgtggccttctcgctggtggctagcgtgggcgcctggacggggtccatgggcaactggtccatgttcacctggtgcttctgcttctccgtgaccctgatcatcctcatcgtggagctgtgcgggctccaggcccgcttccccctgtcttggcgcaacttccccatcaccttcgcctgctatgcggccctcttctgcctctcggcctccatcatctaccccaccacctatgtccagttcctgtcccacggccgttcgcgggaccacgccatcgccgccaccttcttctcctgcatcgcgtgtgtggcttacgccaccgaagtggcctggacccgggcccggcccggcgagatcactggctatatggccaccgtacccgggctgctgaaggtgctggagaccttcgttgcctgcatcatcttcgcgttcatcagcgaccccaacctgtaccagcaccagccggccctggagtggtgcgtggcggtgtacgccatctgcttcatcctagcggccatcgccatcctgctgaacctgggggagtgcaccaacgtgctacccatccccttccccagcttcctgtcggggctggccttgctgtctgtcctcctctatgccaccgcccttgttctctggcccc

SEQ ID NO: 109080 - DNA, 777 bp, Artificial Sequence
  derived and/or modified sequence
agacccttccagctgccgctgtcgtctttgcttcagccgcagtcgccactggctgcctgagggcgttcgatccctagagggaggagcctgtccaaacggacgctaacggcctacctccccctcaggtgctcttacagcctgttccaagtgtggcttaatccgtctccaccaccagatctttctccgtggattcctctgctaagaccgctgccatgccagtgacggtaacccgcaccaccatcacaaccaccacgacgtcatcttcgggcctggggtcccccatgatcgtggggtcccctcgggccctgacacagcccctgggtctccttcgcctgctgcagctggtgtctacctgcgtggccttctcgctggtggctagcgtgggcgcctggacggggtccatgggcaactggtccatgttcacctggtgcttctgcttctccgtgaccctgatcatcctcatcgtggagctgtgcgggctccaggcccgcttccccctgtcttggcgcaacttccccatcaccttcgcctgctatgcggccctcttctgcctctcggcctccatcatctaccccaccacctatgtccagttcctgtcccacggccgttcgcgggaccacgccatcgccgccaccttcttctcctgcatcgcgtgtgtggcttacgccaccgaagtggcctggacccgggcccggcccggcgagatcactggctatatggccaccgtacccgggctgctgaaggtgctggagaccttcgttgcctgcatcatcttcg

SEQ ID NO: 109081 - DNA, 969 bp, Artificial Sequence
  derived and/or modified sequence
atgcccgtgaccgtgacccggaccaccatcaccaccaccaccacctcctcgagcggactggggagcccaatgattgtcggcagcccaagggccctgacacaaccattgggcttgttgcgcttgctgcagcttgtctccacttgcgtagcctttagtctggtagcatccgtgggtgcttggactggctctatgggtaactggtccatgtttacctggtgcttttgtttttctgtcaccttgatcattttaatagttgaattgtgcgggctccaagccaggtttccactaagctggcgaaattttcccatcactttcgcctgttacgccgcgctgttttgcctctccgcgtccattatctatccgaccacttatgttcagtttctgtcacacggcagatcccgggatcatgccatcgctgctacttttttctcttgtatcgcttgtgtggcttacgctacagaggtagcgtggaccagggcgcgtccgggcgaaattacaggctacatggcaacggttcccgggctcctgaaggtgctggagacctttgtagcatgcatcatttttgcgttcatatccgacccaaacctgtatcagcaccagcctgctctcgaatggtgcgttgcagtctacgctatttgttttatactggcagcaatcgccatcctgttaaacctgggcgagtgcacaaatgtcttgcctattccttttccaagctttctctccggactcgcccttctgtctgtcctgctgtacgccaccgctctggtgctgtggcccctctatcagttcgatgaaaagtacgggggacagcccaggagaagtcgcgatgtgtcctgctcccgcagccacgcgtactacgtctgtgcctgggatcgaaggctggctgtcgccattctcactgccatcaacctgctcgcctatgtggcagaccttgtccacagtgcacacttggtctttgtcaaagtctag

SEQ ID NO: 109082 - DNA, 969 bp, Artificial Sequence
  derived and/or modified sequence
atgcccgtgaccgtgacccggaccaccatcaccaccaccaccaccagcagtagcggcttaggtagtcccatgatcgtgggatcacctagggcattgacccagccacttgggttgttaaggctattgcaattagtctctacatgcgtagccttcagcctggttgcatccgtgggggcgtggacagggagcatgggaaattggagcatgtttacttggtgtttctgcttctctgtcacgcttatcattttaatcgtggagttgtgcggcttgcaggctagattccctctatcgtggcgaaactttccgatcactttcgcctgctatgccgccttattttgtctttccgcgagtattatttaccctacaacatacgtgcagttcctctcacatggacgcagtcgcgaccacgccatcgcagcaacattctttagctgtatagcatgtgttgcctacgcaactgaggtcgcctggacaagggcaaggcctggggaaattaccggctacatggccacggtgccgggtctcctcaaagtccttgagacctttgtcgcttgcattatttttgcatttatctctgatcctaatctgtatcaacaccaaccggccctcgaatggtgcgtggctgtttacgccatctgcttcattcttgcagccatcgctatacttctgaatctcggcgaatgcaccaacgtgttaccgatcccctttccttcattcttgtccggactagcgctcttgtccgtactcctctatgccactgctttggttctatggccgctgtaccagtttgatgaaaaatatggggggcaaccacggcgctcccgagacgtcagctgttctcgatcccatgcctattacgtgtgtgcatgggaccggaggctggccgtcgccattttgacagcaattaacctattggcttatgttgccgaccttgttcactctgctcatctggtgtttgttaaggtctag

SEQ ID NO: 109083 - DNA, 969 bp, Artificial Sequence
  derived and/or modified sequence
atgcccgtgaccgtgacccggaccaccatcaccaccaccaccacctcttctagcgggctgggatctcccatgattgtgggaagcccccgggcacttacacaacccctggggctgctccggctcctgcaattggtgtctacctgtgtggccttctcactagtagccagcgtgggcgcctggactgggtccatgggaaactggagcatgttcacatggtgtttttgtttttctgtgactctcatcattctgatcgtcgagctgtgtggtctgcaagctagatttcccttgagctggagaaactttcctatcacctttgcttgttacgccgccttgttctgtcttagcgcttctatcatatatccaaccacctacgtgcagttcctctcgcacggccgctctcgtgatcacgctattgccgccacctttttttcctgcattgcgtgtgttgcctacgctactgaggtggcatggacccgcgccaggcccggcgagataacggggtatatggctactgtcccgggtctgctgaaagtgctggaaactttcgtggcctgcatcattttcgcgttcatttcagatcccaacctgtaccagcatcagcctgccctcgaatggtgcgtagcggtctacgctatctgtttcatcctggctgccattgctatcctgctaaacctgggggagtgtacaaatgtgttgcctataccatttccatcttttctgtctggtctggcgctgcttagtgtgctgctgtacgcgaccgcccttgtactgtggccactgtaccagttcgatgagaaatacggaggccagcctaggcgatcgcgggacgtctcatgttcacgcagtcatgcctactacgtgtgtgcgtgggaccggagacttgctgtggccatcctcactgctattaatctcctcgcctacgtcgctgaccttgtgcatagtgcacacctggtcttcgtcaaggtgtag

SEQ ID NO: 109084 - DNA, 969 bp, Artificial Sequence
  derived and/or modified sequence
atgcccgtgaccgtgacccggaccaccatcaccaccaccaccacctcctccagcgggctcggatcccccatgatagtgggaagcccgcgcgcactcacccagccacttgggttactgcgcctgctgcagctggtgtccacatgcgtggcattctccttggttgccagcgtaggcgcctggacagggtctatgggaaactggtccatgttcacgtggtgtttttgcttcagcgttacattgattatcctgatcgtcgaactgtgcggacttcaggcaagattcccactctcttggcgcaattttcccatcaccttcgcatgctatgcggcgctcttttgcctgtcggcatcaattatttaccctactacctacgtgcaattcttaagccacggtagatctagggatcacgccattgctgctacattcttcagttgcatcgcatgtgttgcctatgccaccgaagtcgcctggacgcgtgcaagaccaggcgagatcactgggtacatggccacggttccaggtcttctcaaggtgctggagactttcgtggcctgcatcatctttgcgttcatctccgaccccaacctttaccagcatcagccagctctggaatggtgtgtggctgtgtatgcaatatgctttatcctggcagcaatcgcgattctgctcaacctcggagagtgtaccaacgttttgccaattccatttccatcgttcttgtcagggctcgctctcctgtctgtccttctgtacgcgacggctctggtcctctggcctctgtaccagttcgatgaaaaatacggaggacagccccgcagatccagagatgtttcctgtagccggagtcacgcttactatgtctgtgcctgggatcgcaggttagctgtagctattctcactgcaatcaatttgctggcttatgttgccgatttggtgcattcagcccacttggtcttcgtgaaggtgtag

SEQ ID NO: 109085 - DNA, 969 bp, Artificial Sequence
  derived and/or modified sequence
atgcccgtgaccgtgacccggaccaccatcaccaccaccaccacctcatctagtggcctaggcagcccaatgatcgtgggtagtccaagagctttgacccagcctttgggactactccgtctgctgcagctggtgagcacatgcgtcgcgtttagtctggtcgcttcagtgggagcttggacaggatccatgggtaattggtctatgtttacttggtgtttttgtttttccgtgaccctgatcattctgattgtggagctctgtggcctacaggctcgattcccgctgtcgtggagaaacttccctattacttttgcctgctatgccgctctgttttgtctcagcgcctcaatcatttatccaacaacgtatgtgcagtttctgagccacgggaggtcgagagaccatgccattgcagcaacctttttcagctgtatcgcgtgcgtggcatatgccacagaagtggcgtggacccgtgccagaccaggggaaattactggatacatggcgaccgttccaggtctcttgaaagtccttgagacatttgttgcgtgcattatctttgctttcatctctgatcccaatttatatcaacaccagccagcgctcgaatggtgcgtggcagtgtacgcaatctgcttcatcctcgctgcaattgcaattctcttgaaccttggggaatgtactaacgttctccctatccccttcccttccttcttatcgggacttgccctcctctctgtgctgctgtacgctacagcccttgtgctttggcctctataccaatttgacgaaaaatatgggggtcagccccggcgatcccgggatgttagttgttcccgcagccacgcgtactacgtatgcgcctgggaccgcaggcttgccgtggctatactgaccgccatcaatttgctggcctatgtggccgacttggtgcacagcgctcatcttgtattcgtgaaggtgtag

SEQ ID NO: 109086 - DNA, 444 bp, Artificial Sequence
  derived and/or modified sequence
atgcccgtgaccgtgacccggaccaccatcaccaccaccaccacctccagctcaggcttgggatcccccatgatcgtcggttcccctcgagccctcacgcagcccctgggcttgctgcggcttctccagctggtgtcaacatgtgtggccttctcgctcgtggccagcgtgggagcttggactggatctatgggcaactggtccatgttcacctggtgcttctgcttctctgtcactctaatcatcctgatcgtggagctgtgcggcctacaggctcgattccctctttcatggagaaatttcccaataacattcgcatgctacgcagcactattttgtctaagtgcttcaattatttaccccacaacatatgtccaatttctgagtcacgggagatcacgggatcatgccatcgccgccacattcttttcttgcatcgcatag

SEQ ID NO: 109087 - DNA, 858 bp, Artificial Sequence
  derived and/or modified sequence
atgcccgtgaccgtgacccggaccaccatcaccaccaccaccaccagctcctcagggctaggtagccccatgatcgtggggagcccacgggccctgacacaacctcttggcctgttacgtctgctccagctggtgtccacttgtgttgccttttcgctcgtcgcttcagtgggcgcctggactggctccatggggaactggagcatgttcacatggtgtttttgcttttccgttacgctgataatcttgatcgtggaactatgtggcctgcaagctagatttcccctgtcttggcgtaactttccaatcacattcttctcttgtatcgcctgcgtagcctatgcaactgaagtggcctggacaagggctaggccaggagaaattaccggatacatggccaccgtccccggccttctcaaggtgttggagacctttgtggcatgtatcatctttgcattcattagcgatccaaacctgtaccagcaccaacctgccctggaatggtgcgtagccgtttacgctatctgtttcattctggccgccattgccatcttgctaaatctcggagaatgcacgaacgtgctgcctatcccattcccgtccttcctgtcaggattggccctgttgagcgtgctgttatatgctacagcactcgtgctgtggcctctctaccagttcgatgagaaatatggcggacaaccccgcaggtcacgggacgttagctgctcacggtcccacgcctactacgtctgtgcatgggaccgtagattggccgtggcaatccttaccgccatcaacctactggcttatgtagccgatctcgttcactcagcgcacctggtattcgtcaaggtctag

SEQ ID NO: 109088 - DNA, 729 bp, Artificial Sequence
  derived and/or modified sequence
atgcccgtgaccgtgacccggaccaccatcaccaccaccaccaccagctctagcgggctgggaagcccaatgatcgtagggagcccacgcgctttgacccagcccttggggcttttacgcctgttgcaactggtttctacctgtgtggccttttctctagtagcttctgttggggcttggaccggctctatgggcaactggtccatgtttacctggtgtttctgttttagcgtgacattgataattctgatagtagagctgtgcggtttgcaagcgcgatttccgctgagttggagaaactttcctataaccttcgcctgctatgctgctctcttctgcctgtccgcttcaatcatttatcccacaacgtatgtccagtttctgagccatggacgctcaagggatcacgccatcgccgcaactttcttttcatgtatcgcatgtgtcgcttatgctaccgaggtggcatggaccagggctcgaccgggggagataaccggctacatggcaacagttcctggcctcttgaaggtgcttgagacctttgtagcctgtatcatattcgccttcatctccgatccaaatctttatcagcaccagcctgctctcgagtggtgtgtggcagtgtacgctatttgcttcatcttggctgcaattgccattttgctgaacctcggcgaatgcaccaacgttctgccaattcctttcccatcctttctgtccggctag

SEQ ID NO: 109089 - DNA, 780 bp, Artificial Sequence
  derived and/or modified sequence
atgcccgtgaccgtgacccggaccaccatcaccaccaccaccacctcttcttctggccttgggtcccctatgatcgtgggtagcccgcgggcgcttacacagccattgggtcttctgcgactgctgcagctggtgtccacatgcgtggccttttcactggttgcatctgtcggtgcgtggaccggctcaatgggaaattggtctatgtttacttggtgcttctgctttagcgtcacgctgataatcctgatcgtggaactttgtggactgcaggcaaggttcccactgagctggcgcaatttcccaatcacttttgcgtgctatgcagccttattttgtctctcagcatccatcatttatcccactacctatgttcagttcctgagtcacgggcggtccagggatcatgccatcgccgccacattcttctcttgcatcgcgtgtgttgcttacgccactgaagtggcttggaccagggccagacctggagaaattactggttatatggctacggtacctggcctgttgaaagtcctagagaccttcgtcgcatgcatcattttcgccttcatttcagatcctaatctgtaccaacaccaaccagcccttgaatggtgcgtcgctgtgtatgcgatctgcttcatcttagccgccattgccatactcctgaacctgggagagtgtaccaacgtcctgcccatcccgttccccagctttcttagtggtctggcactcctttctgtactcctgtacgccaccgccttggttttgtggccctag

SEQ ID NO: 109090 - DNA, 567 bp, Artificial Sequence
  derived and/or modified sequence
atgcccgtgaccgtgacccggaccaccatcaccaccaccaccacctcttcgtctgggctcgggagcccaatgatcgtcggaagtccccgagcccttacacagccgctgggactactccgcctccttcagctcgtttcaacttgcgttgcgttctcccttgtggccagcgtcggcgcctggactggcagcatggggaattggtccatgtttacctggtgtttctgcttcagcgttacacttatcatactgattgtggagctgtgcggcctccaagctcgattccctttatcatggagaaattttccgatcacctttgcatgttacgctgcactgttttgcctcagtgcctcaatcatttatcctacaacatacgtgcagttcctgtctcacgggcggagtagggaccacgctatagccgcgacctttttctcttgcatcgcctgcgttgcctacgctaccgaggtggcttggactagggctaggcctggggagatcactgggtacatggctacggtcccaggactgctcaaggtcctggaaaccttcgttgcttgtattatcttttag

SEQ ID NO: 109091 - DNA, 969 bp, Artificial Sequence
  derived and/or modified sequence
atgccagtcactgtgacgagaaccaccattactacaacaacaacttcttcttccgggcttggctcaccaatgatcgtcggctctccacgcgctctgacacagcctctgggcctcttacgacttctgcagctggtgtccacatgtgtggccttctccttagtcgcttccgtgggcgcttggaccggcagtatggggaactggagtatgttcacttggtgcttctgtttcagcgtgaccctgattattctgatcgtggaactgtgtggactgcaggctcggtttcccttgtcctggcgtaattttccaattacatttgcatgttacgccgctctcttttgcctctcggcgagtataatttatcctaccacctatgtgcagttcctgtctcacggccgatcgcgggatcatgcaatcgcagccacctttttctcttgcatagcctgtgtggcatacgctaccgaagtagcttggactagagctcggccaggcgagatcactgggtatatggctaccgtgcctggactcttgaaggtgctagaaactttcgtcgcctgcataattttcgccttcatatccgacccaaacctttatcagcaccaacccgcactggagtggtgtgtggcagtgtacgctatttgctttattctcgcagccatcgccatccttcttaatcttggggagtgtaccaacgtgctccccatccctttcccatctttcctaagtggactcgccctactctccgtccttctgtatgccacagctctggtgctatggccgttgtatcaattcgatgaaaaatacggcggtcagccacgacggtcaagagatgtcagttgttctcggtcccatgcttattacgtgtgtgcatgggacaggcgcttagctgtggctatcctgacagcaatcaatctcctggcctacgtagccgatctcgtgcactcagcacatcttgtttttgtgaaggtgtag

SEQ ID NO: 109092 - DNA, 969 bp, Artificial Sequence
  derived and/or modified sequence
atgcctgtgactgtgactcgaactactatcaccactactaccacaagttccagcggcttaggctctccaatgatagtaggcagccccagggcccttactcagcctttgggattgctaaggctactacaactggtttctacatgcgtggcattcagcctggtcgctagcgtgggcgcttggactggaagcatggggaattggtccatgtttacttggtgtttttgtttctccgtcactcttatcattctgatagtggaactgtgtggcctgcaggctcgttttcctttgagttggcgcaacttcccaatcaccttcgcctgctatgccgcactcttctgcctctctgcgtctatcatttaccccaccacttacgtccagttcctgtctcacgggcgatcaagggaccacgccattgctgcgactttcttctcttgtatcgcgtgcgtggcgtacgctactgaggtggcatggacacgagcacggccaggcgaaatcaccggctacatggcaacagtgccaggactcttgaaagtgctcgaaacattcgtggcttgcattatttttgccttcatcagcgatcccaacctgtatcagcaccaaccggctttagaatggtgcgtggccgtgtacgccatttgtttcatcctggccgctatcgccatactgctaaacctaggagagtgcactaatgtcctcccgatcccgtttccgagtttccttagtggtttggcgttgctatctgtgctgttgtatgcaacggccctggtcttgtggccactataccaatttgacgagaagtatgggggacaaccccgtcggagccgagatgtttcatgttcccgttctcatgcatattacgtgtgtgcctgggaccggagattagcggtggctattttgaccgccatcaatctgctcgcgtacgtggccgatctggtccacagtgcgcacctggtcttcgttaaggtgtag

SEQ ID NO: 109093 - DNA, 969 bp, Artificial Sequence
  derived and/or modified sequence
atgccagtcaccgtaacccgtaccaccatcaccactacaaccacttccagctcaggactaggctcccccatgattgtggggtcaccgagagcattaacccagcctcttggactgttacgcttgcttcagctggttagcacgtgcgtagcatttagcctagtcgcttctgttggcgcatggacaggctcaatgggcaattggagcatgttcacatggtgtttctgcttcagtgtgacgttgatcatcctgattgtcgaactctgcggcctacaggctcgatttcctctgagctggcgcaatttccctatcacattcgcctgttatgccgcacttttctgcctcagcgcaagcatcatctatccaactacttacgtccagtttttgtcccatggacggagccgagatcacgctatagccgctaccttttttagctgcatcgcgtgtgtggcctatgccacggaagtggcatggacacgggctagacccggagaaattactggttacatggcaaccgtaccaggtttgctgaaagtgctcgaaacgttcgtcgcttgtatcatatttgcctttatttctgaccccaatctctatcagcaccagcctgcgttagaatggtgtgtggcagtttatgccatctgcttcatcctggctgccatcgccatcctgttaaatctgggcgaatgtactaatgtgctaccaatcccctttccgtcatttctatcaggactcgctcttctatccgtccttctgtacgccactgccctagtgctgtggcccctgtaccagtttgacgagaagtacggcggacagcccaggaggtcgagagatgtgtcctgtagcaggtcccatgcctattatgtttgtgcctgggaccgcaggctcgcagtggcaattctcaccgccatcaacttgctcgcatatgtcgctgatctggtccacagtgcccaccttgtgttcgtgaaggtttag

SEQ ID NO: 109094 - DNA, 969 bp, Artificial Sequence
  derived and/or modified sequence
atgcccgtgaccgtgacacgaactaccattacaactacaacgacatcatccagcgggctgggaagtccgatgatcgtcggcagcccacgggcattgacgcagcctttagggctgctgcgactgctgcagctggtgtctacatgcgttgcttttagtcttgtagcatctgttggagcctggactggaagcatgggtaactggtccatgttcacctggtgtttctgcttcagtgttaccctcattatactaatcgtggagctgtgcggccttcaggcccgattcccgctgagttggcgcaactttcccatcactttcgcttgttacgctgccctgttttgtttgtccgcttcaattatttaccccactacttatgtgcagtttctgagccacggaaggtcgcgcgatcacgccatcgccgctaccttcttcagctgcatcgcctgcgtggcctacgcgaccgaagttgcctggactcgagcaaggcccggtgagattacaggttatatggctacggttccaggtttgctcaaggtgctcgaaacctttgtggcatgcatcattttcgcctttatatccgaccccaacctttatcagcaccaacccgctttagagtggtgtgtagcggtgtacgccatttgttttatactggcggctatcgccattctactgaacttgggtgaatgcaccaatgtattgcccataccttttcccagcttcctctccggattggcgctcctgagcgtgttactgtatgcaaccgcgctggtactgtggcctctgtatcagttcgatgaaaaatacggcggacaaccgagacgctcaagagatgtctcttgctctcgctcccacgcctattatgtttgcgcgtgggatcgtagactggcagtggccatactgaccgccataaatttactcgcttatgtggcagatttggtgcactccgctcacctcgtatttgtcaaagtgtag

SEQ ID NO: 109095 - DNA, 969 bp, Artificial Sequence
  derived and/or modified sequence
atgcctgtgacagtgacaagaactactatcacaacaaccaccacatcgagcagtgggctagggagccccatgattgtgggtagccccagagccctcactcagcccttggggctgctaaggctgttacagttggtatctacttgcgttgctttctctctcgtggctagcgtcggcgcatggaccggcagtatggggaactggtccatgtttacatggtgcttttgcttttccgtcactcttatcattctgattgtcgaactctgtgggcttcaggccaggttccccttgtcctggcgcaatttcccgataacatttgcttgctatgctgctcttttctgcctttcagcttctattatttatccaaccacgtacgttcagttcctgtcgcatggacggtcaagggatcatgcgattgccgcaaccttcttcagctgtatcgcttgcgtggcgtatgccacagaggtagcttggacccgcgctcggccaggcgaaatcactggatacatggcaaccgtcccgggtcttctcaaggtcctagagaccttcgtggcatgcattatctttgcctttattagcgatcctaatctttaccagcatcagcctgctttagaatggtgcgtggcagtctatgctatttgttttatcctggccgctatagcaatcctgttgaatttgggggagtgcacaaacgtcttaccgatacccttcccaagctttttgtccggcctggctctgctgtctgtgttattgtatgctacagcattagtgttatggcctttgtaccaattcgatgagaagtatggcggacaacctcggaggtccagggacgtctcatgctcccgaagccacgcttattatgtgtgcgcctgggaccgccgactcgccgtggccatactcacagcgattaatctgcttgcctacgtggccgatttggtgcactcagctcatctggtgtttgtgaaggtctag

SEQ ID NO: 109096 - DNA, 444 bp, Artificial Sequence
  derived and/or modified sequence
atgcctgtgaccgttacgaggaccacaatcacaacaaccaccacctcaagctctgggctgggttctccaatgatcgtaggcagcccacgcgcacttacccagccactgggcttactccggctgctccaactggtcagtacctgcgtggccttctctctggtggctagcgttggcgcatggaccgggtcaatgggaaactggtcaatgttcacttggtgtttttgctttagtgtgactttgataatactcatcgtcgaactgtgtggactccaagccagattccctctgagctggagaaatttcccaattactttcgcatgctacgcagccttattttgcttgtcagcttcaatcatttacccaactacatatgtgcagttcctgtcccatggaagatcccgcgatcacgctatcgctgcgacatttttttcatgcattgcctag

SEQ ID NO: 109097 - DNA, 858 bp, Artificial Sequence
  derived and/or modified sequence
atgcctgtgactgtcacaagaactacaatcaccacgaccacaacttcgtcgagcggattgggtagtcccatgatagtgggttcaccacgggctctgactcagcctctgggattgctcaggctgttgcagttggtctccacctgcgtggcttttagccttgtagcgagcgtcggggcttggacaggaagcatggggaactggtctatgttcacctggtgtttctgcttctcggtcaccctgatcatactcatcgtggagctgtgcggattgcaggccagattccctttgtcctggagaaatttccctattacattcttctcttgcatcgcctgtgtcgcctacgccaccgaagtggcctggactagggcacgacccggagagattaccggttatatggcaaccgtgcctggcctgctgaaggtgctggagacattcgtcgcctgcatcatttttgccttcattagcgatccaaacctgtaccagcaccagcccgctcttgagtggtgcgtggctgtttatgcaatctgtttcattctcgcagcaatcgccatactgctcaatctgggcgaatgtacgaacgtgctgcctatcccatttcctagctttctgtcgggattggccctgttaagcgttctcctgtatgcaaccgctctagtcctatggccactgtaccagttcgatgaaaaatacggaggccagcccaggagatccagggacgtgtcctgcagtcgctctcatgcttattacgtgtgcgcctgggaccgcagactcgcagtcgccatcctcaccgctatcaatcttctggcctatgtggctgacctggtgcattcggcccatctggtatttgtgaaagtttag

SEQ ID NO: 109098 - DNA, 729 bp, Artificial Sequence
  derived and/or modified sequence
atgcccgtgaccgtgacacgcactacaatcaccacgaccactacgagctcgagtggattaggatccccgatgatcgtagggagcccaagggcacttacccagcctctggggctcctgagactgctgcaactcgtgtcaacctgtgtcgcattttctctggtggcatcagtaggggcatggaccgggagtatgggtaattggagcatgtttacctggtgtttttgctttagtgtgactttgattattctgattgttgaactgtgcggactacaggccagattccctctgtcgtggcgcaactttcctattacattcgcctgctacgctgctctgttctgtctgagcgcctcaataatataccctactacttacgtgcagtttctgtctcatggacggtctagggatcacgccatcgccgctacctttttttcttgtattgcctgcgtggcatatgccaccgaagtggcctggacaagagctcgcccaggggaaatcaccggctacatggctacggtgcccggattactcaaggttttagagactttcgtagcctgcattatctttgcctttatcagtgaccctaatctatatcagcaccaacccgctctggagtggtgtgtggcggtgtatgcgatctgctttattctggcggctatcgcgatactgctgaatctgggagagtgcacaaacgtgctccccatcccgtttccaagcttcctgtcaggttag

SEQ ID NO: 109099 - DNA, 780 bp, Artificial Sequence
  derived and/or modified sequence
atgcccgtgacagtcactcggaccaccatcacaactaccacaacctcctcttctggtctgggtagcccgatgattgtcggctcccccagagccttgactcaacctctcggactgctgcggctgctgcagctggtctccacatgtgttgcctttagccttgtggcctctgtgggagcctggaccggctcaatggggaattggtccatgtttacctggtgtttctgtttctccgtgactctcatcattctgattgtcgagctgtgcggactccaagccagattccccctttcttggcgaaattttcccatcaccttcgcctgttacgccgcattgttctgcctatccgcatctatcatatatcctactacttacgtccaattcctttcccacggcaggtctagggatcatgcgatagcagctaccttcttttcctgcattgcatgtgtggcatatgcaactgaggtcgcttggacccgagctaggcctggcgaaataacaggctatatggccactgtgcctgggctgttaaaggtgcttgagacatttgtcgcctgcattatctttgcttttatttccgaccctaacctgtaccagcatcaacctgcactggaatggtgtgtcgccgtgtacgctatctgcttcattctggccgctatcgcgattctgctaaatctcggtgagtgtaccaacgttttgcctatcccattcccgtcgtttctttccggactcgccttgctgtctgtgttgctctatgcaactgctctcgttctgtggccttag

SEQ ID NO: 109100 - DNA, 567 bp, Artificial Sequence
  derived and/or modified sequence
atgcctgttacagtaacgcggaccacaatcactaccaccaccacgtctagcagcggcctgggtagcccaatgatagtgggcagccccagggctttgactcagccactggggctgctgaggctcctgcagctcgtgtccacatgtgtggcattctctctagtggcgtctgttggagcatggaccggtagcatgggcaactggtcaatgtttacctggtgtttttgcttctctgtcacactaatcattctgattgtcgaattgtgcggacttcaggcccgatttcctctctcctggcgcaacttccctataacctttgcatgttatgctgccctattttgtctcagtgcgagcatcatttaccccactacctacgtccaattcctttcgcacggaaggtcaagagaccacgcaatagctgctactttcttttcttgcatagcctgtgtcgcctacgctacagaggttgcatggacccgggctcgaccaggcgagataaccgggtacatggctacagtccccggtttgttaaaagtactcgagacgttcgtagcctgtatcattttctag

SEQ ID NO: 109101 - DNA, 969 bp, Artificial Sequence
  derived and/or modified sequence
atgcccgtgaccgtgaccagaaccaccatcaccaccaccaccaccagcagcagcggcctgggcagccccatgatcgtgggcagccccagagccctgacccagcccctgggcctgctgagactgctgcagctggtgagcacctgcgtggccttcagcctggtggccagcgtgggcgcctggaccggcagcatgggcaactggagcatgttcacctggtgcttctgcttcagcgtgaccctgatcatcctgatcgtggagctgtgcggcctgcaggccagattccccctgagctggagaaacttccccatcaccttcgcctgctacgccgccctgttctgcctgagcgccagcatcatctaccccaccacctacgtgcagttcctgagccacggcagaagcagagaccacgccatcgccgccaccttcttcagctgcatcgcctgcgtggcctacgccaccgaggtggcctggaccagagccagacccggcgagatcaccggctacatggccaccgtgcccggcctgctgaaggtgctggagaccttcgtggcctgcatcatcttcgccttcatcagcgaccccaacctgtaccagcaccagcccgccctggagtggtgcgtggccgtgtacgccatctgcttcatcctggccgccatcgccatcctgctgaacctgggcgagtgcaccaacgtgctgcccatccccttccccagcttcctgagcggcctggccctgctgagcgtgctgctgtacgccaccgccctggtgctgtggcccctgtaccagttcgacgagaagtacggcggccagcccagaagaagcagagacgtgagctgcagcagaagccacgcctactacgtgtgcgcctgggacagaagactggccgtggccatcctgaccgccatcaacctgctggcctacgtggccgacctggtgcacagcgcccacctggtgttcgtgaaggtgtag

SEQ ID NO: 109102 - DNA, 444 bp, Artificial Sequence
  derived and/or modified sequence
atgcccgtgaccgtgaccagaaccaccatcaccaccaccaccaccagcagcagcggcctgggcagccccatgatcgtgggcagccccagagccctgacccagcccctgggcctgctgagactgctgcagctggtgagcacctgcgtggccttcagcctggtggccagcgtgggcgcctggaccggcagcatgggcaactggagcatgttcacctggtgcttctgcttcagcgtgaccctgatcatcctgatcgtggagctgtgcggcctgcaggccagattccccctgagctggagaaacttccccatcaccttcgcctgctacgccgccctgttctgcctgagcgccagcatcatctaccccaccacctacgtgcagttcctgagccacggcagaagcagagaccacgccatcgccgccaccttcttcagctgcatcgcctag

SEQ ID NO: 109103 - DNA, 858 bp, Artificial Sequence
  derived and/or modified sequence
atgcccgtgaccgtgaccagaaccaccatcaccaccaccaccaccagcagcagcggcctgggcagccccatgatcgtgggcagccccagagccctgacccagcccctgggcctgctgagactgctgcagctggtgagcacctgcgtggccttcagcctggtggccagcgtgggcgcctggaccggcagcatgggcaactggagcatgttcacctggtgcttctgcttcagcgtgaccctgatcatcctgatcgtggagctgtgcggcctgcaggccagattccccctgagctggagaaacttccccatcaccttcttcagctgcatcgcctgcgtggcctacgccaccgaggtggcctggaccagagccagacccggcgagatcaccggctacatggccaccgtgcccggcctgctgaaggtgctggagaccttcgtggcctgcatcatcttcgccttcatcagcgaccccaacctgtaccagcaccagcccgccctggagtggtgcgtggccgtgtacgccatctgcttcatcctggccgccatcgccatcctgctgaacctgggcgagtgcaccaacgtgctgcccatccccttccccagcttcctgagcggcctggccctgctgagcgtgctgctgtacgccaccgccctggtgctgtggcccctgtaccagttcgacgagaagtacggcggccagcccagaagaagcagagacgtgagctgcagcagaagccacgcctactacgtgtgcgcctgggacagaagactggccgtggccatcctgaccgccatcaacctgctggcctacgtggccgacctggtgcacagcgcccacctggtgttcgtgaaggtgtag

SEQ ID NO: 109104 - DNA, 729 bp, Artificial Sequence
  derived and/or modified sequence
atgcccgtgaccgtgaccagaaccaccatcaccaccaccaccaccagcagcagcggcctgggcagccccatgatcgtgggcagccccagagccctgacccagcccctgggcctgctgagactgctgcagctggtgagcacctgcgtggccttcagcctggtggccagcgtgggcgcctggaccggcagcatgggcaactggagcatgttcacctggtgcttctgcttcagcgtgaccctgatcatcctgatcgtggagctgtgcggcctgcaggccagattccccctgagctggagaaacttccccatcaccttcgcctgctacgccgccctgttctgcctgagcgccagcatcatctaccccaccacctacgtgcagttcctgagccacggcagaagcagagaccacgccatcgccgccaccttcttcagctgcatcgcctgcgtggcctacgccaccgaggtggcctggaccagagccagacccggcgagatcaccggctacatggccaccgtgcccggcctgctgaaggtgctggagaccttcgtggcctgcatcatcttcgccttcatcagcgaccccaacctgtaccagcaccagcccgccctggagtggtgcgtggccgtgtacgccatctgcttcatcctggccgccatcgccatcctgctgaacctgggcgagtgcaccaacgtgctgcccatccccttccccagcttcctgagcggctag

SEQ ID NO: 109105 - DNA, 780 bp, Artificial Sequence
  derived and/or modified sequence
atgcccgtgaccgtgaccagaaccaccatcaccaccaccaccaccagcagcagcggcctgggcagccccatgatcgtgggcagccccagagccctgacccagcccctgggcctgctgagactgctgcagctggtgagcacctgcgtggccttcagcctggtggccagcgtgggcgcctggaccggcagcatgggcaactggagcatgttcacctggtgcttctgcttcagcgtgaccctgatcatcctgatcgtggagctgtgcggcctgcaggccagattccccctgagctggagaaacttccccatcaccttcgcctgctacgccgccctgttctgcctgagcgccagcatcatctaccccaccacctacgtgcagttcctgagccacggcagaagcagagaccacgccatcgccgccaccttcttcagctgcatcgcctgcgtggcctacgccaccgaggtggcctggaccagagccagacccggcgagatcaccggctacatggccaccgtgcccggcctgctgaaggtgctggagaccttcgtggcctgcatcatcttcgccttcatcagcgaccccaacctgtaccagcaccagcccgccctggagtggtgcgtggccgtgtacgccatctgcttcatcctggccgccatcgccatcctgctgaacctgggcgagtgcaccaacgtgctgcccatccccttccccagcttcctgagcggcctggccctgctgagcgtgctgctgtacgccaccgccctggtgctgtggccctag

SEQ ID NO: 109106 - DNA, 567 bp, Artificial Sequence
  derived and/or modified sequence
atgcccgtgaccgtgaccagaaccaccatcaccaccaccaccaccagcagcagcggcctgggcagccccatgatcgtgggcagccccagagccctgacccagcccctgggcctgctgagactgctgcagctggtgagcacctgcgtggccttcagcctggtggccagcgtgggcgcctggaccggcagcatgggcaactggagcatgttcacctggtgcttctgcttcagcgtgaccctgatcatcctgatcgtggagctgtgcggcctgcaggccagattccccctgagctggagaaacttccccatcaccttcgcctgctacgccgccctgttctgcctgagcgccagcatcatctaccccaccacctacgtgcagttcctgagccacggcagaagcagagaccacgccatcgccgccaccttcttcagctgcatcgcctgcgtggcctacgccaccgaggtggcctggaccagagccagacccggcgagatcaccggctacatggccaccgtgcccggcctgctgaaggtgctggagaccttcgtggcctgcatcatcttctag

SEQ ID NO: 109107 - DNA, 2610 bp, Artificial Sequence
  derived and/or modified sequence
atggccgccgtgcccacccagccccagagcaaggagggcccctggagccccgagagcgagagccccatgctgagaatcaccgcccccctgccccccggccccagcatggccgtgcccaccctgggccccggcgagatcgccagcaccaccccccccagcagagcctggacccccacccaggagggccccggcgacatgggcagaccctgggtggccgaggtggtgagccagggcgccggcatcggcatccagggcaccatcaccagcagcaccgccagcggcgacgacgaggagaccaccaccaccaccaccatcatcaccaccaccatcaccaccgtgcagacccccggcccctgcagctggaacttcagcggccccgagggcagcctggacagccccaccgacctgagcagccccaccgacgtgggcctggactgcttcttctacatcagcgtgtaccccggctacggcgtggagatcaaggtgcagaacatcagcctgagagagggcgagaccgtgaccgtggagggcctgggcggccccgaccccctgcccctggccaaccagagcttcctgctgagaggccaggtgatcagaagccccacccaccaggccgccctgagattccagagcctgcccccccccgccggccccggcaccttccacttccactaccaggcctacctgctgagctgccacttccccagaagacccgcctacggcgacgtgaccgtgaccagcctgcaccccggcggcagcgccagattccactgcgccaccggctaccagctgaagggcgccagacacctgacctgcctgaacgccacccagcccttctgggacagcaaggagcccgtgtgcatcgccgcctgcggcggcgtgatcagaaacgccaccaccggcagaatcgtgagccccggcttccccggcaactacagcaacaacctgacctgccactggctgctggaggcccccgagggccagagactgcacctgcacttcgagaaggtgagcctggccgaggacgacgacagactgatcatcagaaacggcgacaacgtggaggccccccccgtgtacgacagctacgaggtggagtacctgcccatcgagggcctgctgagcagcggcaagcacttcttcgtggagctgagcaccgacagcagcggcgccgccgccggcatggccctgagatacgaggccttccagcagggccactgctacgagcccttcgtgaagtacggcaacttcagcagcagcacccccacctaccccgtgggcaccaccgtggagttcagctgcgaccccggctacaccctggagcagggcagcatcatcatcgagtgcgtggacccccacgacccccagtggaacgagaccgagcccgcctgcagagccgtgtgcagcggcgagatcaccgacagcgccggcgtggtgctgagccccaactggcccgagccctacggcagaggccaggactgcatctggggcgtgcacgtggaggaggacaagagaatcatgctggacatcagagtgctgagaatcggccccggcgacgtgctgaccttctacgacggcgacgacctgaccgccagagtgctgggccagtacagcggccccagaagccacttcaagctgttcaccagcatggccgacgtgaccatccagttccagagcgaccccggcaccagcgtgctgggctaccagcagggcttcgtgatccacttcttcgaggtgcccagaaacgacacctgccccgagctgcccgagatccccaacggctggaagagccccagccagcccgagctggtgcacggcaccgtggtgacctaccagtgctaccccggctaccaggtggtgggcagcagcgtgctgatgtgccagtgggacctgacctggagcgaggacctgcccagctgccagagagtgaccagctgccacgaccccggcgacgtggagcacagcagaagactgatcagcagccccaagttccccgtgggcgccaccgtgcagtacatctgcgaccagggcttcgtgctgatgggcagcagcatcctgacctgccacgacagacaggccggcagccccaagtggagcgacagagcccccaagtgcctgctggagcagctgaagccctgccacggcctgagcgcccccgagaacggcgccagaagccccgagaagcagctgcaccccgccggcgccaccatccacttcagctgcgcccccggctacgtgctgaagggccaggccagcatcaagtgcgtgcccggccaccccagccactggagcgaccccccccccatctgcagagccgccagcctggacggcttctacaacagcagaagcctggacgtggccaaggcccccgccgccagcagcaccctggacgccgcccacatcgccgccgccatcttcctgcccctggtggccatggtgctgctggtgggcggcgtgtacttctacttcagcagactgcagggcaagagcagcctgcagctgcccagacccagacccagaccctacaacagaatcaccatcgagagcgccttcgacaaccccacctacgagaccggcagcctgagcttcgccggcgacgagagaatctag

SEQ ID NO: 109108 - DNA, 2610 bp, Artificial Sequence
  derived and/or modified sequence
atggcggccgttcctacccagccacaatcaaaagaaggcccttggagccctgaaagcgaatcaccaatgctccgcatcacggctccccttcccccggggccctctatggctgtgcccaccctgggtccgggcgaaatcgcaagcacaacaccaccatctcgggcatggacgcctacccaggaagggcccggcgacatgggaagaccatgggtggcggaagtagtgtctcaaggtgccggaatcggcatccagggcaccatcacctctagtaccgctagcggggacgatgaagagactactactacaacaactatcatcactacgactattaccaccgtgcaaactcccgggccttgcagctggaacttcagcggaccagaaggctcgcttgatagtcccaccgatctgagctcacccactgacgttgggttggactgtttcttctacatcagtgtctatccaggttacggcgttgaaataaaggtgcagaacattagcttacgggaaggagaaactgtcacagtggaaggactcggaggccctgaccctttaccacttgcaaaccaatcattcctgctaaggggccaggtcatccggagccccactcaccaggccgcacttcgcttccagtccctaccccctcccgccggacctggtactttccacttccattatcaagcatatctacttagttgccattttccccgacgcccggcttacggcgatgttactgtgacttcccttcaccccggaggatccgctcgatttcattgcgcaaccggataccaactaaagggcgcccgccacctaacctgcttaaatgcgactcaacctttttgggacagtaaggagccagtgtgcattgctgcctgcggcggcgtgatacgaaacgcaacaacagggagaattgtatctccagggtttcctggaaactactcaaacaatcttacatgtcactggttactagaagctccggaagggcaacggctacatctgcatttcgaaaaggtgagcctcgcagaagatgacgaccggttaattattcggaatggagataacgtggaagctcccccggtctacgactcctacgaggtggagtatttgcctatagaaggattgctttctagtggaaaacatttttttgtcgagctgtcaaccgactcttcaggggcagcggcaggcatggcactgaggtacgaagccttccagcagggccactgctacgaaccgttcgtgaaatacggcaactttagttcatcaacgcctacctacccagtgggaactacggttgagtttagttgtgacccgggttacacgttggaacaaggaagtattatcatcgaatgcgtggatccccacgatcctcagtggaacgaaacagaaccagcatgtcgagcagtgtgcagcggagagattacagactccgccggggtcgtgctatctcccaattggcctgagccatacggacggggacaagattgcatatggggagtgcacgttgaggaggacaagcgaatcatgctggacatcagagttctgcgcattgggcctggagacgtcctcaccttttacgacggggatgatctcacggcacgggttcttggccagtattccggaccacgcagccacttcaaacttttcacttccatggcagacgtaactatacaatttcagagcgacccaggcacgtctgtgctgggctaccagcagggcttcgtgatccacttttttgaagtcccccgcaatgacacctgcccagagctgcctgaaattcccaatggttggaagagtccatcacagccagaactcgtgcacggaaccgtcgtgacataccagtgttatcctggctaccaagtcgtgggctcctctgtcctcatgtgtcaatgggacctgacctggagcgaagatctgccctcttgtcaacgggtgacgagctgccatgatcccggagatgtcgagcattcccgtcgcctgattagctctcccaagttcccagttggcgcgacagttcagtacatttgcgaccagggcttcgtgctaatggggagctctatccttacatgtcatgatagacaggctggttcacctaaatggagcgatagagctccaaaatgtctgctggaacagctgaaaccctgccacggtctttccgccccagaaaatggggcaaggagtcccgagaaacagttacatcctgcaggagcaacaattcacttcagttgcgcgccaggatatgtcttgaaggggcaggccagcatcaagtgcgttcccggtcatccatctcactggtcggatcctccccccatctgtcgcgctgccagtctggatggcttctacaactccaggagtctggatgtggccaaggcgcccgcagctagcagcactctggacgcagcgcacatagctgccgcaatttttctgcccctggtggccatggtgctcctggttgggggcgtgtatttttacttctctaggctccaagggaaatcaagtctccagctaccacgccctcggccaagaccttacaataggattacaatagagtccgccttcgacaaccctacttatgaaaccggatccctgtctttcgccggagacgagcggatatag

SEQ ID NO: 109109 - DNA, 2610 bp, Artificial Sequence
  derived and/or modified sequence
atggctgctgtgcccacccagccccagagcaaggagggcccctggagccctgagagcgagagccccatgctgcgcatcacagcccccctgcccccaggccccagcatggctgtgcccaccctgggccctggagagatcgccagcaccaccccacccagccgggcctggacccccacccaggagggccctggggacatgggccggccctgggtggccgaggtggtgtcccagggcgccggcatcggcatccagggcaccatcaccagcagcacagccagcggagatgatgaggagaccaccaccaccaccaccatcatcaccaccaccatcaccaccgtgcagaccccaggcccctgctcctggaacttcagcggccctgagggcagcctggacagccccacagacctgagcagccccacagatgtgggcctggactgcttcttctacatctctgtgtacccaggctacggcgtggagatcaaggtgcagaacatcagcctgcgggagggggagaccgtgacagtggagggcctgggcggccctgaccccctgcccctggccaaccagagcttcctgctgcggggccaggtgatccgcagccccacccaccaggccgccctgcgcttccagagcctgcccccacctgctggccctggcaccttccacttccactaccaggcctacctgctgagctgccacttcccccggcggcctgcctatggagatgtgacagtgaccagcctgcaccctgggggcagcgcccgcttccactgtgccaccggctaccagctgaagggggcccggcacctgacctgcctgaatgccacccagcccttctgggacagcaaggagcctgtgtgcatcgccgcctgtggcggcgtcatcagaaatgccaccaccggcagaattgtgtccccaggcttccctggcaactacagcaacaacctgacctgccactggctgctggaggcccctgagggccagaggctgcacctgcactttgagaaggtgtccctggctgaagatgatgacaggctcatcatcagaaatggagacaacgtggaggcccctcctgtgtatgacagctatgaggtggagtacctgcccatcgagggcctgctgagcagcggcaagcacttctttgtggagctgagcacagacagcagtggagctgctgctggcatggccctgcgctatgaggccttccagcagggccactgctatgagccctttgtgaagtatggcaacttcagcagcagcacccccacctaccctgtgggcaccaccgtggagttcagctgtgaccccggctacaccctggagcagggcagcatcatcattgaatgtgtggacccccatgacccccagtggaatgaaacagagcccgcctgcagagctgtgtgcagcggggagatcacagattctgctggggtggtgctgagccccaactggccagagccctacggccggggccaggactgcatctggggcgtgcacgtggaggaggacaagaggatcatgctggacatccgggtgctgagaattggccctggagatgtgctgaccttctatgatggagatgacctgacagcccgggtgctgggccagtacagcggccccaggagccacttcaagctgttcacctccatggctgatgtgaccatccagttccagagcgaccccggcacctctgtgctgggctaccagcagggcttcgtcatccacttctttgaggtgcccagaaatgacacctgcccagagctgcctgagatccccaacggctggaagagccccagccagcctgagctggtgcatggaacagtggtgacctaccagtgctacccaggctaccaggtggtgggcagctctgtgctgatgtgccagtgggacctgacctggagcgaggacctgcccagctgccagagggtgaccagctgccacgaccctggagatgtggagcacagccggcggctcatcagcagccccaagtttcctgtgggcgccaccgtgcagtacatctgtgaccagggctttgtgctgatgggcagcagcatcctgacctgccacgaccggcaggccggcagccccaagtggagcgaccgggcccccaagtgcctgctggagcagctgaagccctgccacggcctgagcgccccagaaaatggagcccggagccctgagaagcagctgcaccctgctggggccaccatccacttcagctgtgcccctggctacgtgctgaagggccaggccagcatcaagtgtgtgcccggccaccccagccactggagcgaccccccacccatctgccgggccgccagcctggatggcttctacaacagccgcagcctggatgtggccaaggccccagctgccagcagcaccctggatgctgcccacatcgctgctgccatcttcctgcccctggtggccatggtgctgctggtgggcggcgtgtacttctacttcagccggctgcagggcaagagcagcctgcagctgccccggccccggccccggccctacaaccgcatcaccattgaaagtgcctttgacaaccccacctatgagaccggcagcctgagctttgctggagatgagcgcatctag

SEQ ID NO: 109110 - DNA, 2610 bp, Artificial Sequence
  derived and/or modified sequence
atggccgccgtgcccacccagccccagagcaaggagggcccctggtccccggagagcgagagtccaatgctccggatcacggcccctctgcccccggggcctagtatggcagttcccactctaggacccggggaaattgcatcaactaccccgccctcccgggcgtggacaccaacacaagagggacctggagacatgggcagaccctgggttgctgaagtggtgtctcagggagccggaatagggatccaaggcactatcacgagcagtactgcgtctggtgatgacgaggaaaccactacaactaccaccattataacaaccactatcaccactgtgcagacaccaggcccatgtagttggaacttctccgggcccgaggggtctctggacagtccgaccgacctctcttcgcccacagacgtgggcctggattgctttttttacataagtgtgtatcccggttacggggtggaaatcaaggtgcaaaacatctcactccgggagggcgaaaccgttactgtcgaggggttgggcggccccgaccctttgcctttggcaaatcaatccttcttactccggggacaggtaatcaggtctcctactcaccaggcggcgttgcgtttccagagtctcccccccccagccggccccggaaccttccatttccattatcaggcttatcttctctcctgccattttccaaggaggccggcatacggcgacgtcacggtaacttcgctgcaccctggcgggagtgcaagattccattgcgccaccgggtaccagttaaaaggggcccgtcacttaacttgtttgaatgctacacagccattctgggacagcaaagagccggtttgcatcgccgcctgcggaggagttatcaggaatgccaccacaggaagaatagtctccccgggcttccccggcaattattcaaataacctcacctgtcactggttactggaagccccagaaggtcagagactgcatcttcacttcgaaaaagtctccctggctgaagatgatgaccgactgatcatcaggaatggagacaatgttgaggccccgcccgtatatgacagttatgaagtggagtacttgcctattgaaggacttctttcctctgggaagcatttcttcgtcgaactctcaaccgacagctccggtgccgcagcggggatggccctgcgctacgaggctttccagcagggccattgctatgagcccttcgttaagtacgggaatttttctagcagcactcccacttaccctgtgggtacaaccgtggaattcagctgcgatcctggatacaccctcgagcaggggtctatcataatcgaatgtgttgacccccatgacccccaatggaacgaaactgagcccgcctgcagggccgtgtgctctggtgaaatcaccgactctgcaggtgtggtcctcagcccaaattggcccgagccttacggcagaggacaggactgcatatggggcgtccacgtcgaagaggataagaggattatgctggacatcagggtgttgcgaattgggcccggtgatgtgctcaccttttacgatggagacgatctgaccgctcgtgtactaggtcagtattctggcccgaggagtcactttaaactttttacaagtatggcagatgtcacaatacaattccagagtgacccaggaactagcgttctcggctaccagcaggggttcgtcatccacttttttgaggtcccccgcaacgatacatgcccggaactccccgaaatcccgaacggttggaagtccccaagccagcccgagttggtccatgggactgtggtgacgtatcagtgctaccctggataccaggtggttggatcttccgtgctcatgtgtcaatgggacctaacctggtcagaggacttgccaagttgccagcgggtgacaagctgccacgaccccggggatgtcgagcattccaggaggctgattagctctcccaaatttcccgtgggcgctactgtccagtatatatgtgaccaggggttcgttcttatgggttcctctatcctaacgtgtcacgaccggcaagctggatccccgaagtggtcagaccgggctcctaagtgccttctggaacagttaaaaccgtgccatggactgtccgcgcccgagaacggtgctcggtcaccagagaaacaattacaccccgccggtgctaccattcatttctcttgcgcccctgggtatgtgttgaaaggacaggcttccatcaagtgtgtgccaggccaccctagtcactggtctgatccgcctcctatctgccgcgctgcgagtttagacggtttttataactcccgctcactggatgtcgctaaagccccggccgcttccagtactttggacgccgcccacattgcagcagcaatatttctccctcttgtggcaatggtgctgctagtcggcggtgtatatttctattttagcaggctccagggaaaatcgtcactacagctccctaggccacggcccagaccttataatcggataactatcgagtccgctttcgacaatcctacttacgaaacaggcagtctgtcattcgccggtgacgagaggatttag

SEQ ID NO: 109111 - DNA, 2610 bp, Artificial Sequence
  derived and/or modified sequence
atggctgccgtgcccacacagcctcagtctaaggaaggaccttggtctccagagagcgaatcaccaatgctgcggatcaccgctccacttccccctggaccgagtatggccgtgccaactctcgggcctggcgagattgccagcactacccccccttcccgtgcgtggacacccacacaggagggcccaggggatatgggccgaccttgggtggccgaggtcgtgtcgcaaggagcagggatcgggatccaggggaccatcacctcttcgacagcctccggggacgacgaggagaccaccacaactactacaatcattacgactacaataacgaccgtgcaaacccctggcccttgtagttggaacttcagcgggcctgaggggtctctcgacagtccgacagatctgagtagccccaccgatgtgggcctggactgcttcttctacataagcgtgtatcccggatatggcgttgaaattaaagtgcagaacatttctttgcgagagggggagacagtaaccgtggaaggcctcggaggacccgatcccctgcccctagctaaccagagctttctgttgcggggtcaagtgatcaggagccccactcaccaagctgccctgagatttcagtccttaccccctccggctgggcctggaacgttccattttcactaccaggcatacctactgtcttgccacttccctcgcaggcccgcatacggcgatgtcacagtgactagtctgcaccccggagggtcggctcgattccactgcgccactgggtatcagctgaaaggcgcacggcaccttacatgtctgaacgccacccagcctttctgggatagcaaagaaccagtgtgtattgccgcttgcggcggtgtgatccgcaacgcaacaacaggcagaatcgtgtctccaggatttccgggaaactattctaacaatttgacatgccattggctccttgaagcccctgagggtcagaggctgcatctccactttgagaaagtgtctctcgccgaagatgatgatagacttattattaggaacggtgacaatgtggaagccccacccgtctatgattcttacgaggtggaatacctgcccatcgaaggtctactgagctctggaaagcacttctttgtagaactctccaccgatagtagcggtgccgctgctggaatggccctgaggtatgaagcttttcagcagggccattgttatgagccatttgtgaaatacgggaatttttcctccagcacacctacgtacccagtagggacaactgtcgagttttcgtgcgatccgggatacacacttgagcaaggaagcatcattattgagtgcgttgacccacacgacccgcaatggaacgagacagaaccagcctgccgggctgtctgtagcggcgagattacggacagcgccggtgtggttctgtcccctaattggcctgaaccatatggccgtggccaggactgtatttggggcgtccacgtggaggaggacaaaaggattatgctcgacatacgtgtcctgaggatcggacccggagacgtgctcacgttttacgatggcgatgatcttacggcgcgagtactggggcaatattctggtcctagatctcacttcaagctattcacaagcatggccgacgtgaccatccagttccaaagtgacccaggcactagcgttcttggatatcagcagggcttcgtcattcacttctttgaggttcctaggaacgacacatgccctgaattaccggagatccccaacggctggaagtctccttcacaaccagaactggtgcacggaaccgtggtcacttatcagtgctatccgggatatcaggtcgttggaagctcggtgctcatgtgccaatgggacttgacctggagtgaggaccttccttcctgtcagcgcgtgacgagttgtcatgatccgggagacgtggaacactcgaggcgcctgatctcttcgcccaagtttccagtaggcgctaccgtgcaatatatatgcgaccaggggttcgttctgatgggctcttcaatcctcacctgtcatgatcggcaggccggtagcccaaaatggagcgatagggccccaaagtgcctgctggagcagctgaaaccttgccatggtctgagtgctccggagaacggggcacgtagtccagagaaacaactgcatcccgcaggagccaccatacatttctcctgcgcccctggttacgtcctcaagggtcaggccagtatcaaatgcgtgcctggacatccgtcgcactggagcgatcccccaccgatctgcagggcagctagcctggacggattctacaatagcagaagtctggacgttgccaaagcaccagccgcaagcagcacattggatgccgctcatattgcagcagctatcttcctgcccctggtggctatggtattgttggttggaggagtgtatttctactttagcagactgcaaggcaaaagcagtttgcagctgccacgaccacggccacgaccgtataataggatcaccatagaatccgccttcgataatcccacatatgaaacagggtcgctgtcatttgccggagacgaaaggatatag

SEQ ID NO: 109112 - DNA, 285 bp, Artificial Sequence
  derived and/or modified sequence
atgcggaagctgagactcagagcttccaacccaggccccagcggagctcctggcacccggcagcacttctccacttccaggggtggccatcactgtgcccgtcgctggctccggagagtaaggaggtcacggtcgcaaaccccctcctatcagaatctggaccccaatcctccaatcgttaggttccctctgcccttggaaaggatctctgaggtgccaaggcgggcttgcttacatgggagagatgcgtctagtgtttggccgccacccgaacgtagcgattag

SEQ ID NO: 109113 - DNA, 609 bp, Artificial Sequence
  derived and/or modified sequence
cagggacgtgtctgtgcttttgcatgtgaccagggttgactaaactcctgccaggatgtcttgccagcaaaaccagcagcagtgccagccccctcccaaatgtcctcccaagtgtaccccaaaatgtccacctaagtgtccccccaaatgcccaccacagtgcccagctccatgttcccctgcagtctcttcctgctgtggtcccagctctgggagctgctgtggtcccagctctgggggctgctgcagctctgggggtggtggctgctgcctgagccaccacaggccccgtctcttccaccggcgccggcaccagagccccgattgctgtgagagtgaaccttctggggcctctggctgctgccacagctctgggggctgctgctgacctgggctgcagaagagctctggtactgaatggtcaaaaacctgctacagcctgatgcttaactatttccccttcctttcattccactcatgggtggacagggaccacaaagactcatggggcttccccagaactttgtgcttgatggagcaccccagatggaagccttctttttctcctttacctcatattgtaataaagctctgatttctgactcttta

SEQ ID NO: 109114 - DNA, 2745 bp, Artificial Sequence
  derived and/or modified sequence
atgttccccgtgttcagcggctgcttccaggagctgcaggagaagaacaagagcctggagctggtgagcttcgaggaggtggccgtgcacttcacctgggaggagtggcaggacctggacgacgcccagagaaccctgtacagagacgtgatgctggagacctacagcagcctggtgagcctgggccactacatcaccaagcccgagatgatcttcaagctggagcagggcgccgagccctggatcgtggaggagacccccaacctgagactgagcgccgtgcagatcatcgacgacctgatcgagagaagccacgagagccacgacagattcttctggcagatcgtgatcaccaacagcaacaccagcacccaggagagagtggagctgggcaagaccttcaacctgaacagcaaccacgtgctgaacctgatcatcaacaacggcaacagcagcggcatgaagcccggccagttcaacgactgccagaacatgctgttccccatcaagcccggcgagacccagagcggcgagaagccccacgtgtgcgacatcaccagaagaagccacagacaccacgagcacctgacccagcaccacaagatccagaccctgctgcagaccttccagtgcaacgagcagggcaagaccttcaacaccgaggccatgttcttcatccacaagagagtgcacatcgtgcagaccttcggcaagtacaacgagtacgagaaggcctgcaacaacagcgccgtgatcgtgcaggtgatcacccaggtgggccagcccacctgctgcagaaagagcgacttcaccaagcaccagcagacccacaccggcgagaagccctacgagtgcgtggagtgcgagaagcccagcatcagcaagagcgacctgatgctgcagtgcaagatgcccaccgaggagaagccctacgcctgcaactggtgcgagaagctgttcagctacaagagcagcctgatcatccaccagagaatccacaccggcgagaagccctacggctgcaacgagtgcggcaagaccttcagaagaaagagcttcctgaccctgcacgagagaacccacaccggcgacaagccctacaagtgcatcgagtgcggcaagaccttccactgcaagagcctgctgaccctgcaccacagaacccacagcggcgagaagccctaccagtgcagcgagtgcggcaagaccttcagccagaagagctacctgaccatccaccacagaacccacaccggcgagaagccctacgcctgcgaccactgcgaggaggccttcagccacaagagcagactgaccgtgcaccagagaacccacaccggcgagaagccctacgagtgcaacgagtgcggcaagcccttcatcaacaagagcaacctgagactgcaccagagaacccacaccggcgagaagccctacgagtgcaacgagtgcggcaagaccttccacagaaagagcttcctgaccatccaccagtggacccacaccggcgagaagccctacgagtgcaacgagtgcggcaagaccttcagatgcaagagcttcctgaccgtgcaccagagaacccacgccggcgagaagccctacgcctgcaacgagtgcggcaagacctacagccacaagagctacctgaccgtgcaccacagaacccacaccggcgagaagccctacgagtgcaacgagtgcggcaagagcttccactgcaagagcttcctgaccatccaccagagaacccacgccggcaagaagccctacgagtgcaacgagtgcgagaagaccttcatcaacaagctgaacctgggcatccacaagagaacccacaccggcgagagaccctacgagtgcaacgagtgcggcaagaccttcagacagaagagcaacctgagcacccaccagggcacccacaccggcgagaagccctacgtgtgcaacgagtgcggcaagaccttccacagaaagagcttcctgaccatccaccagagaacccacaccggcaagaacagaatggacgtgatgaacgtggagaagctgttcgtgagaaaccacaccctgctgtacatcagagagctgacccccggcaagagccccatgaacgtgatgaacgtggagaaccccttcatcagaagacagatcttcagaagcatcaaggtgttcaccagaggcagaaaccccatgaacgtggccaacgtggagaagccctgccagaagagcgtgctgaccgtgcaccacagaacccacaccggcgagaagccctacgagtgcaacgagtgcggcaagaccttctgccacaagagcaacctgagcacccaccagggcacccacagcggcgagaagccctacgagtgcgacgagtgcagaaagaccttctacgacaagaccgtgctgaccatccaccagagaacccacaccggcgagaagcccttcgagtgcaaggagtgcagaaagaccttcagccagaagagcaagctgttcgtgcaccacagaacccacaccggcgagaagcccttcagatgcaacgagtgcagaaagaccttcagccagaagagcggcctgagcatccaccagagaacccacaccggcgagaagccctacgagtgcaaggagtgcggcaagaccttctgccagaagagccacctgagcagacaccagcagacccacatcggcgagaagagcgacgtggccgaggccggctacgtgttcccccagaaccacagcttcttcccctag

SEQ ID NO: 109115 - DNA, 2745 bp, Artificial Sequence
  derived and/or modified sequence
atgtttcccgtattctctggctgctttcaggaacttcaggagaaaaacaaaagtctggagctagtgtcctttgaagaagttgccgtccacttcacatgggaggaatggcaggatcttgacgatgctcagcgcaccttatatagagacgtcatgttagaaacttatagctctttggtgtctctagggcattacattaccaaacccgaaatgatttttaagttggaacagggagctgagccatggattgtggaggagaccccaaacctgcgtctgagcgcagtgcagataattgacgaccttatcgagaggagccacgaatctcacgaccgttttttttggcaaattgtaattaccaattcaaacacatcaacacaagagagggtcgagcttggaaagaccttcaacctgaacagcaatcacgtgttgaatctgattatcaacaacggtaacagcagtggaatgaaaccgggccagttcaatgactgccagaacatgctttttcctatcaaacccggcgagacccagagtggggagaaacctcacgtgtgtgatatcacccggagatctcatagacaccacgagcaccttacacaacaccacaagattcagacactgctgcaaacttttcagtgcaacgagcagggcaaaacgttcaacacagaggcaatgttttttattcataagcgggttcacatagtccaaacttttggtaagtataacgagtatgaaaaagcatgcaacaatagcgcagttatcgttcaggtgatcacacaggttggacagcctacatgttgtcggaagtcggactttacaaagcatcagcaaacgcataccggcgagaagccctatgagtgcgtggagtgtgaaaaaccttccatctcgaagtccgatcttatgcttcagtgtaagatgccgactgaagaaaagccttatgcttgcaattggtgcgagaaactgtttagctacaagtccagccttatcattcatcagcggattcacacgggcgagaagccatatggctgtaatgagtgtggcaaaaccttcaggagaaaaagctttttgacacttcacgagaggacccacactggagataagccctataaatgtatagagtgcggtaagaccttccactgcaaatcgcttctcaccctacaccatagaactcattcgggagaaaagccgtaccaatgctccgagtgtggcaagacattctctcaaaagtcttatctgaccattcaccatcggactcataccggggagaagccctacgcttgtgaccattgtgaagaagctttcagtcataagtcaaggctgactgtacaccaacgcactcacacaggcgaaaagccctatgagtgcaatgagtgtggcaagccctttattaacaagtccaacctgcgcctccatcagagaactcatacaggggagaaaccctatgagtgtaacgaatgtggcaagaccttccacagaaaatccttcctgaccatccatcagtggacacacaccggggagaagccttacgaatgcaacgagtgcggtaaaacattccgctgtaaatcgttcctgacagtgcaccagcgaacacacgctggagagaagccctatgcctgtaacgaatgcggcaaaacctatagtcacaaaagctacctcactgtacaccatagaacacacaccggagagaagccatatgaatgcaacgaatgtggcaaatctttccactgcaagtccttcctcaccatccatcagcgcactcacgctggcaagaagccctatgagtgcaatgagtgtgagaagacattcattaacaagcttaatttgggaattcacaagcggacccatacgggcgagcgtccgtatgagtgcaacgaatgtggcaagacgtttcgacagaagtccaatctcagtactcatcaaggcacccatacaggggagaaaccctatgtctgcaatgagtgtgggaaaacctttcacaggaaaagctttctcacaatccatcagaggactcatactgggaaaaacaggatggacgtgatgaacgttgaaaagctgtttgtgcgcaatcacactctcctctacattcgtgagctgacacccggaaagtcccctatgaatgtgatgaatgtggaaaacccttttattcgtagacagatatttaggtccatcaaagtgtttacccgcgggcgcaacccaatgaacgtcgccaacgtggagaagccatgccagaaatctgtgttgacagtccaccaccggacccataccggggagaaaccttatgagtgtaacgagtgtggcaagaccttctgccataaatcaaacctctctacacatcagggcacccattctggggaaaagccctatgaatgtgacgagtgcaggaagaccttttatgacaagactgtgctgactattcaccaaagaacacacacgggcgaaaagccttttgaatgcaaagagtgccgcaaaacattcagccagaagagtaaattgtttgtccaccaccggacccacactggcgagaagccgtttcgctgcaacgagtgccgaaagaccttctctcagaagtctggtctgtccatccaccaacgaacacataccggcgagaagccttatgagtgcaaggagtgtggtaagacattctgtcagaagagtcacctttctcgccaccagcagactcatataggggagaagtctgatgtggcggaggcgggatacgtgttcccccagaaccactcgttttttccttag

SEQ ID NO: 109116 - DNA, 2745 bp, Artificial Sequence
  derived and/or modified sequence
atgtttcctgtgttcagcggctgcttccaggagctgcaggagaagaacaagagcctggagctggtgtcctttgaggaggtggccgtgcacttcacctgggaggagtggcaggacctggatgatgcccagaggaccctgtacagagatgtgatgctggagacctacagcagcctggtgtccctgggccactacatcaccaagccagagatgatcttcaagctggagcagggcgctgagccctggatcgtggaggagacccccaacctgcggctgtctgctgtgcagatcattgatgacctgattgaaagaagccatgagagccatgaccgcttcttctggcagatcgtcatcaccaacagcaacaccagcacccaggagcgggtggagctgggcaagaccttcaacctgaacagcaaccacgtgctgaacctgatcatcaacaacggcaacagcagcggcatgaagccaggccagttcaatgactgccagaacatgctgttccccatcaagccaggagagacccagagcggggagaagccccacgtgtgtgacatcaccaggaggagccaccgccaccacgagcacctgacccagcaccacaagatccagaccctgctgcagaccttccagtgcaatgagcagggcaagaccttcaacacagaggccatgttcttcatccacaagagggtgcacatcgtgcagaccttcggcaagtacaatgaatatgagaaggcctgcaacaacagcgctgtgattgtgcaggtgatcacccaggtgggccagcccacctgctgcaggaagagtgacttcaccaagcaccagcagacccacactggagagaagccctatgaatgtgtggagtgtgagaagcccagcatcagcaagagtgacctgatgctgcagtgcaagatgcccacagaggagaagccctatgcctgcaactggtgtgagaagctgttctcctacaagagcagcctcatcatccaccagaggatccacactggagagaagccctacggctgcaatgaatgtgggaagaccttccggaggaagagcttcctgaccctgcacgagaggacccacactggagacaagccctacaagtgcattgaatgtgggaagaccttccactgcaagagcctgctgaccctgcaccacaggacccacagcggggagaagccctaccagtgcagtgaatgtgggaagaccttcagccagaagagctacctgaccatccaccacaggacccacactggagagaagccctatgcctgtgaccactgtgaggaggccttcagccacaagagccggctgactgtgcaccagaggacccacactggagagaagccctatgagtgcaatgaatgtgggaagcccttcatcaacaagagcaacctgcggctgcaccagaggacccacactggagagaagccctatgagtgcaatgaatgtgggaagaccttccacaggaagagcttcctgaccatccaccagtggacccacactggagagaagccctatgagtgcaatgaatgtgggaagaccttccgctgcaagagcttcctgactgtgcaccagaggacccacgccggggagaagccctatgcctgcaatgaatgtgggaagacctacagccacaagagctacctgactgtgcaccacaggacccacactggagagaagccctatgagtgcaatgaatgtgggaagagcttccactgcaagagcttcctgaccatccaccagaggacccacgccggcaagaagccctatgagtgcaatgaatgtgagaagaccttcatcaacaagctgaacctgggcatccacaagaggacccacactggagagcggccctatgagtgcaatgaatgtgggaagaccttccggcagaagagcaacctgagcacccaccagggcacccacactggagagaagccctacgtgtgcaatgaatgtgggaagaccttccacaggaagagcttcctgaccatccaccagaggacccacacaggcaagaacaggatggatgtgatgaatgtggagaagctgtttgtgaggaaccacaccctgctgtacatccgggagctgacccctgggaagagccccatgaatgtgatgaatgtggagaaccccttcatccggcggcagatcttccgcagcatcaaggtgttcacccggggcaggaaccccatgaatgtggccaacgtggagaagccctgccagaagtctgtgctgactgtgcaccacaggacccacactggagagaagccctatgaatgtaatgaatgtgggaagaccttctgccacaagagcaacctgagcacccaccagggcacccacagcggggagaagccctatgaatgtgatgagtgcaggaagaccttctatgacaagacagtgctgaccatccaccagaggacccacactggagagaagccctttgagtgcaaggagtgcaggaagaccttcagccagaagagcaagctgtttgtgcaccacaggacccacactggagagaagcccttccgctgcaatgaatgtaggaagaccttcagccagaagagcggcctgagcatccaccagaggacccacactggagagaagccctatgagtgcaaggaatgtgggaagaccttctgccagaagagccacctgagccgccaccagcagacccacatcggggagaagagtgatgtggccgaggccggctacgtgttcccccagaaccacagcttcttcccctag

SEQ ID NO: 109117 - DNA, 2745 bp, Artificial Sequence
  derived and/or modified sequence
atgttccccgtgttcagcggctgcttccaggagctgcaggagaagaataaaagcctggaactggtctctttcgaggaagttgctgttcacttcacttgggaagagtggcaggatttggatgatgcccagcgcacattgtaccgcgacgtcatgctggagacatattcctctctcgtgtcactggggcactacattacaaaaccagagatgatttttaagctcgagcagggcgccgaaccatggatagtggaggaaacacctaatctccgtctgagcgcggtgcaaatcatagacgatctgatagagcggtcacacgagtcccatgacagattcttttggcagattgtaattacgaatagcaatacatctacccaggagcgcgtagagttgggaaaaacctttaatctgaacagcaatcatgtgctgaatctcatcattaacaatggaaattcgagtggcatgaagcccggacaatttaacgactgtcaaaatatgctttttccaataaagcctggcgaaactcagagtggcgagaaaccccatgtctgcgatataaccagacgctcgcacaggcaccacgaacatctgacccagcaccacaagattcaaaccctgttgcagaccttccagtgcaacgaacagggtaagaccttcaacacagaagccatgttttttatacacaaacgcgtgcacatagtccagacctttgggaagtacaatgagtacgagaaggcgtgcaataacagtgccgtgatagtgcaggtaattacccaagtgggccagcccacctgttgtcgtaagagcgattttacaaagcaccagcagactcacacaggggaaaagccatacgagtgcgtagaatgcgagaagccttccataagtaaaagtgacctgatgctgcagtgtaagatgccaactgaggagaagccttacgcttgcaactggtgcgaaaagctgttcagctacaaatctagcttgattatccatcagcgaattcacacaggtgagaagccctacggctgcaatgagtgcggcaagactttccgtcgtaaaagctttctgactctgcacgagagaacccataccggcgataagccgtataaatgtatcgagtgcggcaaaacgttccattgcaagtctcttttgaccttgcatcaccgaacccattctggcgaaaagccttaccagtgcagtgaatgtgggaaaactttttctcagaaaagctatcttacaatccaccacaggactcacacaggagagaaaccctatgcttgcgaccactgcgaggaagccttctcccataaatcgcgactcactgtgcaccaaagaactcatacgggcgagaaaccgtatgagtgcaacgagtgcggcaagccgttcataaacaaaagcaaccttcgtttgcaccaaaggacccataccggagaaaagccctacgagtgcaatgaatgcgggaagaccttccacaggaagagttttctgactattcaccaatggacacacaccggcgagaagccatacgagtgcaatgaatgcggaaagacatttcgttgtaagtctttcctcactgttcaccaaaggacgcacgccggcgagaaaccatatgcctgcaacgaatgtggaaaaacctactcacataaaagctacttaaccgtccatcacaggactcacacgggtgagaagccctacgaatgtaatgagtgcgggaagtcatttcattgcaagtcattccttaccatccaccaaagaacacacgcgggcaaaaagccttacgagtgtaacgaatgtgagaagacgtttattaataagctgaacctcggaattcacaaacgaacacataccggcgaacgcccatacgagtgcaatgagtgcgggaagacctttcggcagaaaagcaacttgtccacacatcaggggacacacacgggggaaaagccatatgtatgtaatgaatgcgggaagactttccacaggaagagtttcctcacgatacatcagcggacgcacacaggcaaaaatcgaatggacgtgatgaacgttgagaagttatttgtgaggaaccacaccctgctgtatatcagagagcttacgcctggaaagagcccaatgaacgtgatgaatgtggagaacccctttatccgaagacagatctttcggagtattaaagtctttactcgaggtcgtaatcccatgaacgtcgccaatgttgagaagccatgccagaagagcgtgctgaccgtgcatcaccgcactcataccggcgaaaaaccgtacgagtgtaacgaatgtggcaaaacattctgccacaagagcaacctctcaacacaccagggtacacatagtggggagaaaccttacgaatgtgacgagtgtcggaagactttctatgacaagaccgttttaacaattcatcagagaacacacaccggtgaaaaaccatttgagtgcaaagaatgcagaaaaactttttcgcagaagagcaagctgtttgttcatcaccggacgcacacaggggagaagccgtttaggtgcaatgaatgtcggaaaacattctcccagaagagcgggctttccatccatcagagaacccacaccggtgaaaaaccctacgagtgtaaagaatgcgggaaaacattttgtcagaagagtcatctaagtcgacaccagcaaacccatattggggaaaaatctgatgtggctgaagcagggtatgtcttcccacagaaccactcattcttcccatag

SEQ ID NO: 109118 - DNA, 2745 bp, Artificial Sequence
  derived and/or modified sequence
atgtttcccgtattttctggatgcttccaggagttgcaggaaaagaacaagagcctggaattagtgtctttcgaggaagtggccgtccattttacatgggaggagtggcaagatcttgacgatgcccagaggactctgtaccgcgacgtaatgctcgagacatacagttcactggtctctctgggacactatatcaccaaaccggagatgatcttcaagcttgaacagggagcggaaccgtggattgtggaggaaacccccaacctcaggctttctgccgtccaaataattgatgacctcatcgaaagatcccatgaatctcacgatcggtttttctggcaaattgtaatcaccaattcaaacacctcgactcaggagcgtgtcgaactggggaagacttttaacttgaacagtaatcatgtcctgaatctgataatcaacaacggaaactctagcgggatgaagcctggacagttcaatgactgtcagaacatgctattccccatcaagcccggtgagacccagagtggcgagaagccacatgtgtgcgacatcacaaggagaagccaccgccaccacgaacatcttactcagcatcataaaatccaaactctgcttcagacttttcaatgtaatgagcagggaaaaacgtttaacacagaagcaatgtttttcatccacaaacgggttcatatcgtgcagacctttggaaagtataacgagtatgaaaaggcctgtaataattcagcagtgatagttcaggtgatcactcaggtgggacagccaacatgctgtaggaagtcggatttcacaaagcaccagcaaacccacactggagagaagccctatgagtgtgtggaatgtgagaaaccctctatcagtaaatcagacctgatgctgcagtgtaaaatgccaactgaagagaagccctatgcctgcaactggtgcgagaaactcttcagctacaagtcatccctgattatccatcagcggattcacactggagaaaaaccctacggatgtaacgaatgtggtaaaacttttagacgtaaaagttttcttacccttcatgagcgcacacacactggcgataaaccatacaagtgcatcgagtgcggaaaaactttccactgcaaatccctgctgaccctgcatcatagaactcattctggcgaaaaaccttaccagtgctcagagtgtggcaaaacgttctcccagaaaagctacctgacaatccatcacaggactcataccggcgagaagccatacgcctgtgaccactgtgaggaggcctttagccacaagtcacgcttgactgtccaccagcggacgcatacaggggaaaagccctatgagtgtaacgagtgcggtaaaccgtttatcaacaaatccaatttacgcctccaccagcggactcacacaggcgagaaaccttacgagtgtaacgaatgtgggaaaacatttcatcggaaatccttccttactattcatcaatggacacacaccggggagaagccatacgaatgtaacgagtgtggtaagacctttaggtgcaaatccttcctaactgtgcaccaaaggacccatgccggagagaagccctatgcgtgcaatgaatgtggcaaaacttactcccataaaagctatctcacggttcatcacagaacccacactggtgagaagccctacgagtgcaatgaatgtgggaaatcctttcactgcaagtcatttctgactattcaccaacggactcacgccggtaagaaaccctacgagtgcaacgagtgtgagaaaacttttattaataagctcaatttggggattcataagagaacacacacgggtgaacgaccatacgagtgtaatgagtgcggaaaaacattccggcagaagtcaaatttgtctacacatcagggaactcacactggcgagaagccttacgtttgtaatgagtgtggcaaaacttttcaccgcaagtcatttctgaccatccaccagagaacccatacaggcaaaaatagaatggacgtcatgaacgtcgagaaactcttcgttcgcaatcataccctgttgtatattcgcgaattgaccccagggaaatcaccaatgaacgtgatgaacgtggagaatccgttcattcgacgtcagattttccggtctatcaaagtgtttacccggggacgcaaccccatgaatgtggcaaatgttgagaaaccgtgccagaagagcgtcctcacggtgcatcaccgcacacacacaggcgagaagccctacgagtgtaatgagtgcggtaagacattttgtcataagtccaacctatcaacccaccaggggacacatagcggtgaaaagccttatgagtgcgatgagtgtcgtaaaaccttctatgataaaacagtgctgactattcatcaaagaacacacaccggagagaaaccttttgaatgcaaagaatgccgaaagacctttagtcagaaatccaagttgttcgtccatcacaggactcacacaggcgaaaagccattcaggtgcaatgagtgcaggaaaacctttagccagaagtctggcctatctatccaccagcgcactcacactggagagaaaccttacgagtgcaaagaatgcggcaaaaccttttgccagaaatcccatttgtccaggcatcagcaaacacacatcggcgagaagagtgatgtagccgaggcaggctacgtgtttcctcagaaccattcattcttcccatag

SEQ ID NO: 109119 - protein, 355 aa, Artificial Sequence
  derived and/or modified sequence
MEEGERSPLLSQETAGQKPLSVHRPPTSGCLGPVPREDQAEAWGCSCCPPETKHQALSGTPKKGPAPSLSPGSSCVKYLIFLSNFPFSLLGLLALAIGLWGLAVKGSLGSDLGGPLPADPMLGLALGGLVVSAVSLAGYLGALCENTCLLRGFSGGILAFLVLEAVAGALVVALWGPLQDSLEHTLRVAIAHYQDDPDLRFLLDQVQLGLRCCGAASYQDWQQNLYFNCSSPGVQACSLPASCCIDPREDGASVNDQCGFGVLRLDADAAQRVVYLEGCGPPLRRWLRANLAASGGYAIAVVLLQGAELLLAARLLGALAARRGAAYGPGARGEDRAGPQSPSPGAPPAAKPARG

SEQ ID NO: 109120 - protein, 235 aa, Artificial Sequence
  derived and/or modified sequence
MEEGERSPLLSQETAGQKPLSVHRPPTSGCLGPVPREDQAEAWGCSCCPPETKHQALSGTPKKGPAPSLSPGSSCVKYLIFLSNFPFSLLGLLALAIGLWGLAVKGSLGSDLGGPLPADPMLGLALGGLVVSAVSLAGYLGALCENTCLLRGFSGGILAFLVLEAVAGALVVALWGPLQDSLEHTLRVAIAHYQDDPDLRFLLDQVQLGLRCCGAASYQDWQQNLYCLSSPCSSQ

SEQ ID NO: 109121 - DNA, 1613 bp, Artificial Sequence
  derived and/or modified sequence
agtcaggaccagcccagcagcccagccacagaggagccagcgaacctctcccggcgcctgtgctgggggctttctgttccagcgtcaaggatggaggagggggagaggagccccttactgtcccaggaaactgcaggccagaagcccctctctgtgcacaggccacccacctcaggctgcctaggtccagtgcccagggaggaccaggcggaggcctggggctgcagctgctgtcccccggagaccaagcaccaggccttgagtggcacccccaagaaaggaccagccccttccctctccccagggagcagctgcgtcaagtatctgatcttcctctccaacttccccttctccctgctggggctgctggccctggccatcgggctctggggcctggctgtcaaggggtctctgggaagtgatctgggggggcccctgcccgcagaccccatgctggggctggcactgggagggctggtggtcagcgcagtgagcctggctggctacctgggcgccctctgtgagaacacctgcctgttacgtggcttctctgggggcatccttgccttcctggtgcttgaggccgtggcgggggccctggtggtggccctctggggcccgctgcaagacagcctggagcacaccctgcgtgtggccatcgcccactaccaggacgacccagacctgcgcttcctcctcgaccaagtccagctcgggctgaggtgctgcggagctgcctcctaccaggactggcagcagaacctgtactttaactgcagctcccccggggtgcaggcctgcagccttcccgcctcctgctgcatcgacccccgcgaagatggagcctctgtcaacgaccagtgcggcttcggggtcctgcgcctggatgcggacgcagctcagagagtggtgtacctggagggctgcggcccgccgctccggcggtggctgcgcgcgaacctggctgcctcgggcggctacgcaatcgcggtggtgctgctgcagggcgcggagctcctgctggccgcccggctactcggggccctcgctgcccgcaggggggcggcgtacggccccggagcgcgcggggaggaccgcgctggcccccagagccccagccccggcgccccgcccgctgccaagcccgcccggggctgagcgcacgccccgaggtccgagaccgccacgcacagggatacagggggcgcctccgcccggctaaaaagcgcggcctgcgccgccgccgccgcctgatttcgctcgggcttcgggtgacttcgccgcaggacctacccagctcgctcacttcgctcgctccgcgtcccccatgccagcccccaacgcagggcgcccggcgaagccacgggactggcgggaggagcacgcggggccggaggaaatcctgaagctgaccctcacctccgagcccccactcccaccccagccgcacagttcccacctcctggcacctccctcccctggggccgccaccccttctgggctcgtgatggtggagctaaggtccaggcctctccctcccgagtgcatttttggggagatagtaaatgttttattcgggtgtatcattcatacagtaaagacaccaatcttca

SEQ ID NO: 109122 - protein, 445 aa, Artificial Sequence
  derived and/or modified sequence
MALVDKHKVKRQRLDRICEGIRPQIMNGPLHPRPLVALLDGRDCTVEMPILKDLATVAFCDAQSTQEIHEKVLNEAVGAMMYHTITLTREDLEKFKALRVIVRIGSGYDNVDIKAAGELGIAVCNIPSAAVEETADSTICHILNLYRRNTWLYQALREGTRVQSVEQIREVASGAARIRGETLGLIGFGRTGQAVAVRAKAFGFSVIFYDPYLQDGIERSLGVQRVYTLQDLLYQSDCVSLHCNLNEHNHHLINDFTIKQMRQGAFLVNAARGGLVDEKALAQALKEGRIRGAALDVHESEPFSFAQGPLKDAPNLICTPHTAWYSEQASLEMREAAATEIRRAITGRIPESLRNCVNKEFFVTSAPWSVIDQQAIHPELNGATYRYPPGIVGVAPGGLPAAMEGIIPGGIPVTHNLPTVAHPSQAPSPNQPTKHGDNREHPNEQ

SEQ ID NO: 109123 - DNA, 1338 bp, Artificial Sequence
  derived and/or modified sequence
atggccctggtggacaagcacaaggtgaagagacagagactggacagaatctgcgagggcatcagaccccagatcatgaacggccccctgcaccccagacccctggtggccctgctggacggcagagactgcaccgtggagatgcccatcctgaaggacctggccaccgtggccttctgcgacgcccagagcacccaggagatccacgagaaggtgctgaacgaggccgtgggcgccatgatgtaccacaccatcaccctgaccagagaggacctggagaagttcaaggccctgagagtgatcgtgagaatcggcagcggctacgacaacgtggacatcaaggccgccggcgagctgggcatcgccgtgtgcaacatccccagcgccgccgtggaggagaccgccgacagcaccatctgccacatcctgaacctgtacagaagaaacacctggctgtaccaggccctgagagagggcaccagagtgcagagcgtggagcagatcagagaggtggccagcggcgccgccagaatcagaggcgagaccctgggcctgatcggcttcggcagaaccggccaggccgtggccgtgagagccaaggccttcggcttcagcgtgatcttctacgacccctacctgcaggacggcatcgagagaagcctgggcgtgcagagagtgtacaccctgcaggacctgctgtaccagagcgactgcgtgagcctgcactgcaacctgaacgagcacaaccaccacctgatcaacgacttcaccatcaagcagatgagacagggcgccttcctggtgaacgccgccagaggcggcctggtggacgagaaggccctggcccaggccctgaaggagggcagaatcagaggcgccgccctggacgtgcacgagagcgagcccttcagcttcgcccagggccccctgaaggacgcccccaacctgatctgcaccccccacaccgcctggtacagcgagcaggccagcctggagatgagagaggccgccgccaccgagatcagaagagccatcaccggcagaatccccgagagcctgagaaactgcgtgaacaaggagttcttcgtgaccagcgccccctggagcgtgatcgaccagcaggccatccaccccgagctgaacggcgccacctacagatacccccccggcatcgtgggcgtggcccccggcggcctgcccgccgccatggagggcatcatccccggcggcatccccgtgacccacaacctgcccaccgtggcccaccccagccaggcccccagccccaaccagcccaccaagcacggcgacaacagagagcaccccaacgagcagtag

SEQ ID NO: 109124 - DNA, 3404 bp, Artificial Sequence
  derived and/or modified sequence
gggagcggcccggaggagccggcggcggcccgaggagcgagggaccgaaccgggagccatgccgcgctgagggggggccgcacagccgccgccaccgccaccgccgccgggtggggtgggaggggcgggagacgccgccgccgccgcctccagggtgggcgcctttcgccgtggacgccgaccgtccgggacgagggtttcatcaccttaaatggttttgaaccaatgaaggtgtattcccttaaaaagacggacagcccatcgtgtgaactatagagtttgtggacagatttatattgggttcatagtggcgtcatgcacgcagactcctgcaagttcccctaagttcttagaggactgctttgccttttgatctgagagttgcaaagttccataaagaatggcccttgtggataagcacaaagtcaagagacagcgattggacagaatttgtgaaggtatccgcccccagatcatgaacggccccctgcacccccgccccctggtggcgctgctggacggccgcgactgcactgtggagatgcccatcctgaaggacctggccactgtggccttctgtgacgcgcagtcgacgcaggaaatccacgagaaggttctaaacgaagccgtgggcgccatgatgtaccacaccatcaccctcaccagggaggacctggagaagttcaaggccctgagagtgatcgtgcggataggcagtggctatgacaacgtggacatcaaggctgccggcgagctcggaattgccgtgtgcaacatcccgtctgcagccgtggaagagacagcggactctaccatctgccacatcctcaacctgtaccggaggaacacgtggctgtaccaggcactgcgggaaggcacgcgggttcagagcgtggagcagatccgcgaggtggcctcgggagcggcccgcatccgtggggagacgctgggcctcattggctttggtcgcacggggcaggcggttgcagttcgagccaaggcctttggattcagcgtcatattttatgacccctacttgcaggatgggatcgagcggtccctgggcgtgcagagggtctacaccctgcaggatttgctgtatcagagcgactgcgtctccttgcactgcaatctcaacgaacataaccaccacctcatcaatgactttaccataaagcagatgaggcagggagcattccttgtgaacgcagcccgtggcggcctggtggacgagaaagccttagcacaagccctcaaggagggcaggatacgaggggcagccctcgacgtgcatgagtcagagcccttcagctttgctcagggtccgttgaaagatgccccgaatctcatctgcactcctcacactgcctggtacagtgagcaggcgtcactggagatgagggaggcagctgccaccgagatccgccgagccatcacaggtcgcatcccagaaagcttaagaaattgtgtgaacaaggaattctttgtcacatcagcgccttggtcagtaatagaccagcaagcaattcatcctgagctcaatggtgccacatacagatatccgccaggcatcgtgggtgtggctccaggaggacttcctgcagccatggaagggatcatccctggaggcatcccagtgactcacaacctcccgacagtggcacatccttcccaagcgccctctcccaaccagcccacaaaacacggggacaatcgagagcaccccaacgagcaatagcagagaatgccagaaggtaatcactcagatacacttgggaccaagagacagtgaaaaatagatgaactaagagaaaaagaatcggatggtctttgtaactgattctggacatatgcatcattgatgttgcagtgttgaaactacaagagctagaaaactgaagatgtcgtctgcttacggaagcgctgaaagactaggatgtgatttattaacgaccaacttctgttattgtgtgttaagtttttcatctgtgcatcaaatcacaaaaagaataaatagagctttttcctttatcagtcccttgggcacagcaggtcctgaacaccctgctctacaatgttgcatcaagagttcaaacaacaaaataaaaaatattaagaggaaatccccatcctgtgacttgagtcccttaagtctacaggggctggtgacctctttttgctaataggaaaatcacattactacaaaatggggagaaaactgtttgcctgtggtagacacctgcacgcataggattgaagacagtacaggctgctgtacagagaagcgcctctcacatctgaactgcatactgagcgggcaagtcggttgtaagttcagtaaaaccctctgatgatgcaaaaaaaaaaaaaaaagtattaagtttcacaagctgtttgtactcaaatatattttctcagtttcagatcctctgctattttattgagtggaaagtcttgagctaaaagggttcaagaagaataatgttgcatttccttatgtctcaggaaacactttttatggtaacttgtcagattgtctatgaacaaacccacttttttagacattgataaagtcttcttttcttcacgtgatattttatacaagaacacttcagatgtattagatgtgactgattttaacaaatcctattagatttgtatcaactagttacatgttctattcatagtcttttgtgaatcattgcctttttgtttaaaaagatggcctattttgagcctttgtataggtacattcctgtttttgtgacaaaagaaaaactttaaaattgtcccaaacagaaaaataatggctatcagaagtatgttttgttttagtgtgagttaccgttactgtatttgtttattgtaaaggtggacatttagcgttcagtgcagttttcaataaaaagtaattaaaatttgttaagttctgaaattcaagtacatctcactaatgtaaatgttctctacttgagatgtttaaggcaattgcattgtcaattagccaatttccagctcttgttactacagggttccataaccagactcaagaccgctgacaattaattacctgtgataacaaaaagtttaattgaaaaatcaaaacctcacacaagtccatcattatcacgtcatgccatccttaagatgcaatggtgggttagtgctaaatcaattcaaaaaaaaacaaagttgctcaacttttagagttctgactttaatctaccccaaagcaaaatgacctggacctggttcaagggagggaagtgaaccttgaaactgttttgccaataacctaacaaacaaaatgatatttacaaagaagtgttgcaaatagtcccatgagttaagagcttgatttaatggatcttctttttaaatagaattaaacctttatactaaaa

SEQ ID NO: 109125 - DNA, 2036 bp, Artificial Sequence
  derived and/or modified sequence
cgcctcccgcctagctcctgcgcagccagcgggtaccgggagctgcggccagcgccgcttctttcctttccttttctctccgttttccttctccttccccggaggagaaaacaaataaagaagagcaaatagccgggaggcgctcggcatccaggacgttccctcccccgatccaagttggaattagcatcctctcggggggtttcatcaccttaaatggttttgaaccaatgaaggtgtattcccttaaaaagacggacagcccatcgtgtgaactatagagtttgtggacagatttatattgggttcatagtggcgtcatgcacgcagactcctgcaagttcccctaagttcttagaggactgctttgccttttgatctgagagttgcaaagttccataaagaatggcccttgtggataagcacaaagtcaagagacagcgattggacagaatttgtgaaggtatccgcccccagatcatgaacggccccctgcacccccgccccctggtggcgctgctggacggccgcgactgcactgtggagatgcccatcctgaaggacctggccactgtggccttctgtgacgcgcagtcgacgcaggaaatccacgagaaggttctaaacgaagccgtgggcgccatgatgtaccacaccatcaccctcaccagggaggacctggagaagttcaaggccctgagagtgatcgtgcggataggcagtggctatgacaacgtggacatcaaggctgccggcgagctcggaattgccgtgtgcaacatcccgtctgcagccgtggaagagacagcggactctaccatctgccacatcctcaacctgtaccggaggaacacgtggctgtaccaggcactgcgggaaggcacgcgggttcagagcgtggagcagatccgcgaggtggcctcgggagcggcccgcatccgtggggagacgctgggcctcattggctttggtcgcacggggcaggcggttgcagttcgagccaaggcctttggattcagcgtcatattttatgacccctacttgcaggatgggatcgagcggtccctgggcgtgcagagggtctacaccctgcaggatttgctgtatcagagcgactgcgtctccttgcactgcaatctcaacgaacataaccaccacctcatcaatgactttaccataaagcagatgaggcagggagcattccttgtgaacgcagcccgtggcggcctggtggacgagaaagccttagcacaagccctcaaggagggcaggatacgaggggcagccctcgacgtgcatgagtcagagcccttcagctttgctcagggtccgttgaaagatgccccgaatctcatctgcactcctcacactgcctggtacagtgagcaggcgtcactggagatgagggaggcagctgccaccgagatccgccgagccatcacaggtcgcatcccagaaagcttaagaaattgtgtgaacaaggaattctttgtcacatcagcgccttggtcagtaatagaccagcaagcaattcatcctgagctcaatggtgccacatacagatatccgccaggcatcgtgggtgtggctccaggaggacttcctgcagccatggaagggatcatccctggaggcatcccagtgactcacaacctcccgacagtggcacatccttcccaagcgccctctcccaaccagcccacaaaacacggggacaatcgagagcaccccaacgagcaatagcagagaatgccagaaggtaatcactcagatacacttgggaccaagagacagtgaaaaatagatgaactaagagaaaaagaatcggatggtctttgtaactgattctggacatatgcatcattgatgttgcagtgttgaaactacaagagctagaaaactgaagatgtcgtctgcttacggaagcgctgaaagactaggatgtgatttattaacgaccaacttctgttattgtgtgttaagtttttcatctgtgcatcaaatcacaaaaagaataaatagagctttttccttta

SEQ ID NO: 109126 - DNA, 2014 bp, Artificial Sequence
  derived and/or modified sequence
ggagccggcggcggcccgaggagcgagggaccgaaccgggagccatgccgcgctgagggggggccgcacagccgccgccaccgccaccgccgccgggtggggtgggaggggcgggagacgccgccgccgccgcctccagggtgggcgcctttcgccgtggacgccgaccgtccgggacgagatggagaaaacaaaggattcagattgaaggactgctcagacaccctccgaagaggtggccctgcctgcgctcctcctggctgcagagtaccccaccagcgcggttcatagtggcgtcatgcacgcagactcctgcaagttcccctaagttcttagaggactgctttgccttttgatctgagagttgcaaagttccataaagaatggcccttgtggataagcacaaagtcaagagacagcgattggacagaatttgtgaaggtatccgcccccagatcatgaacggccccctgcacccccgccccctggtggcgctgctggacggccgcgactgcactgtggagatgcccatcctgaaggacctggccactgtggccttctgtgacgcgcagtcgacgcaggaaatccacgagaaggttctaaacgaagccgtgggcgccatgatgtaccacaccatcaccctcaccagggaggacctggagaagttcaaggccctgagagtgatcgtgcggataggcagtggctatgacaacgtggacatcaaggctgccggcgagctcggaattgccgtgtgcaacatcccgtctgcagccgtggaagagacagcggactctaccatctgccacatcctcaacctgtaccggaggaacacgtggctgtaccaggcactgcgggaaggcacgcgggttcagagcgtggagcagatccgcgaggtggcctcgggagcggcccgcatccgtggggagacgctgggcctcattggctttggtcgcacggggcaggcggttgcagttcgagccaaggcctttggattcagcgtcatattttatgacccctacttgcaggatgggatcgagcggtccctgggcgtgcagagggtctacaccctgcaggatttgctgtatcagagcgactgcgtctccttgcactgcaatctcaacgaacataaccaccacctcatcaatgactttaccataaagcagatgaggcagggagcattccttgtgaacgcagcccgtggcggcctggtggacgagaaagccttagcacaagccctcaaggagggcaggatacgaggggcagccctcgacgtgcatgagtcagagcccttcagctttgctcagggtccgttgaaagatgccccgaatctcatctgcactcctcacactgcctggtacagtgagcaggcgtcactggagatgagggaggcagctgccaccgagatccgccgagccatcacaggtcgcatcccagaaagcttaagaaattgtgtgaacaaggaattctttgtcacatcagcgccttggtcagtaatagaccagcaagcaattcatcctgagctcaatggtgccacatacagatatccgccaggcatcgtgggtgtggctccaggaggacttcctgcagccatggaagggatcatccctggaggcatcccagtgactcacaacctcccgacagtggcacatccttcccaagcgccctctcccaaccagcccacaaaacacggggacaatcgagagcaccccaacgagcaatagcagagaatgccagaaggtaatcactcagatacacttgggaccaagagacagtgaaaaatagatgaactaagagaaaaagaatcggatggtctttgtaactgattctggacatatgcatcattgatgttgcagtgttgaaactacaagagctagaaaactgaagatgtcgtctgcttacggaagcgctgaaagactaggatgtgatttattaacgaccaacttctgttattgtgtgttaagtttttcatctgtgcatcaaatcacaaaaagaataaatagagctttttccttta

SEQ ID NO: 109127 - DNA, 1918 bp, Artificial Sequence
  derived and/or modified sequence
aaatccccgctctgcgtgctcgtggtggaggctgctggcaatggcctacgtcgtcataccgggcttccttgccctgtccgggggtttcatcaccttaaatggttttgaaccaatgaaggtgtattcccttaaaaagacggacagcccatcgtgtgaactatagagtttgtggacagatttatattgggttcatagtggcgtcatgcacgcagactcctgcaagttcccctaagttcttagaggactgctttgccttttgatctgagagttgcaaagttccataaagaatggcccttgtggataagcacaaagtcaagagacagcgattggacagaatttgtgaaggtatccgcccccagatcatgaacggccccctgcacccccgccccctggtggcgctgctggacggccgcgactgcactgtggagatgcccatcctgaaggacctggccactgtggccttctgtgacgcgcagtcgacgcaggaaatccacgagaaggttctaaacgaagccgtgggcgccatgatgtaccacaccatcaccctcaccagggaggacctggagaagttcaaggccctgagagtgatcgtgcggataggcagtggctatgacaacgtggacatcaaggctgccggcgagctcggaattgccgtgtgcaacatcccgtctgcagccgtggaagagacagcggactctaccatctgccacatcctcaacctgtaccggaggaacacgtggctgtaccaggcactgcgggaaggcacgcgggttcagagcgtggagcagatccgcgaggtggcctcgggagcggcccgcatccgtggggagacgctgggcctcattggctttggtcgcacggggcaggcggttgcagttcgagccaaggcctttggattcagcgtcatattttatgacccctacttgcaggatgggatcgagcggtccctgggcgtgcagagggtctacaccctgcaggatttgctgtatcagagcgactgcgtctccttgcactgcaatctcaacgaacataaccaccacctcatcaatgactttaccataaagcagatgaggcagggagcattccttgtgaacgcagcccgtggcggcctggtggacgagaaagccttagcacaagccctcaaggagggcaggatacgaggggcagccctcgacgtgcatgagtcagagcccttcagctttgctcagggtccgttgaaagatgccccgaatctcatctgcactcctcacactgcctggtacagtgagcaggcgtcactggagatgagggaggcagctgccaccgagatccgccgagccatcacaggtcgcatcccagaaagcttaagaaattgtgtgaacaaggaattctttgtcacatcagcgccttggtcagtaatagaccagcaagcaattcatcctgagctcaatggtgccacatacagatatccgccaggcatcgtgggtgtggctccaggaggacttcctgcagccatggaagggatcatccctggaggcatcccagtgactcacaacctcccgacagtggcacatccttcccaagcgccctctcccaaccagcccacaaaacacggggacaatcgagagcaccccaacgagcaatagcagagaatgccagaaggtaatcactcagatacacttgggaccaagagacagtgaaaaatagatgaactaagagaaaaagaatcggatggtctttgtaactgattctggacatatgcatcattgatgttgcagtgttgaaactacaagagctagaaaactgaagatgtcgtctgcttacggaagcgctgaaagactaggatgtgatttattaacgaccaacttctgttattgtgtgttaagtttttcatctgtgcatcaaatcacaaaaagaataaatagagctttttccttta

SEQ ID NO: 109128 - DNA, 1338 bp, Artificial Sequence
  derived and/or modified sequence
atggccctcgtggacaaacacaaagtgaagaggcagagactggacagaatttgtgaaggcatccgcccacagattatgaacgggcctctgcatccacgcccgctggtcgccctgctggacggtagagattgtacagtagaaatgcccattctgaaagatctggcgacagttgccttttgcgacgctcagtctacccaggagattcatgaaaaagtgcttaacgaagctgtcggggcaatgatgtatcacacaatcaccctgaccagagaagacctggagaagttcaaagcactgcgggtaattgttagaattgggagcggttatgacaatgtggatatcaaagccgccggtgagctcgggatcgccgtgtgtaacataccctctgcggcagttgaggagactgccgatagtacaatttgtcacattctgaatctttaccggcgcaatacgtggctctaccaagcactcagggaaggcacgcgtgttcagtccgtagagcagatccgcgaggttgccagtggagcagcccgtatccgcggcgagactttagggctgataggctttgggcgcaccggccaagccgttgcagtgagggcaaaagcgttcggcttctctgttattttttatgacccgtacctccaagatggtatagaacgctccctgggcgtgcagagggtatatactctccaagatctgttgtatcaaagcgattgtgtgtcactgcactgcaatctcaatgaacacaaccatcatcttataaatgacttcactataaaacaaatgcgtcagggagctttccttgtgaacgccgcaagaggaggcctcgtggatgagaaagcactggcacaggctctgaaagaagggcggatcaggggtgccgcgttggacgttcacgaatctgagccatttagcttcgcacaaggcccacttaaggacgctcccaatttgatttgtacgccccacacagcctggtacagcgagcaggcttcactggaaatgagagaagctgccgcgaccgagatccggagagcaattaccggacgaataccagagagtctccggaactgtgttaacaaggaattttttgtcacctcagctccctggagcgtaatagaccagcaagccattcacccagagttaaatggtgcaacatatagatacccccccggaatagtaggcgtggctcccgggggtctccctgcagcaatggaaggcataattcccggtggtatccctgtcacccacaacctcccaacagtggcgcatccctcacaggcgcccagccccaaccagccgaccaagcacggtgacaatcgcgaacacccaaacgaacagtag

SEQ ID NO: 109129 - DNA, 1338 bp, Artificial Sequence
  derived and/or modified sequence
atggcgctggtggacaaacacaaagtgaaaagacaacgcctggataggatctgcgaagggatcaggcctcagatcatgaacgggcccctccacccacgccctctagtggctctgttggatgggcgtgattgtacagtggaaatgccaatcctcaaagacctcgccaccgtggccttttgtgacgctcagtccacacaggagatccatgaaaaagtgctcaacgaggccgtaggcgccatgatgtaccacaccattacgctgactcgggaggaccttgagaaatttaaggctctcagagtgatcgtgcgcataggaagtggatacgacaatgtagacatcaaagctgctggggagctggggatcgccgtgtgtaatattcccagcgccgcggtcgaagaaacagcagactctacaatctgccacatccttaacctctatcgtagaaacacttggctgtatcaggcactccgcgaagggacacgggtgcaatcagtagagcaaattcgagaggtggcaagtggtgcagccaggatcagaggtgaaactctgggcctgattggcttcgggcgcacaggccaagcagtggctgtcagggcgaaggcctttggcttttcagtgatcttttatgacccctacctccaggatggcatcgaaagaagcttgggtgtacagagagtgtataccctgcaggaccttctctatcagtctgactgtgtgagcctccactgcaacctgaatgagcataaccaccaccttattaatgactttactatcaaacagatgcgccagggtgccttcctggtgaacgccgcacgggggggcttggtggacgagaaggcacttgcacaggcactgaaagaaggccgcatccggggggcagccctggatgttcatgagtctgagcccttttccttcgcccagggccccctcaaagatgctcccaatctgatatgcactccccacactgcctggtattccgagcaggcatctctagagatgcgagaggcagccgccaccgaaatccggagagccatcacgggccggatcccggagtcccttcgtaactgcgtaaacaaggaattcttcgtgactagcgccccctggtctgtcatcgaccagcaggcaatccaccccgaactgaacggggcaacgtatcggtatccgcccggcatcgtgggcgttgccccaggcgggctgcccgctgccatggaggggattattccaggagggatccctgtcacccacaacctccctactgtcgcacatcctagtcaggccccttcaccaaatcaaccaacgaaacacggtgacaacagggagcatcctaacgagcaatag

SEQ ID NO: 109130 - DNA, 1338 bp, Artificial Sequence
  derived and/or modified sequence
atggcattggttgacaagcacaaggtgaagcgccagcggctggatcgcatttgtgaaggcattaggcctcagatcatgaacggacctctgcacccaaggcctttggtcgcacttttagatggaagggactgtaccgtggagatgcctatattgaaagatctggcaactgtggccttctgtgatgcccagagtactcaggagattcatgaaaaggtgctaaatgaggctgtaggggcaatgatgtatcacacaatcaccctgactagagaagacctggagaagttcaaggcactgcgggtgatcgtaagaataggatccggttacgataacgttgacattaaagcagcaggtgagctgggaattgctgtctgcaatatcccatcagccgccgtggaggagacagcagattcaacaatttgtcacattctcaacttgtacaggagaaacacttggctgtaccaggcactgcgcgaggggacacgggtgcaatctgttgagcagattagggaggtcgcttcaggtgccgcacgcattcgtggtgagacgctgggactgattggtttcggcaggaccgggcaggcggttgccgtgcgagctaaggccttcggatttagcgtcatcttctatgacccttacctgcaagacggtatagagcgttccctgggggtccagagagtgtataccctgcaagatcttctttatcagtccgattgcgtcagcctgcactgcaatcttaacgagcacaatcaccacctcataaatgatttcacgatcaagcaaatgaggcagggtgcttttctggtcaatgccgctaggggcggcctggtcgacgagaaagcactcgctcaagccctcaaagagggaaggattcgcggtgcagccttagatgtccacgagagcgagcccttctcattcgcacagggcccgctaaaagacgcacccaatttgatctgcactccccacactgcctggtactctgaacaagcctcactcgagatgcgagaggccgctgctactgagattagacgcgctatcaccggccgcataccggaaagtctgcgaaattgtgtgaataaagaattctttgtgacatctgctccctggagtgtcatcgatcagcaggccatccatcccgagttgaatggagctacatatcgctatcccccaggcatagtgggagtggctccagggggcctacctgctgccatggaggggattatccccggcggtatccctgtgacccacaatcttcccactgtagctcaccccagccaggccccttccccaaaccagcccacaaagcatggagataaccgcgagcatcccaatgaacagtag

SEQ ID NO: 109131 - DNA, 1338 bp, Artificial Sequence
  derived and/or modified sequence
atggccttagtggacaagcacaaagttaaacgccagcggctggataggatctgtgaggggattagaccgcagatcatgaacggtccactccatccccgaccactggtagccctgcttgacggcagagattgtacggttgagatgcctatacttaaagacctggccaccgtggctttttgtgacgcccagtcaacccaggagattcacgagaaagtgttgaacgaagccgtcggcgctatgatgtatcatactataactctcacccgggaggacctggaaaagtttaaagcactgcgagtgatcgtgcgaatcggctcaggatacgataacgtggacatcaaagctgccggagagttgggcatcgcagtgtgtaatatcccgagcgccgcggttgaggagaccgcggactcgaccatatgtcacattctaaatctatacaggaggaacacttggctctaccaggcccttcgagaaggtacaagagtccagtctgttgagcagatcagagaggtggcgtcaggagcagcacggattaggggggaaaccctgggactgattggcttcggacgcaccggacaggcagtcgcagtgcgcgcaaaagcctttggcttttctgtgatcttttacgatccttacctgcaggatggcatcgaacggagcctcggggtacagagagtgtatacgctgcaggacctgctttaccagtccgactgcgtttcccttcattgcaatctgaacgagcacaaccatcatctcatcaacgattttacaataaagcaaatgagacagggcgccttcctcgttaacgctgcgagaggaggcctggtggatgagaaggccttggcccaagctctgaaagaaggaagaatccgtggcgcagccttggatgtgcacgagtccgagcctttcagttttgcccagggccccctcaaggatgcccctaatctgatatgcaccccccacacggcttggtattcggaacaggcttctttggagatgcgagaggccgcagcaaccgagatacgccgggctattacgggccgaatcccagagagcctgcgcaactgcgtgaataaggagttttttgtgacttctgctccttggtccgtcatcgatcagcaggcaatccatcctgaactcaacggggcgacctaccgttatcctcctggaatcgtgggcgtggcgcctggaggactccctgccgcgatggagggaattatccctgggggcattcctgttacccataatctgcccactgttgcgcacccgtctcaggctccctcaccaaatcagcccaccaagcacggcgataacagggagcaccccaatgaacagtag

SEQ ID NO: 109132 - DNA, 1338 bp, Artificial Sequence
  derived and/or modified sequence
atggccctggtggacaagcacaaggtgaagaggcagaggctggaccgcatctgtgagggcatccggccccagatcatgaatggccccctgcacccccggcccctggtggccctgctggatggccgggactgcaccgtggagatgcccatcctgaaggacctggccaccgtggccttctgtgatgcccagagcacccaggagatccacgagaaggtgctgaatgaggccgtgggcgccatgatgtaccacaccatcaccctgacccgggaggacctggagaagttcaaggccctgcgggtgattgtgcgcatcggcagcggctatgacaacgtggacatcaaggccgccggggagctgggcattgctgtgtgcaacatccccagcgctgctgtggaggagacagctgacagcaccatctgccacatcctgaacctgtacagaagaaacacctggctgtaccaggccctgcgggagggcaccagggtgcagagcgtggagcagatccgggaggtggccagcggggccgcccgcatccggggggagaccctgggcctcatcggcttcggccgcacaggccaggccgtggccgtgcgggccaaggccttcggcttcagcgtcatcttctatgacccctacctgcaggacggcatcgagaggagcctgggcgtgcagagggtgtacaccctgcaggacctgctgtaccagagcgactgtgtgtccctgcactgcaacctgaatgagcacaaccaccacctgatcaatgacttcaccatcaagcagatgaggcagggcgccttcctggtgaatgctgcccggggcggcctggtggatgagaaggccctggcccaggccctgaaggagggccgcatcagaggagctgccctggatgtgcatgagagcgagcccttctcctttgcccagggccccctgaaggatgcccccaacctgatctgcaccccccacacagcctggtacagcgagcaggccagcctggagatgagggaggccgccgccacagagatccggcgggccatcaccggccgcatccctgagagcctgaggaactgtgtgaacaaggagttctttgtgaccagcgccccctggagcgtgattgaccagcaggccatccaccctgagctgaatggagccacctaccgctacccacctggcatcgtgggcgtggcccctgggggcctgcctgctgccatggagggcatcatccctgggggcatccctgtgacccacaacctgcccaccgtggcccaccccagccaggcccccagccccaaccagcccaccaagcatggagacaaccgggagcaccccaatgagcagtag

SEQ ID NO: 109133 - DNA, 1338 bp, Artificial Sequence
  derived and/or modified sequence
atggccctggtggacaagcacaaggtgaagcggcagcggctggaccgcatttgcgaagggattcgcccacagattatgaatggccctctccaccctaggcctctggtggctctactggacgggcgcgactgtactgtagaaatgcctatcttgaaagacctggccaccgttgcattctgcgacgcccagtcgactcaggagattcacgaaaaggtgcttaatgaggccgtgggcgcaatgatgtaccacactattaccctgacaagggaagacctggagaaattcaaagcacttcgggtgatagttcgtatcgggagcggctacgataatgtggatataaaagccgcaggcgaactgggcatcgccgtatgcaacattccaagcgcagccgtggaggaaactgctgactccacaatctgtcacattctaaacctgtaccgccgaaatacctggctgtaccaggcactccgggagggcacacgcgtccaaagcgtcgaacagatacgagaagtggcatccggcgccgcccggattagaggtgaaacgctagggttaataggattcggaaggaccggacaagccgtggcagttcgagcaaaagcgtttggcttcagtgtgattttctacgacccgtacctgcaggatggaatcgaaaggagcctgggcgtccagcgcgtgtacacactgcaggacctgctctatcagtctgactgtgtgtccctacattgcaacctcaatgaacacaatcatcatttaattaatgatttcaccatcaagcaaatgaggcaaggggcctttctggtgaatgccgcccgcggtggcttggtcgatgaaaaggccctcgcccaggccctgaaagaggggcggataagaggcgcagcgcttgatgtccatgagtccgaacccttctcatttgcccaggggcctctgaaggatgctcctaacttgatctgtactccccacaccgcttggtactctgagcaagcgagcctggagatgcgggaggccgccgcaacagagatacgcagggcgattactgggagaatccctgagtcattgcgtaattgcgtgaacaaggaattctttgttacttccgcaccatggagcgtcatcgatcagcaggccatacatcccgagttgaacggggcaacatataggtatcccccagggatcgtgggagtcgcgcctggcgggctcccagccgcgatggagggtataatccctggtgggatacctgtaacccataatcttcccactgtggcccatcctagtcaagcaccttccccgaatcagccaaccaaacacggtgacaaccgagagcatccaaacgaacagtag

SEQ ID NO: 109134 - DNA, 1338 bp, Artificial Sequence
  derived and/or modified sequence
atggccctggtggacaagcacaaggtgaagcggcagcggctggaccgcatctgcgagggcattcgcccccagatcatgaacggtccgttacaccctcggcccctggttgccctgctggacggccgggactgcacagttgagatgcctatactgaaagatctggcaaccgtcgccttctgcgacgcgcagagcacgcaagaaatccatgaaaaagttctgaacgaagcagtcggcgcaatgatgtaccacactataacactgaccagggaagacttagaaaagtttaaggccctccgcgtcatcgtgcggattggaagtgggtacgataatgtggacatcaaagctgctggcgagctgggtatcgcagtctgcaatattccgtccgccgccgtggaggaaacggcagattcaaccatctgccacatcttgaatctttatagacgcaatacatggttgtatcaggccctccgcgagggcaccagggtgcaaagtgtcgaacagatacgcgaggtggcttcaggcgccgcgcggattagaggtgaaacattgggtttaattggattcgggcgcactgggcaggccgtggcggttagagccaaggctttcggcttctccgttatcttctatgatccttacttgcaggacggaattgaacgctccctcggggtgcaacgcgtgtacacccttcaggacctgttataccaatcggattgcgtgagtctccactgcaatctcaacgagcataaccaccatctgatcaatgacttcaccatcaagcaaatgcgacagggggcattcctggtgaatgccgctcggggcggccttgtggacgagaaggctctcgcccaagctctgaaggagggcaggattagaggagcagccttggacgtgcatgagtctgagcccttttccttcgctcagggtcctttaaaagatgctcccaacctgatctgtaccccccacacagcttggtattcagagcaggcgtccctggagatgagggaagccgctgctaccgagataaggcgagctattaccggccggattccagaaagcctgcgtaattgcgtgaataaggagttctttgtgacaagcgcaccttggtctgtgatagatcagcaggcaatacatcctgaacttaacggtgcgacctatcgctatccccctggcatcgtaggagtggcgcccggggggctccctgccgcaatggaaggaattatccccgggggtatccctgtgacacataatcttccaactgtggctcatccaagtcaagccccgtctcccaaccagcccaccaaacacggggataacagagaacaccctaacgaacagtag

SEQ ID NO: 109135 - DNA, 1338 bp, Artificial Sequence
  derived and/or modified sequence
atggccctggtggacaagcacaaggtgaagcggcagcggctggaccgcatctgcgagggaattaggccccaaatcatgaacggcccgctccaccccaggccactcgttgctctcctcgacggacgcgactgcacggttgagatgcccattcttaaggaccttgccaccgtggccttttgcgatgcacagtcaacccaggaaatccacgaaaaagtgctaaatgaggccgtcggcgcaatgatgtaccacaccataacactcacaagagaagaccttgagaagttcaaagccttgagggtgatcgtgcgaattggttccgggtatgacaacgtcgacatcaaagcagctggagaactggggatcgcggtatgtaacatacctagtgcggcagtggaggagacagccgacagcactatttgtcacatcttaaacctctacaggcgcaacacctggctctatcaggctcttagagaggggacacgcgtgcaatctgtcgaacagatcagagaagtggctagtggggcagccaggattcgcggcgagacattgggtcttattggcttcggacgcactggacaggctgttgccgttcgggcaaaagcttttgggtttagcgtgatcttttacgacccatatctgcaggacggcattgaaagatctctcggagttcagagggtgtacacactgcaagaccttttgtatcagtccgattgtgtgtctctgcattgcaatctaaatgagcacaaccaccacttaataaatgattttaccatcaaacagatgcgacaaggggcctttctcgtgaatgcggccaggggtggactcgtggatgagaaagccctggctcaagctttaaaagaaggccggattaggggcgcagctctcgatgttcacgagtctgaacctttctcattcgcgcaaggtcccctgaaagacgcgcccaatcttatctgtacccctcataccgcgtggtattctgagcaagcaagtctggaaatgagggaagccgccgcgaccgagattcgccgtgctatcactggcagaatcccggaatccctcagaaattgcgtgaacaaggagttctttgttacctcagctccttggtccgtgattgaccagcaggcaatacatcctgagctcaatggtgctacatatcgctacccccctggtatcgtgggcgtagcccctggaggtctgccagcagcaatggaaggtattatacctggcggaataccagtgacccacaatctgccaactgtggcccatccatcgcaggctccaagccccaaccagcctaccaagcatggagataatagggagcatcccaacgagcagtag

SEQ ID NO: 109136 - DNA, 1338 bp, Artificial Sequence
  derived and/or modified sequence
atggccctggtggacaagcacaaggtgaagcggcagcggctggaccgcatctgcgagggcataagaccccagatcatgaatgggcccctgcatcctaggccactcgtggcattgttggatggtagggactgcacggtggaaatgcccatattgaaagatctcgccaccgtggctttttgtgatgcccagtccacccaggaaatccatgagaaggtgctgaacgaggctgtgggggctatgatgtatcacacaatcaccttgaccagggaggacttggagaagtttaaagctctgagagtgatcgtgagaataggctccggctacgacaatgtcgatataaaggctgccggcgaactcggaattgcagtgtgtaacattcccagtgcagcagtggaggagaccgctgactctacaatctgccacattctcaacctgtatagacgaaacacctggctttaccaagcactgagagaaggaaccagagtacaaagcgtggaacaaatccgtgaggttgccagtggcgcagcaaggatccggggggagaccctaggcctaatcgggtttggaagaactggccaagccgtggccgtacgggccaaagcgttcggcttctcagttattttctatgacccttatctgcaagacgggatcgaaaggagcctcggggtacagagagtgtatacactccaagacctgctgtatcagagtgactgcgtcagtctgcactgcaacttgaatgagcataatcatcatctgattaacgatttcacaataaagcagatgaggcagggcgcattcctagtgaatgccgccaggggcggcttggtcgatgaaaaggctcttgcccaggctctcaaagaggggaggataagaggcgccgcattagatgtgcacgaatctgagccattttcgtttgcacaggggcccctgaaggatgcacccaatctgatctgcaccccgcacacagcctggtactccgagcaagcatccctagagatgagagaagccgcagctaccgaaattcggagggccattacaggacggatccctgagtcactgcgcaactgcgttaacaaagagtttttcgtcacatccgccccctggagcgtaatcgatcaacaggccattcatcccgagttgaacggcgccacctacaggtacccgcccggtattgtgggtgtggccccaggaggcctgccagctgctatggaaggcattatcccagggggtatacctgtgactcataacctaccgaccgtagcccatcctagtcaggccccatcccccaatcagccgacaaagcacggagacaatagagaacatccgaatgagcaatag

SEQ ID NO: 109137 - DNA, 1338 bp, Artificial Sequence
  derived and/or modified sequence
atggccttagtagataaacataaagttaaaagacaaaggctggaccgcatctgtgagggtataagaccacaaattatgaacggaccacttcatcctagacctctggtggcactgctggatgggagagactgtaccgtggagatgcctatcttaaaggacctggccacagtcgcattctgtgatgctcagtctactcaggagatccatgaaaaagttctaaatgaggctgtaggtgccatgatgtaccatacaatcaccctgacacgggaggatcttgagaaattcaaagctctccgggtgatcgtccgaataggttcagggtacgataatgtggacatcaaggccgcaggggagctgggaatcgccgtgtgcaacattccatctgctgcagtggaagaaaccgctgacagcaccatttgccacatcctgaacctctaccgaaggaatacttggctctatcaagctctccgggaaggcactagagtgcagagcgtcgaacagatccgggaagtcgccagcggagcagccaggatccggggagagacactcggactcatcggcttcggtcggactggtcaggcagtggccgtgcgagccaaggcttttggcttctccgtgatattctacgacccgtatctccaagatggtattgaacggagcctcggagttcagagggtgtatacacttcaagatctcctctaccagtctgactgtgtgtcgctccactgcaatttgaacgagcacaatcaccacctgataaacgactttaccatcaagcagatgcgtcagggcgcattcttagtaaatgccgctcgcggaggactggtggatgagaaagccctggcccaggccctcaaagagggaaggattcgaggagcagctctcgacgtgcacgaatccgagccattttctttcgctcagggacccctgaaagatgcaccgaacctgatttgtactccccacaccgcctggtattccgaacaggcatctttggagatgcgggaagctgccgctactgagataaggcgggcaatcaccgggagaatccctgagagcttgaggaactgtgtgaataaggaattcttcgtgaccagtgctccctggtctgtcattgaccagcaggccatacatcctgaactgaacggagcgacgtaccggtaccctcctggaattgtgggggtggcacctggaggtctaccagccgcaatggaaggaattattccaggaggtattcccgtgacacacaacctgcctacagtggcccacccaagtcaggctccgtcccctaatcagccgactaagcatggcgacaaccgtgaacacccgaatgagcaatag

SEQ ID NO: 109138 - DNA, 1338 bp, Artificial Sequence
  derived and/or modified sequence
atggctctcgtcgataagcacaaagtgaaaaggcaacgtttagaccgcatctgtgagggaatcagaccccagatcatgaacgggcctttgcacccacgccctctcgtggccctgctggacggacgtgactgcacagtagagatgcccattctcaaagatctagccaccgtagctttctgcgacgcccaatcgactcaagagattcacgagaaggttttaaatgaggcggtaggagcaatgatgtatcatacaatcacactgacgagagaagacctcgagaaatttaaagcgctacgtgtcattgttcgaatcggcagcgggtacgacaacgtcgacataaaggcggcaggcgagctcggaatcgccgtctgtaacatccccagcgcagctgttgaggaaaccgcagattccacaatctgccacattctaaatctgtatcgtcggaacacttggctttaccaagctttgagagaagggaccagagtgcagtcagtggagcagatcagggaggtggccagcggcgcagctagaattcgaggagaaaccctcgggctgattgggttcggcagaacgggacaagctgttgccgtacgtgccaaagcttttggttttagtgtgatcttttatgacccctacctgcaggatggcatcgaaaggagcctgggtgtgcaaagggtctatactctccaagacttactctaccagtctgattgcgtgtccctgcattgcaacctcaacgaacataaccaccatctcattaatgattttactattaagcaaatgcgccaaggtgccttccttgtcaacgcagccagaggaggtctggtggatgagaaagctctggcacaagcattaaaggagggcagaattcggggagctgctttggatgtgcacgaaagcgagcccttctctttcgcacaggggcctttgaaggacgccccaaatttgatttgtaccccacataccgcctggtattcagagcaggctagtcttgagatgcgggaggccgctgctacggaaatcaggcgcgctatcactggcaggattcccgagtctcttaggaactgtgtcaataaggagttcttcgttaccagtgctccctggtctgtcatcgatcagcaagccattcatccggagttaaatggagccacgtatcggtatcctcccggtattgttggtgtggcccctggcggactgccagccgctatggaggggattatccctggcggaattcctgtgacccataatctcccaactgtggcccacccgagccaggccccatctccaaatcagcctaccaagcacggagacaacagagaacaccctaatgagcagtag

SEQ ID NO: 109139 - DNA, 1338 bp, Artificial Sequence
  derived and/or modified sequence
atggccttagtcgataaacacaaagtcaaacgccagaggctggacaggatctgtgaagggattcgacctcagattatgaatgggccactacatcctcggccattagtggctctgctcgatggccgagactgtacagttgaaatgcccatcctcaaagacctggctactgtcgcattttgcgatgcgcagtccacccaggaaatccatgagaaggtcctgaatgaagccgtcggtgccatgatgtaccacacaatcacattaacaagggaggacctcgaaaagttcaaggccctccgcgtaattgtcaggatcggatccggctatgataacgtcgacattaaggccgcaggcgaactcggcatcgctgtttgcaacatccctagtgcagccgtggaggaaactgctgattctaccatttgccatatacttaatttgtaccgcagaaacacttggctataccaggcccttcgcgagggtacgagggtacagtcagtggagcaaatcagagaggtggcaagtggagccgcacgcatcaggggcgagaccctcggcctaattggatttggcagaacaggccaggccgtggctgtgcgggctaaggcgttcggcttctcggtgattttctacgatccctatctccaggatggcattgaacgcagccttggcgtgcagcgagtatatacgctgcaggatctgctataccagtccgactgcgtttccctccactgcaatttgaatgaacacaaccaccacctgattaatgactttacaattaagcaaatgcgacaaggggcatttctcgtgaacgccgcaagggggggtttagtggatgagaaagcactggcacaagcgctgaaggagggcagaatccggggagccgctctagatgtgcatgaatccgagcctttctccttcgcacagggacccttgaaagacgctcccaacctgatttgtacacctcacaccgcatggtactcagaacaagcttctctcgaaatgcgggaggctgccgctacagaaatcagacgcgctatcacaggcaggatccctgaatcgctacggaattgtgttaataaagagttcttcgtgacttccgcaccatggtctgtgatcgatcagcaggctattcaccctgagctgaacggagcaacatatcggtatccccctggcatcgtgggagtggcccctggcggactcccagcggctatggagggcattattccagggggtatacccgtcactcacaatctaccaacggtggctcatccaagtcaggctccttctcctaaccagccaaccaagcacggcgacaacagggagcacccaaatgaacaatag

SEQ ID NO: 109140 - DNA, 1338 bp, Artificial Sequence
  derived and/or modified sequence
atggctttagtagacaaacacaaagttaagcggcagcggcttgatcgcatctgtgaagggatacgccctcaaataatgaatgggccactccatcccaggccactggtggctctgctggacgggagagactgcaccgtggaaatgcccattctgaaagatttagctaccgtagccttttgcgacgcgcagtccacacaagaaatccacgagaaggtgctcaacgaagctgtgggggcaatgatgtatcacactattaccctgactcgcgaggatctggaaaagttcaaggctctccgtgttattgtgaggattggttccggatacgataatgtggacataaaagccgctggtgaattgggcattgccgtttgcaacatcccctcagccgcagtagaagagactgccgatagcaccatatgtcatatcttgaatctgtataggaggaacacttggctgtatcaggctctgcgggagggtacaagggtccagagcgtggagcagattagggaggttgcaagtggcgcagcacgaataagaggcgagacacttggtctcataggattcggaaggacaggccaggctgtggcggtccgggcaaaggcttttgggttttctgtcattttttatgacccctacctgcaagacggtatcgagcgctctctgggagtgcagcgagtctataccctgcaggatctcctttaccagagtgactgcgtgtcactccactgtaacttaaatgagcacaaccaccatctgattaatgatttcacgattaaacagatgcgtcaaggcgcattcctggttaatgccgctagaggcggtttggtggatgaaaaagccctggcacaggcgctgaaggagggcagaattcggggagcagcactggatgtgcacgaaagcgaaccattcagctttgctcagggacccctcaaggacgcccctaatcttatttgcaccccgcatacagcctggtactctgagcaggcctcattggaaatgcgcgaggcggcagccaccgagattaggagagcgattaccggtaggatccctgaatcgctgaggaattgtgtgaataaagagttcttcgtgacctcagccccatggtccgtgattgatcagcaggccattcaccctgaactgaatggcgcaacttacagatatcctccaggaattgtgggtgtcgctccaggcggactgcccgcagctatggaaggaatcattccaggcggtatacccgtaacccataaccttccaactgtcgctcatccatctcaggcccctagtcccaatcagcccacgaaacatggcgataaccgtgaacatcccaatgaacagtag

SEQ ID NO: 109141 - protein, 455 aa, Artificial Sequence
  derived and/or modified sequence
MTTSGHACPVPAVNGHMTHYPATPYPLLFPPVIGGLSLPPLHGLHGHPPPSGCSTPSPATIETQSTSSEELVPSPPSPLPPPRVYKPCFVCQDKSSGYHYGVSACEGCKGFFRRSIQKNMIYTCHRDKNCVINKVTRNRCQYCRLQKCFEVGMSKESVRNDRNKKKKETSKQECTESYEMTAELDDLTEKIRKAHQETFPSLCQLGKYTTNSSADHRVRLDLGLWDKFSELATKCIIKIVEFAKRLPGFTGLTIADQITLLKAACLDILILRICTRYTPEQDTMTFSDGLTLNRTQMHNAGFGPLTDLVFTFANQLLPLEMDDTETGLLSAICLICGDRQDLEEPTKVDKLQEPLLEALKIYIRKRRPSKPHMFPKILMKITDLRSISAKGAERVITLKMEIPGSMPPLIQEMLENSEGHEPLTPSSSGNTAEHSPSISPSSVENSGVSQSPLVQ

SEQ ID NO: 109142 - protein, 441 aa, Artificial Sequence
  derived and/or modified sequence
MTTSGHACPVPAVNGHMTHYPATPYPLLFPPVIGGLSLPPLHGLHGHPPPSGCSTPSPATIETQSTSSEELVPSPPSPLPPPRVYKPCFVCQDKSSGYHYGVSACEGCKGFFRRSIQKNMIYTCHRDKNCVINKVTRNRCQYCRLQKCFEVGMSKESVRNDRNKKKKETSKQECTESYEMTAELDDLTEKIRKAHQETFPSLCQLGKYTTNSSADHRVRLDLGLWDKFSELATKCIIKIVEFAKRLPGFTGLTIADQITLLKAACLDILILRICTRYTPEQDTMTFSDGLTLNRTQMHNAGFGPLTDLVFTFANQLLPLEMDDTETGLLSAICLICGDRQDLEEPTKVDKLQEPLLEALKIYIRKRRPSKPHMFPKILMKITDLRSISAKGAERVITLKMEIPEGHEPLTPSSSGNTAEHSPSISPSSVENSGVSQSPLVQ

SEQ ID NO: 109143 - DNA, 1368 bp, Artificial Sequence
  derived and/or modified sequence
atgaccaccagcggccacgcctgccccgtgcccgccgtgaacggccacatgacccactaccccgccaccccctaccccctgctgttcccccccgtgatcggcggcctgagcctgccccccctgcacggcctgcacggccaccccccccccagcggctgcagcacccccagccccgccaccatcgagacccagagcaccagcagcgaggagctggtgcccagcccccccagccccctgcccccccccagagtgtacaagccctgcttcgtgtgccaggacaagagcagcggctaccactacggcgtgagcgcctgcgagggctgcaagggcttcttcagaagaagcatccagaagaacatgatctacacctgccacagagacaagaactgcgtgatcaacaaggtgaccagaaacagatgccagtactgcagactgcagaagtgcttcgaggtgggcatgagcaaggagagcgtgagaaacgacagaaacaagaagaagaaggagaccagcaagcaggagtgcaccgagagctacgagatgaccgccgagctggacgacctgaccgagaagatcagaaaggcccaccaggagaccttccccagcctgtgccagctgggcaagtacaccaccaacagcagcgccgaccacagagtgagactggacctgggcctgtgggacaagttcagcgagctggccaccaagtgcatcatcaagatcgtggagttcgccaagagactgcccggcttcaccggcctgaccatcgccgaccagatcaccctgctgaaggccgcctgcctggacatcctgatcctgagaatctgcaccagatacacccccgagcaggacaccatgaccttcagcgacggcctgaccctgaacagaacccagatgcacaacgccggcttcggccccctgaccgacctggtgttcaccttcgccaaccagctgctgcccctggagatggacgacaccgagaccggcctgctgagcgccatctgcctgatctgcggcgacagacaggacctggaggagcccaccaaggtggacaagctgcaggagcccctgctggaggccctgaagatctacatcagaaagagaagacccagcaagccccacatgttccccaagatcctgatgaagatcaccgacctgagaagcatcagcgccaagggcgccgagagagtgatcaccctgaagatggagatccccggcagcatgccccccctgatccaggagatgctggagaacagcgagggccacgagcccctgacccccagcagcagcggcaacaccgccgagcacagccccagcatcagccccagcagcgtggagaacagcggcgtgagccagagccccctggtgcagtag

SEQ ID NO: 109144 - DNA, 1326 bp, Artificial Sequence
  derived and/or modified sequence
atgaccaccagcggccacgcctgccccgtgcccgccgtgaacggccacatgacccactaccccgccaccccctaccccctgctgttcccccccgtgatcggcggcctgagcctgccccccctgcacggcctgcacggccaccccccccccagcggctgcagcacccccagccccgccaccatcgagacccagagcaccagcagcgaggagctggtgcccagcccccccagccccctgcccccccccagagtgtacaagccctgcttcgtgtgccaggacaagagcagcggctaccactacggcgtgagcgcctgcgagggctgcaagggcttcttcagaagaagcatccagaagaacatgatctacacctgccacagagacaagaactgcgtgatcaacaaggtgaccagaaacagatgccagtactgcagactgcagaagtgcttcgaggtgggcatgagcaaggagagcgtgagaaacgacagaaacaagaagaagaaggagaccagcaagcaggagtgcaccgagagctacgagatgaccgccgagctggacgacctgaccgagaagatcagaaaggcccaccaggagaccttccccagcctgtgccagctgggcaagtacaccaccaacagcagcgccgaccacagagtgagactggacctgggcctgtgggacaagttcagcgagctggccaccaagtgcatcatcaagatcgtggagttcgccaagagactgcccggcttcaccggcctgaccatcgccgaccagatcaccctgctgaaggccgcctgcctggacatcctgatcctgagaatctgcaccagatacacccccgagcaggacaccatgaccttcagcgacggcctgaccctgaacagaacccagatgcacaacgccggcttcggccccctgaccgacctggtgttcaccttcgccaaccagctgctgcccctggagatggacgacaccgagaccggcctgctgagcgccatctgcctgatctgcggcgacagacaggacctggaggagcccaccaaggtggacaagctgcaggagcccctgctggaggccctgaagatctacatcagaaagagaagacccagcaagccccacatgttccccaagatcctgatgaagatcaccgacctgagaagcatcagcgccaagggcgccgagagagtgatcaccctgaagatggagatccccgagggccacgagcccctgacccccagcagcagcggcaacaccgccgagcacagccccagcatcagccccagcagcgtggagaacagcggcgtgagccagagccccctggtgcagtag

SEQ ID NO: 109145 - DNA, 1368 bp, Artificial Sequence
  derived and/or modified sequence
atgacaacttccggtcatgcctgtcccgtacccgccgtgaatggacatatgacacactatcctgcaaccccttacccactcctgttcccccccgtcatcggggggctcagcctaccaccccttcacgggctacacggacacccccccccatcaggctgcagcacgccctccccggccaccattgaaacccagagtactagttccgaggaactcgtacccagccccccttccccgctcccccctcccagggtatataagccctgttttgtgtgccaagacaagtctagcggatatcattatggggtctcagcttgcgagggatgtaaagggttcttcaggcgctcgattcaaaaaaacatgatatatacatgccatcgggacaagaactgcgtgataaataaggtgacgcgcaaccgctgccaatactgtcgtcttcagaagtgctttgaagttggcatgtctaaagaatctgttagaaacgatcggaataagaagaagaaagagacaagtaaacaggagtgcactgaatcctacgaaatgactgctgaactggatgatctaactgagaagattcgcaaggcacaccaagagacctttccctcactttgtcagctgggaaagtataccaccaacagctcagctgaccatcgcgttcgcctggacctgggcttgtgggataagttcagtgaactcgctactaaatgtatcatcaaaatcgttgaatttgccaaaagactgcccggcttcaccggtctgacaatcgctgaccaaatcacccttctgaaagccgcgtgcttggacattctgatactgagaatttgtacacgctatacccctgaacaggatacgatgacattttcagacggcctcacattaaacaggacccagatgcacaacgctggctttggtccactgactgacctcgtctttactttcgccaaccagctgctcccactggaaatggatgacactgagaccgggcttttgtcggctatctgcttgatctgcggagaccggcaggatctggaggaaccaaccaaagtcgataaattgcaggagccccttctagaagctctgaagatctatatacgcaaacgaagaccatccaaacctcatatgttcccaaaaattctgatgaagataaccgacttgaggagtatctctgcaaagggagcagagagggtgattacactaaagatggagatccctgggtccatgccaccccttattcaggagatgttggagaatagtgagggtcatgaacccctgactccatcatcttccggcaacaccgctgaacacagtccatcaataagcccgagttccgtggaaaattccggggtgtctcaatcccctcttgtgcagtag

SEQ ID NO: 109146 - DNA, 1326 bp, Artificial Sequence
  derived and/or modified sequence
atgaccacctccggccacgcctgcccagtgccagccgtcaacggacacatgacccactaccccgccacaccttacccactcctgtttcctcctgtcattggcggcctgtccttacctcctctgcacggactgcatgggcatccacctcctagcggctgctccacaccaagtcctgccaccattgagacacagtctaccagctctgaagaattagtgccatcccccccatctccccttccaccccctcgtgtgtacaagccgtgcttcgtgtgccaagataagtctagcggttatcattatggcgttagcgcttgtgaaggctgcaaaggtttcttccgccgatctatccaaaaaaatatgatatatacttgtcacagagacaaaaattgcgtgataaataaggtaacccggaacagatgtcaatattgtcgcctccagaagtgtttcgaggtggggatgtcaaaggaaagcgtccgtaacgacagaaacaaaaagaaaaaagagacctctaagcaggaatgtaccgaaagctatgagatgacagcagagctggatgatctcaccgagaagattcgaaaggctcaccaggaaacgttcccttccctgtgtcaactggggaagtacactactaattcatcagccgatcaccgggtaagactcgacctgggactgtgggataagttttcagaactggccactaaatgcattattaagatcgtggaattcgcgaaaagactcccaggtttcaccggactgaccatagctgatcaaatcacactcctgaaagcagcatgcttggacattctgatactccggatctgcacacgttataccccggaacaggatactatgacattttccgatggactgacgctgaaccgcacccagatgcacaacgctggttttggaccgctaactgacctagtgttcacattcgctaatcagttgctgcctctcgagatggatgatacagagactggactgctttctgccatctgcttgatatgtggggacaggcaagacctcgaagaaccaaccaaggttgacaagctccaggaacctctgctagaggctttgaagatctatattaggaagcggagaccgtctaaaccgcacatgttccccaagatcctcatgaaaatcaccgacttacgatcgatctctgcaaaaggcgcagagagggttatcaccctgaaaatggagatcccagagggccacgaacccctgacaccttcatcctcaggaaacaccgcagaacattcacccagtataagcccatcctcggtagagaattctggagtgtcccagtctccgctggtgcagtag

SEQ ID NO: 109147 - DNA, 1368 bp, Artificial Sequence
  derived and/or modified sequence
atgaccaccagcggccacgcctgccctgtgcctgctgtgaatggccacatgacccactacccagccaccccctaccccctgctcttcccccctgtgattggaggcctgagcctgccccccctgcacggcctgcacggccaccccccaccttctggctgcagcacccccagccctgccaccatcgagacccagagcaccagcagcgaggagctggtgcccagcccccccagccccctgcccccaccccgggtgtacaagccctgctttgtgtgccaggacaagagcagcggctaccactacggcgtgtctgcctgtgagggctgcaagggcttcttcagaagaagcatccagaagaacatgatctacacctgccaccgggacaagaactgtgtgatcaacaaggtgaccaggaaccgctgccagtactgccgcctgcagaagtgctttgaggtgggcatgagcaaggagagcgtgagaaatgacaggaacaagaagaagaaggagaccagcaagcaggagtgcacagagagctatgagatgacagctgagctggatgacctgacagagaagatcaggaaggcccaccaggagaccttccccagcctgtgccagctgggcaagtacaccaccaacagcagcgctgaccaccgggtgcggctggacctgggcctgtgggacaagttcagcgagctggccaccaagtgcatcatcaagatcgtggagtttgccaagaggctgcccggcttcaccggcctgaccatcgctgaccagatcaccctgctgaaggccgcctgcctggacatcctgatcctgcgcatctgcacccgctacaccccagagcaggacaccatgaccttcagtgatggcctgaccctgaacagaacccagatgcacaatgccggcttcggccccctgacagacctggtgttcacctttgccaaccagctgctgcccctggagatggatgacacagagaccggcctgctgagcgccatctgcctgatctgtggggaccggcaggacctggaggagcccaccaaggtggacaagctgcaggagcccctgctggaggccctgaagatctacatcaggaagaggcggcccagcaagccccacatgttccccaagatcctgatgaagatcacagacctgcggagcatcagcgccaagggagctgagagggtcatcaccctgaagatggagatccctggctccatgcctcctctcatccaggagatgctggagaacagcgagggccacgagcccctgacccccagcagcagcggcaacacagctgagcacagccccagcatcagccccagctctgtggagaacagcggcgtgtcccagagccccctggtgcagtag

SEQ ID NO: 109148 - DNA, 1326 bp, Artificial Sequence
  derived and/or modified sequence
atgaccaccagcggccacgcctgccctgtgcctgctgtgaatggccacatgacccactacccagccaccccctaccccctgctcttcccccctgtgattggaggcctgagcctgccccccctgcacggcctgcacggccaccccccaccttctggctgcagcacccccagccctgccaccatcgagacccagagcaccagcagcgaggagctggtgcccagcccccccagccccctgcccccaccccgggtgtacaagccctgctttgtgtgccaggacaagagcagcggctaccactacggcgtgtctgcctgtgagggctgcaagggcttcttcagaagaagcatccagaagaacatgatctacacctgccaccgggacaagaactgtgtgatcaacaaggtgaccaggaaccgctgccagtactgccgcctgcagaagtgctttgaggtgggcatgagcaaggagagcgtgagaaatgacaggaacaagaagaagaaggagaccagcaagcaggagtgcacagagagctatgagatgacagctgagctggatgacctgacagagaagatcaggaaggcccaccaggagaccttccccagcctgtgccagctgggcaagtacaccaccaacagcagcgctgaccaccgggtgcggctggacctgggcctgtgggacaagttcagcgagctggccaccaagtgcatcatcaagatcgtggagtttgccaagaggctgcccggcttcaccggcctgaccatcgctgaccagatcaccctgctgaaggccgcctgcctggacatcctgatcctgcgcatctgcacccgctacaccccagagcaggacaccatgaccttcagtgatggcctgaccctgaacagaacccagatgcacaatgccggcttcggccccctgacagacctggtgttcacctttgccaaccagctgctgcccctggagatggatgacacagagaccggcctgctgagcgccatctgcctgatctgtggggaccggcaggacctggaggagcccaccaaggtggacaagctgcaggagcccctgctggaggccctgaagatctacatcaggaagaggcggcccagcaagccccacatgttccccaagatcctgatgaagatcacagacctgcggagcatcagcgccaagggagctgagagggtcatcaccctgaagatggagatccctgagggccacgagcccctgacccccagcagcagcggcaacacagctgagcacagccccagcatcagccccagctctgtggagaacagcggcgtgtcccagagccccctggtgcagtag

SEQ ID NO: 109149 - DNA, 1368 bp, Artificial Sequence
  derived and/or modified sequence
atgaccaccagcggccacgcctgccccgtgcccgccgtgaacggccacatgacccactaccctgctacaccctatccactcctatttccacctgtaatcggcggtctctctctgcctccccttcacgggcttcacggccacccacctcccagcggatgctctacacctagccctgcaaccatcgagactcagtctacatcctccgaggagctcgtcccgtctccaccatcgccccttccccctcccagggtgtataaaccttgctttgtgtgtcaggataagtcctccggctaccactacggagtgtcagcctgcgagggttgcaagggtttctttaggcggagcatacagaaaaacatgatttatacttgccaccgggataagaactgcgtgatcaacaaagtgacacgcaaccgctgtcaatactgtaggctgcaaaagtgctttgaggtgggcatgtcaaaagagtcagtgaggaacgacaggaataagaaaaaaaaggagacttctaagcaggaatgcactgagtcttatgagatgaccgcagagctagacgacttaaccgaaaagataagaaaagcacatcaggagactttcccgagcctctgccagctgggcaagtatactactaacagctccgcagatcatagagtccgtttagatctgggcctgtgggataaattttccgaactggctacgaagtgcatcattaaaatcgttgagttcgctaaaagactgcccggctttaccggtctgaccatcgcggatcagatcactctcctgaaggccgcgtgcctggacatactgatactccgtatttgcacccgctatacgcccgaacaggatacaatgacgtttagtgacggtttgaccctaaaccggacacagatgcataacgcaggatttggccccttaaccgaccttgtgttcacgtttgctaatcagctgcttcctctcgaaatggacgataccgaaacagggctgctctccgcaatctgtctgatttgtggggacagacaagatctggaagagccgaccaaagttgacaagctgcaggagcctttgttggaggcgctaaagatctacatacgcaaaaggcggccctccaaacctcacatgttccctaagatcttgatgaagatcaccgatttaaggtcaatcagcgctaaaggtgcagagagagtgatcacccttaagatggaaatccctggatcaatgcctcccctgatccaagaaatgctggagaatagtgaaggccacgagccactaaccccgagctcgtctggcaacacagccgagcatagtccctctatcagccctagttcggttgagaattcgggtgtatctcagtcccccctggtgcagtag

SEQ ID NO: 109150 - DNA, 1326 bp, Artificial Sequence
  derived and/or modified sequence
atgaccaccagcggccacgcctgccccgtgcccgccgtgaacggccatatgacgcactaccccgcgactccatatccactgctatttccacccgtgattggagggttatcactgcctcctctgcacgggctgcacggccacccaccgccaagcgggtgttctaccccatcgcctgccacaattgaaactcagagtacttcctccgaagagctcgtgccctccccacctagtccgttgcccccccctcgagtgtacaaaccatgttttgtgtgtcaggacaaaagttctggataccactacggagtaagcgcatgtgaagggtgtaaaggattttttcgaaggtccatccagaaaaacatgatatacacctgccaccgtgacaaaaattgtgtcattaacaaggtaacgcggaatcgatgtcagtattgtcggctgcagaagtgcttcgaggtgggaatgtccaaagagagcgtccgcaacgacagaaacaaaaagaagaaagagaccagtaaacaggaatgtaccgagtcttacgagatgaccgccgagctggacgacctgaccgagaagatccgcaaggctcaccaagagacctttccctcactgtgccagcttggaaagtatacaacgaatagctcagcagaccacagggtaaggcttgatctaggcctgtgggacaagttttcagagctagccaccaagtgtattattaagattgtggagttcgccaaaagacttcctggcttcacgggtctgacaatcgccgaccaaattaccctcctaaaggctgcatgtctcgacattttgatccttaggatctgtacacggtacacccccgagcaggatacaatgaccttctctgatgggctgacactgaacagaacacagatgcataacgccggctttggacctctaaccgacctggtctttacattcgccaaccagctccttccactggaaatggatgataccgaaacaggcctgctgtctgctatctgtctgatctgcggcgataggcaggacttggaagagcccacgaaagtcgacaaactgcaggagccgttactggaagcgctgaagatttatatcagaaaacggcgtccaagcaagccgcatatgtttcctaaaattctgatgaagatcaccgaccttagatccatatcagcaaagggggccgagcgcgtcatcactttgaagatggaaattcctgaggggcatgaaccactgaccccaagctcatctggcaacaccgccgagcacagcccttcaatttccccatcttcggtggagaacagcggagtttcacaatctcccctggtgcagtag

SEQ ID NO: 109151 - DNA, 1368 bp, Artificial Sequence
  derived and/or modified sequence
atgacgaccagcggacacgcctgtcctgtccccgcagttaacggacacatgacacactaccctgccacaccataccctctcttgtttccccctgtcattggcggactgtctctccctccgttgcatggcctgcatgggcacccacctcccagcgggtgcagcactcccagcccagctacgatcgaaactcagagcacaagtagtgaagaactggttccctcccccccttcccccttgccaccacccagggtatacaagccatgcttcgtgtgccaagataagagtagtgggtatcactacggtgtgagtgcgtgtgaaggctgtaagggctttttcagacgttccatccagaaaaacatgatttacacttgtcaccgggacaagaactgcgttatcaacaaggtgactagaaaccggtgtcagtattgccggctccagaaatgcttcgaagtcgggatgtctaaggagtccgtccgcaatgaccgcaataagaagaagaaagaaacttcgaagcaggagtgcaccgagagctacgagatgacggccgaactggatgatcttactgagaaaattcgaaaggctcaccaggagacatttccctctctctgtcaattaggaaaatacaccacaaacagtagcgcagatcacagagtgagactcgatttaggactgtgggataaattttctgagctggcaacaaagtgtattatcaaaattgtggagtttgcgaaaaggctgcccggattcaccgggttgactatcgccgatcagattaccctactgaaagctgcctgtctggacattttgatcctcaggatctgcacacgttacacaccagagcaggataccatgacatttagtgacgggttaacactcaatagaacacagatgcataacgctgggttcgggcctttgacagatctggtttttacatttgccaaccagctccttcctcttgaaatggacgacactgaaaccggcttgttgagcgcaatttgccttatttgtggcgatcggcaggacctggaagagcctaccaaggtggacaagctgcaggaaccccttctggaggctctgaagatttacatacgtaagagacgcccttccaagccgcatatgttccccaagatacttatgaaaataacagacctcaggtccatcagtgctaagggtgctgagagagtgatcaccctgaagatggaaatccctggtagcatgcctccactgatacaggagatgctggagaattcggaaggccatgaacctctcactccctcttcgagtggcaatactgcagagcacagtcccagtatcagcccatcttcggtcgagaattcaggggtaagccagagtcctctggtgcagtag

SEQ ID NO: 109152 - DNA, 1326 bp, Artificial Sequence
  derived and/or modified sequence
atgacaaccagtggccatgcatgtcccgtgccggctgtgaatggacatatgacacattaccccgcaacgccttaccccctgcttttcccacccgtcatcgggggtctgtctctcccacctttacatggtcttcatggacaccctcccccatccggatgtagtacacctagcccagccaccattgagacacaatccactagttcagaagaactggtcccaagccctccatcaccactgccccctcctagagtgtataagccgtgctttgtgtgtcaggacaagtccagtgggtaccactatggagtgtcagcgtgcgagggatgtaaagggtttttcaggagatctatccagaagaacatgatctacacttgccaccgggataagaactgcgttattaataaggtgacacggaatagatgccaatattgccgcttacagaaatgcttcgaagttggtatgtccaaggaaagcgtccgaaacgacagaaacaagaagaaaaaggagaccagtaagcaggaatgtaccgaaagttacgaaatgacagcagaactcgacgacttaactgaaaaaatcagaaaagcacatcaggagaccttcccatcactctgccagctcggtaaatacacaaccaactctagtgccgaccatagagtgagactcgatctcgggctctgggataaattttccgaacttgcaaccaagtgcatcatcaagattgtagagtttgcaaaacgcctgcccggtttcaccggtcttaccattgcagaccaaatcacactgctcaaagccgcatgccttgatatccttatcctcagaatctgcacgaggtatacccccgagcaggacaccatgacattctcagatgggctgaccctgaatcgaacgcagatgcacaacgccggtttcggaccactgaccgatttagtgtttactttcgccaaccagttgctgccactggagatggatgacacagaaaccggtctgctgtccgctatctgtttgatctgtggcgatcgacaggacctggaggagcctactaaagttgacaagcttcaagagccactactggaagctctgaagatctatatcaggaagagaagaccttcaaaaccccacatgttcccaaagattctaatgaaaatcaccgacctgagatcaattagcgctaagggagctgagcgtgtgatcactctcaagatggagattcctgaaggccacgaacccctgacccccagctcttccggaaataccgcagagcatagcccttcaatctcaccatctagcgttgaaaattccggggtttctcagagccccttagtccagtag

SEQ ID NO: 109153 - DNA, 1368 bp, Artificial Sequence
  derived and/or modified sequence
atgaccaccagcggccacgcatgtccggtcccagcagtgaacggacacatgactcactatccagccacaccctacccgttactctttccacctgtcatcggaggactttccctgcctcccctccatggccttcatggacatccgcctccgagtggatgcagcaccccgtcgccggcaacaattgaaacacagagcaccagctctgaggaactcgtcccaagccccccatctccacttcctccccctcgagtgtacaaaccctgcttcgtctgccaggacaaatcatcagggtaccactatggggtcagcgcctgtgagggatgtaagggctttttccgcagaagtattcagaagaatatgatttacacttgtcaccgagataagaactgtgttattaataaagtcaccaggaatcgatgccaatactgtcgactccagaagtgctttgaagtgggaatgtccaaagaatctgtcaggaatgacaggaacaagaaaaagaaggagacttcgaagcaagaatgcacagagagctatgaaatgacagctgagttggacgatctcacagagaagatccgaaaagctcaccaggaaactttcccttcactctgccagctgggtaaatacaccacgaattccagtgctgaccatcgagtccgactggacctgggcctctgggacaaattcagtgaactggccaccaagtgcattattaagatcgtggagtttgctaaacgtctgcctggtttcactggcttgaccatcgcagaccaaattaccctgctgaaggccgcctgcctggacatcctgattcttagaatttgcaccaggtataccccagaacaagacaccatgactttctcagacggccttaccctaaatcgaactcagatgcacaatgctggatttggtcctctgactgaccttgtgttcacctttgccaaccagctcctgcctttggaaatggatgacacagaaacaggccttctcagtgccatctgcttaatctgtggagaccgccaggaccttgaggaaccgacaaaagtagataagctacaagaaccattgctggaagcactaaaaatttatatcagaaaaagacgacccagcaagcctcacatgtttccaaagatcttaatgaaaatcacagatctccgtagcatcagtgctaaaggtgcagagcgtgtaattaccttgaaaatggaaattcctggatcaatgccacctctcattcaagaaatgctggagaattctgaaggacatgaacccttgaccccaagttcaagtgggaacacagcagagcacagtcctagcatctcacccagctcagtggaaaacagtggggtcagtcagtcaccactcgtgcaataa

SEQ ID NO: 109154 - DNA, 1326 bp, Artificial Sequence
  derived and/or modified sequence
atgaccaccagcggccacgcatgtccggtcccagcagtgaacggacacatgactcactatccagccacaccctacccgttactctttccacctgtcatcggaggactttccctgcctcccctccatggccttcatggacatccgcctccgagtggatgcagcaccccgtcgccggcaacaattgaaacacagagcaccagctctgaggaactcgtcccaagccccccatctccacttcctccccctcgagtgtacaaaccctgcttcgtctgccaggacaaatcatcagggtaccactatggggtcagcgcctgtgagggatgtaagggctttttccgcagaagtattcagaagaatatgatttacacttgtcaccgagataagaactgtgttattaataaagtcaccaggaatcgatgccaatactgtcgactccagaagtgctttgaagtgggaatgtccaaagaatctgtcaggaatgacaggaacaagaaaaagaaggagacttcgaagcaagaatgcacagagagctatgaaatgacagctgagttggacgatctcacagagaagatccgaaaagctcaccaggaaactttcccttcactctgccagctgggtaaatacaccacgaattccagtgctgaccatcgagtccgactggacctgggcctctgggacaaattcagtgaactggccaccaagtgcattattaagatcgtggagtttgctaaacgtctgcctggtttcactggcttgaccatcgcagaccaaattaccctgctgaaggccgcctgcctggacatcctgattcttagaatttgcaccaggtataccccagaacaagacaccatgactttctcagacggccttaccctaaatcgaactcagatgcacaatgctggatttggtcctctgactgaccttgtgttcacctttgccaaccagctcctgcctttggaaatggatgacacagaaacaggccttctcagtgccatctgcttaatctgtggagaccgccaggaccttgaggaaccgacaaaagtagataagctacaagaaccattgctggaagcactaaaaatttatatcagaaaaagacgacccagcaagcctcacatgtttccaaagatcttaatgaaaatcacagatctccgtagcatcagtgctaaaggtgcagagcgtgtaattaccttgaaaatggaaattcctgaaggacatgaacccttgaccccaagttcaagtgggaacacagcagagcacagtcctagcatctcacccagctcagtggaaaacagtggggtcagtcagtcaccactcgtgcaataa

SEQ ID NO: 109155 - protein, 193 aa, Artificial Sequence
  derived and/or modified sequence
MAGKKVLIVYAHQEPKSFNGSLKNVAVDELSRQGCTVTVSDLYAMNLEPRATDKDITGTLSNPEVFNYGVETHEAYKQRSLASDITDEQKKVREADLVIFQGKLALLSVTTGGTAEMYTKTGVNGDSRYFLWPLQHGTLHFCGFKVLAPQISFAPEIASEEERKGMVAAWSQRLQTIWKEEPIPCTAHWHFGQ

SEQ ID NO: 109156 - protein, 160 aa, Artificial Sequence
  derived and/or modified sequence
TPGLKQSSHLSLWSSWDYRLLDSLKRDYAGKPQPPIKSERRNPPSYAMAGKKVLIVYAHQEPKSFNGSLKNVAVDELSRQGCTVTVSDLYAMNLEPRATDKDITGTLSNPEVFNYGVETHEAYKQRSLASDITDEQKKVREADLVIFQMLSTELSLTSRC

SEQ ID NO: 109157 - DNA, 582 bp, Artificial Sequence
  derived and/or modified sequence
atggcaggcaagaaggtgttgatcgtgtacgcacaccaggagcccaagtccttcaacgggagcttaaagaatgtggcagtcgatgagctgtctcggcagggatgtaccgttactgtatccgacctgtacgctatgaatctggagccacgggccaccgacaaagatattactggcaccttgagtaaccccgaggtgttcaactatggcgtggagactcatgaggcgtataagcagcgttccctggcctccgacataactgacgagcagaagaaggtgagggaggcagacctcgtgatttttcaaggcaaactcgcgctcctgtcggtcacgaccggggggactgccgagatgtacaccaaaacaggagtcaatggagactcccgatacttcctgtggcctttacagcacggcaccctgcacttttgcgggttcaaagtcctggccccgcagatctcttttgcccctgagatcgccagtgaagaagagaggaaggggatggttgccgcttggagtcagagactgcagaccatctggaaagaagagccaattccatgtaccgcccattggcactttgggcagtag

SEQ ID NO: 109158 - DNA, 582 bp, Artificial Sequence
  derived and/or modified sequence
atggccgggaaaaaagtgctcatcgtctacgcccatcaggaaccaaagagtttcaacggatcactgaagaacgtcgctgtggatgagctgagcagacagggctgcaccgttacggtctctgacctctatgctatgaatctggagcccagggccactgacaaagacataactggtacgctgtcaaatcctgaagtgttcaattacggcgtggaaacgcacgaagcctacaaacaaaggtctctggcaagtgacattaccgatgaacaaaagaaagtccgagaggcagaccttgtgatttttcagggcaaactggctttactgtctgtgacaaccggcggcaccgcagagatgtataccaaaactggcgttaacggagactctcgatactttttatggccacttcagcacggcaccctccacttttgtggcttcaaggttttagcccctcagatttccttcgctcctgagatcgctagcgaagaggaaaggaagggtatggtggccgcttggagccaacgcctccaaacgatttggaaagaggagccaatcccctgtacggcacactggcacttcgggcagtag

SEQ ID NO: 109159 - DNA, 483 bp, Artificial Sequence
  derived and/or modified sequence
acccctggtttaaagcaaagctcacatctctctctgtggtcgagctgggactacaggttgctcgatagcctgaaacgagactatgcagggaaacctcagcctccgattaaatccgagaggcgcaacccgccaagctacgctatggcaggtaagaaagtcctcattgtatatgcgcaccaagagccaaagtcctttaatggtagcctaaagaatgtcgctgttgatgaacttagtagacagggctgcacagtcacagtgagcgacctgtacgcaatgaatttggagccccgggccacagataaagacattaccggaacacttagcaaccccgaggtgtttaattatggggtggaaactcacgaagcctacaaacagagaagcctcgcctcagacattaccgatgagcaaaagaaggtgagggaggctgacttggtaatattccaaatgctcagtaccgagctttcgctaactagtcggtgctag

SEQ ID NO: 109160 - DNA, 582 bp, Artificial Sequence
  derived and/or modified sequence
atggccggcaagaaggtgctgattgtgtatgcccaccaggagcccaagagcttcaacggcagcctgaagaatgtggccgtggatgagctgagccggcagggctgcaccgtgacagtgtctgacctgtatgccatgaacctggagccccgggccacagacaaggacatcaccggcaccctgagcaaccctgaggtgttcaactacggcgtggagacccatgaggcctacaagcagaggagcctggccagtgacatcacagatgagcagaagaaggtgcgggaggccgacctggtgatcttccagggcaagctggccctgctgtctgtgaccactggaggaacagctgagatgtacaccaagacaggagtgaatggagacagccgctacttcctgtggcccctgcagcacggcaccctgcacttctgtggcttcaaggtgctggccccccagatcagctttgcccctgagatcgccagcgaggaggagaggaagggcatggtggccgcctggagccagaggctgcagaccatctggaaggaggagcccatcccctgcacagcccactggcacttcggccagtag

SEQ ID NO: 109161 - DNA, 483 bp, Artificial Sequence
  derived and/or modified sequence
accccaggcctgaagcagagcagccacctgagcctgtggagctcctgggactaccgcctgctggacagcctgaagagggactatgccggcaagccccagccccccatcaagtctgagaggagaaatcctccttcctatgccatggccggcaagaaggtgctgattgtgtatgcccaccaggagcccaagagcttcaacggcagcctgaagaatgtggccgtggatgagctgagccggcagggctgcaccgtgacagtgtctgacctgtatgccatgaacctggagccccgggccacagacaaggacatcaccggcaccctgagcaaccctgaggtgttcaactatggagtggagacccatgaggcctacaagcagaggagcctggccagtgacatcacagatgagcagaagaaggtgcgggaggccgacctggtgatcttccagatgctgagcacagagctgagcctgaccagccgctgctag

SEQ ID NO: 109162 - DNA, 1021 bp, Artificial Sequence
  derived and/or modified sequence
cagtgcggccggaacctggcgcaactcctagagcggtccttggggagacgcgggtcccagtcctgcggctcctactggggagtgcgctggtcggaagggcacctggcctgggtggagcccactcctcagcacccacctcacttcttgcagtattctgcagaccccagccctgtgcctgtgctcctggacagctggagataaggagtgggccctggaagatgctcattcaggccctgctcaagattccagtcctgattgctggactcgctgaagagagactacgcaggaaagccccagccacccatcaaatcagagagaaggaatccaccttcttacgctatggcaggtaagaaagtactcattgtctatgcacaccaggaacccaagtctttcaacggatccttgaagaatgtggctgtagatgaactgagcaggcagggctgcaccgtcacagtgtctgatttgtatgccatgaaccttgagccgagggccacagacaaagatatcactggtactctttctaatcctgaggttttcaattatggagtggaaacccacgaagcctacaagcaaaggtctctggctagcgacatcactgatgagcagaaaaaggttcgggaggctgacctagtgatatttcagggtaaactagcgctcctttccgtaaccacgggaggcacggccgagatgtacacgaagacaggagtcaatggagattctcgatacttcctgtggccactccagcatggcacattacacttctgtggatttaaagtccttgcccctcagatcagctttgctcctgaaattgcatccgaagaagaaagaaaggggatggtggctgcgtggtcccagaggctgcagaccatctggaaggaagagcccatcccctgcacagcccactggcacttcgggcaataactctgtggcacgtgggcatcacgtaagcagcacactaggaggcccaggcgcaggcaaagagaagatggtgctgtcatgaaataaaattacaacatagcta

SEQ ID NO: 109163 - DNA, 851 bp, Artificial Sequence
  derived and/or modified sequence
acctggcgcaactcctagagcggtccttggggagacgcgggtcccagtcctgcggctcctactggggagtgcgctggtcggaagattgctggactcgctgaagagagactacgcaggaaagccccagccacccatcaaatcagagagaaggaatccaccttcttacgctatggcaggtaagaaagtactcattgtctatgcacaccaggaacccaagtctttcaacggatccttgaagaatgtggctgtagatgaactgagcaggcagggctgcaccgtcacagtgtctgatttgtatgccatgaaccttgagccgagggccacagacaaagatatcactggtactctttctaatcctgaggttttcaattatggagtggaaacccacgaagcctacaagcaaaggtctctggctagcgacatcactgatgagcagaaaaaggttcgggaggctgacctagtgatatttcagggtaaactagcgctcctttccgtaaccacgggaggcacggccgagatgtacacgaagacaggagtcaatggagattctcgatacttcctgtggccactccagcatggcacattacacttctgtggatttaaagtccttgcccctcagatcagctttgctcctgaaattgcatccgaagaagaaagaaaggggatggtggctgcgtggtcccagaggctgcagaccatctggaaggaagagcccatcccctgcacagcccactggcacttcgggcaataactctgtggcacgtgggcatcacgtaagcagcacactaggaggcccaggcgcaggcaaagagaagatggtgctgtcatgaaataaaattacaacatagcta

SEQ ID NO: 109164 - DNA, 975 bp, Artificial Sequence
  derived and/or modified sequence
actcctgggctcaagcaatcctcccacctaagcctctggagtagctgggactacagattgctggactcgctgaagagagactacgcaggaaagccccagccacccatcaaatcagagagaaggaatccaccttcttacgctatggcaggtaagaaagtactcattgtctatgcacaccaggaacccaagtctttcaacggatccttgaagaatgtggctgtagatgaactgagcaggcagggctgcaccgtcacagtgtctgatttgtatgccatgaaccttgagccgagggccacagacaaagatatcactggtactctttctaatcctgaggttttcaattatggagtggaaacccacgaagcctacaagcaaaggtctctggctagcgacatcactgatgagcagaaaaaggttcgggaggctgacctagtgatatttcagatgctcagcaccgaactcagtctgacttccagatgctaacaacacaccccaggcaggcgaaggggcatgcttttccatactcttccttttgactggcttgatcacagactgctgctccaaagctggtgttacgcacagctcctcgtcccctccctgcctgcccagggccagcatcaggggctgtcatcactgggggatgcagagctacctgtaacagcaacaaggaccattgtcaactccgttcccgtctgacacccacactgcacctttcagagctgaccataagggttaccctcacctgcccagctgccagggaagaggagggctgtgggcttcattccgaatcaccagataaactaaactaggaaacctgaggcgagccgcagcctcagtttctctttggtgttgccgcccacagttcccgctgtactggttcagcgtgccagccatcctgaagggctggatggatagggtgctgtgccagggctttgcctttgacatcccaggattctacgattccggtttgctcca

SEQ ID NO: 109165 - DNA, 582 bp, Artificial Sequence
  derived and/or modified sequence
atggccggcaagaaggtgctgatcgtgtacgcccaccaggagcccaagtcttttaatggctctctcaaaaatgtggcggtggacgagctatcgagacagggatgtaccgtcacagtctcagatctctacgcaatgaatttggagccccgggccaccgataaagatataacaggtactcttagtaacccggaagttttcaattacggggtcgaaactcacgaagcatataagcagagaagtctggccagcgacattactgatgaacaaaagaaagtgcgcgaagcagatctcgtgatcttccagggaaagttggcgctgctaagcgtgactacaggaggcacggcagagatgtacacaaagactggcgtgaacggggacagccgctattttctctggcctctgcagcacggcacccttcacttctgcggcttcaaagttctggcccctcagatatcttttgcaccagagatcgcatccgaagaggagagaaagggcatggtcgccgcctggagccagaggctccagaccatttggaaggaagagccaatcccgtgcaccgcgcattggcactttggtcagtag

SEQ ID NO: 109166 - DNA, 582 bp, Artificial Sequence
  derived and/or modified sequence
atggccggcaagaaggtgctgatcgtgtacgcccaccaggagcccaaatccttcaacggttcactgaagaatgttgctgtcgacgagctttcacggcaggggtgcactgtgactgtttccgatctgtatgccatgaacttggagcctagagctacggataaggacatcactggtactttatccaaccccgaggtctttaattacggggttgaaactcacgaggcttacaaacagaggagtctagcctccgatataactgatgagcagaaaaaggtgcgggaagcggatctggtcattttccagggcaagctggccttactgtccgtcaccacgggggggaccgcagaaatgtacacgaaaaccggcgtgaatggagactctcgctatttcttatggccactgcagcatggcacactccacttttgtggatttaaggttctggcccctcagattagctttgctcctgagatcgcctctgaagaggagcgcaaggggatggttgcagcttggagccagagacttcagactatctggaaggaggaaccgatcccatgtaccgcccattggcattttggacagtag

SEQ ID NO: 109167 - DNA, 483 bp, Artificial Sequence
  derived and/or modified sequence
acccccggcctgaagcagagcagccacctgagcctgtggagcagctgggactatcgcctgttagatagcttaaagcgggattatgcggggaagccccagcccccaattaaatctgagagaagaaatcccccctcttatgccatggcaggaaagaaagttctcatagtgtatgcccaccaggagccgaagtccttcaacgggagcctaaagaacgtggccgttgacgaactctcccgacagggttgtacagtgacagtcagtgatctgtacgctatgaatctggaaccacgtgcgactgacaaggatatcaccggcaccctctccaatcccgaagtgtttaattacggggttgaaacacatgaggcatacaaacaacgctcattggcctccgatatcaccgatgaacaaaaaaaggtgagagaggctgatctggtgatttttcagatgctgtccacggaattgagcctgacctcacgctgttag

SEQ ID NO: 109168 - DNA, 582 bp, Artificial Sequence
  derived and/or modified sequence
atggccggtaaaaaggtgctcattgtgtatgcccaccaggagcccaagagctttaacggcagtctgaagaacgtagccgtggatgaactcagccgacagggttgtacagtgactgtctcagacctgtatgcaatgaacttagaacctagggctacagacaaggacataacaggcaccctttctaatccagaggtgttcaactatggtgtggagacccacgaggcttataaacagaggtccctggcatcagacataaccgacgagcaaaaaaaggtccgcgaagctgacttagtcatctttcaaggaaaactcgcccttctcagcgttactactgggggaactgcggaaatgtataccaaaacaggcgtcaacggcgactcccgctacttcctgtggcccctgcagcacgggaccttgcatttctgtggattcaaggtcttggcacctcagatcagcttcgccccagagattgcctctgaagaggaacgtaagggcatggtggcagcttggtcccagcgactacagacgatttggaaggaggaacccatcccatgtactgctcactggcactttggacaatag

SEQ ID NO: 109169 - DNA, 582 bp, Artificial Sequence
  derived and/or modified sequence
atggcaggaaagaaagtcctcatagtctacgctcatcaggaacctaaaagtttcaatggcagcctgaaaaacgttgcggttgacgaacttagcagacaagggtgcactgtgacggtcagcgacttgtatgccatgaatttagaaccgcgagcaaccgataaggacattacggggacactgtctaaccctgaggtcttcaactatggagtggaaactcatgaagcatacaagcagcgcagtctggcatcagatattactgatgaacagaaaaaagtgagagaagccgacctggtgatatttcagggaaagcttgccctcctatcagtgactactggagggacggccgagatgtacactaaaactggagtgaatggtgactctagatatttcctctggccgctccagcatggcaccttgcatttctgcggatttaaagtactggcacctcagatatcattcgcccctgagattgcctcggaagaagagagaaagggaatggttgctgcttggtcacagaggttgcagactatttggaaagaggagccaatcccatgtacagcacattggcattttggacagtag

SEQ ID NO: 109170 - DNA, 483 bp, Artificial Sequence
  derived and/or modified sequence
accccgggactaaagcagtcaagccacctgtccttgtggagttcttgggactatcgcctgctagattcactcaaaagagactacgccggaaagcctcagcctcccattaaaagtgaacgacgcaatccaccctcatacgcaatggcgggtaagaaggtcttaatagtgtacgcacatcaggaaccaaagagctttaatggtagccttaagaatgtggctgtggatgagttgagccgtcagggatgtactgtgacagtgtctgacctctacgccatgaatctggagccaagagcaaccgacaaggatatcaccggaacattaagcaatcctgaggtgtttaactatggggtagagacacatgaggcctataaacagcgctccctggcttctgatatcacagatgaacagaagaaagtgcgtgaagctgacctggtgatttttcagatgctgtccactgagctgtccctcacttcaagatgttag

SEQ ID NO: 109171 - DNA, 582 bp, Artificial Sequence
  derived and/or modified sequence
atggccggcaagaaggtgctgatcgtgtacgcccaccaggagcccaagagcttcaacggcagcctgaagaacgtggccgtggacgagctgagcagacagggctgcaccgtgaccgtgagcgacctgtacgccatgaacctggagcccagagccaccgacaaggacatcaccggcaccctgagcaaccccgaggtgttcaactacggcgtggagacccacgaggcctacaagcagagaagcctggccagcgacatcaccgacgagcagaagaaggtgagagaggccgacctggtgatcttccagggcaagctggccctgctgagcgtgaccaccggcggcaccgccgagatgtacaccaagaccggcgtgaacggcgacagcagatacttcctgtggcccctgcagcacggcaccctgcacttctgcggcttcaaggtgctggccccccagatcagcttcgcccccgagatcgccagcgaggaggagagaaagggcatggtggccgcctggagccagagactgcagaccatctggaaggaggagcccatcccctgcaccgcccactggcacttcggccagtag

SEQ ID NO: 109172 - DNA, 483 bp, Artificial Sequence
  derived and/or modified sequence
acccccggcctgaagcagagcagccacctgagcctgtggagcagctgggactacagactgctggacagcctgaagagagactacgccggcaagccccagccccccatcaagagcgagagaagaaacccccccagctacgccatggccggcaagaaggtgctgatcgtgtacgcccaccaggagcccaagagcttcaacggcagcctgaagaacgtggccgtggacgagctgagcagacagggctgcaccgtgaccgtgagcgacctgtacgccatgaacctggagcccagagccaccgacaaggacatcaccggcaccctgagcaaccccgaggtgttcaactacggcgtggagacccacgaggcctacaagcagagaagcctggccagcgacatcaccgacgagcagaagaaggtgagagaggccgacctggtgatcttccagatgctgagcaccgagctgagcctgaccagcagatgctag

SEQ ID NO: 109173 - DNA, 984 bp, Artificial Sequence
  derived and/or modified sequence
atggagtacgccgtaaactgccatgttattacttgggagagaattattagccactttgatattttcgcttttggccacttctggggctgggcaatgaaagcattgctgattcggagctacggtttgtgttggacaattagcatcacttgggaactcacagagcttttcttcatgcacctgctacccaactttgccgagtgttggtgggaccaggtgatcttggacatcctcctgtgcaacggcggagggatctggctcggaatggtggtgtgcagatttctggaaatgcgcacgtatcattgggcctcattcaaggatattcacaccactaccggcaagattaagagggctgtcctccagttcactcccgcctcatggacgtatgtcagatggtttgatccaaaaagttccttccagcgggtggctggtgtgtacctctttatgatcatctggcagttaactgagctcaataccttttttctgaagcacatctttgtattccaggcttctcaccctctgagctggggccgcattctgtttatcgggggaatcaccgccccgactgtgcgccagtattatgcataccttacggatacacagtgcaaacgtgtgggtacacagtgttgggtatttggggtgattggttttctcgaagcgatagtatgcattaagttcgggcaggacctgttttccaaaacccagatcctatacgtggtactatggttgctttgtgtggcttttacgactttcctttgtttgtatggaatgatctggtatgccgaacattacggccatagagagaagacatacagtgagtgcgaagacggaacatatagcccggagatctcctggcatcaccggaagggcacaaaaggatcagaagacagcccaccaaaacacgcgggcaacaacgagagccattcttcaagaagacgcaacagacattcgaagagcaaagttacaaatggagtggggaagaagtag

SEQ ID NO: 109174 - DNA, 984 bp, Artificial Sequence
  derived and/or modified sequence
atggagtatgctgtgaactgccacgtgatcacctgggagcgcatcatcagccactttgacatctttgccttcggccacttctggggctgggccatgaaggccctgctgatccgctcctatggcctgtgctggaccatcagcatcacctgggagctgacagagctgttcttcatgcacctgctgcccaactttgctgagtgctggtgggaccaggtgatcctggacatcctgctgtgcaatggaggcggcatctggctgggcatggtggtgtgccgcttcctggagatgaggacctaccactgggccagcttcaaggacatccacaccaccaccgggaagatcaagagagctgtgctgcagttcaccccagcctcctggacctacgtgcgctggtttgaccccaagagcagcttccagagggtggccggcgtgtacctgttcatgatcatctggcagctgacagagctgaacaccttcttcctgaagcacatctttgtgttccaggccagccaccccctgtcctggggccgcatcctcttcatcggcggcatcacagcccccaccgtgcggcagtactatgcctacctgacagacacccagtgcaagagggtgggcacccagtgctgggtgtttggagtcatcggcttcctggaggccatcgtgtgcatcaagtttggccaggacctcttcagcaagacccagatcctgtatgtggtgctgtggctgctgtgtgtggccttcaccaccttcctgtgcctgtatggcatgatctggtacgccgagcactacggccaccgggagaagacctacagtgaatgtgaagatggcacctacagccctgagatctcctggcaccacaggaagggcaccaagggcagcgaggacagcccccccaagcatgctggcaacaatgaaagccacagcagcagaagaagaaacagacacagcaagagcaaggtgaccaacggggtgggcaagaagtag

SEQ ID NO: 109175 - DNA, 984 bp, Artificial Sequence
  derived and/or modified sequence
atggagtacgccgtgaactgccacgtgatcacctgggagcggatcatctctcatttcgatatattcgccttcgggcacttttgggggtgggcgatgaaggccttgcttatcagatcctatggactctgttggacaatctctattacttgggagttgacagaactcttcttcatgcacctgcttcctaacttcgccgagtgctggtgggaccaggtgatcctggatatcctcctgtgtaacggcggcggaatctggctcggcatggtcgtgtgcaggtttctggaaatgaggacctaccactgggcttctttcaaagatatccatacaactacgggcaagataaaaagagctgtactccaattcacccctgcatcctggacgtacgtgcggtggtttgaccccaagtcatctttccagagagttgctggcgtatacctcttcatgataatctggcagctgacagagctgaataccttcttcctcaaacacatctttgtttttcaggctagccaccccctcagttggggtagaatactgtttattggcggcattacagctccaacggtgcgccagtactatgcctatctcaccgacacacagtgcaaaagagtgggcacacagtgctgggtctttggcgtcatcggcttcctggaggccattgtatgcataaaattcgggcaggatctgttcagtaagactcagatcctgtacgttgtgctgtggctgttgtgtgttgcattcaccacattcctgtgcctgtatggtatgatttggtacgccgagcattacgggcaccgggagaaaacatatagtgagtgcgaagacggaacttactcccccgagatatcatggcaccaccggaaaggcacaaaaggcagtgaagacagtccccccaaacacgccggaaacaacgagtcacattcgtcacgacgaagaaatcggcattctaagagtaaagtgacaaatggcgtgggtaaaaaatag

SEQ ID NO: 109176 - DNA, 2360 bp, Artificial Sequence
  derived and/or modified sequence
cagcctttgctgggcgccagacccggctttgccgtccggctattagcctactgtggctagtcacccccggggtcccggccttctcgggctggggccgccgccaccgcggcaggacggggaggcgggccatggcgtcctgcgtggggagccggaccctaagcaaggatgatgtgaactacaaaatgcatttccggatgatcaacgagcagcaagtggaggacatcaccattgacttcttctaccggccgcataccatcaccctgctcagcttcaccatcgtcagcctcatgtacttcgcctttaccagggatgactctgttccagaagacaacatctggagaggcatcctctctgttattttcttctttcttatcatcagtgtgttagctttccccaatggagtatgctgtgaactgccatgtgatcacctgggagaggattatcagccactttgatatttttgcatttggacatttctggggctgggccatgaaggccttgctgatccgtagttacggtctctgctggacaatcagtattacctgggagctgactgagctcttcttcatgcatctcctccccaattttgccgagtgctggtgggatcaagtcattctggacatcctgttgtgcaatggcggtggcatttggctgggcatggtcgtttgccggtttttagagatgaggacttaccactgggcaagcttcaaggacattcataccaccaccgggaagatcaagagagctgttctgcagttcactcctgctagctggacctatgttcgatggtttgaccccaaatcttcttttcagagagtagctggagtgtaccttttcatgatcatctggcagctgactgagttgaataccttcttcttgaagcatatctttgtgttccaagccagtcatccattaagttggggtagaattctctttattggtggcatcacagctcccacagtgagacagtactacgcttacctcaccgacacacagtgcaagcgcgtaggaacacaatgctgggtgtttggggtcattggtttcctggaggccattgtttgcataaaatttggacaagatctcttctctaagacccaaatactctatgttgtgctttggcttctttgcgtggctttcaccactttcctctgtctgtacggcatgatttggtatgcagaacactatggtcaccgagaaaagacctactcggagtgtgaagatggcacctacagtccagagatctcctggcatcacaggaaagggacaaaaggttctgaagacagcccacccaagcatgcaggcaacaacgaaagccattcttccaggagaaggaatcggcattccaagtcaaaagtcaccaatggcgttggaaagaaatgaaaaaccctggttaatcaaagatgttccagagtgcctagaactgagagggaaatggaactcatttggaactccccgtgaggaggtcgaggcgcacagggcaagcaggaagaggcgagggcacttgggggtcattatttgagatcgtaagtcttgtttcccacagacctggccgcgtcaggcagatcatcgcctggggggcctttgccaacgtggggtctcttctaacttcagcacttgacatgcggtcaccggtggcagcgcggtgtgttgaagggaaacggtagctattcattcacagttgccaagagcagctccgcgcctgctggatcgtggatgcagcgtaaacatcttccttcagacgaggcattaaccccatggttaatggactggtcaccagtttttattttatttttatgaatctacctttccattgattgatttaagttcaggccacttttctgtcttttatttggttactgttgttatttgtttttaagttaggatgctttttaacagcctttagaagccgctgctgaaattgatactgggggaagggttccccttccttctagagcagaaaagggagagaggtgttgtattcctgtttggtaacctcagtctcctgtaagacctcctaccacatggcgagtatacaccaatcaggagagggtagctgcctgcataggagcctcgcttccgattattcccttcccaatattattcatccagacttagccacagtgcacaaaagcaaacctgctagagaggcagtgaacaccacagcttctccccagctaggtgccttttacatcgggtttgttctccttccatggtgtgttgctgacattgtcactgagtcccatgtgaggtgctggtgagtattacctttcatctgtgccatgctctagaaccttgaccttgatagttcaccacctctgatggatccctgttttaaataaaaacgattcactttaaagcct

SEQ ID NO: 109177 - DNA, 984 bp, Artificial Sequence
  derived and/or modified sequence
atggagtacgctgttaattgccacgttataacttgggagcgaatcatcagccattttgatatcttcgcattcggccacttttggggatgggctatgaaggctcttctgatacggtcctacggtttatgttggactatcagcatcacctgggagctcacagaattattctttatgcacctgttacctaactttgcagaatgctggtgggaccaggtaattctggacatacttttgtgtaacggaggcggaatctggcttgggatggtcgtgtgtcgattcctggagatgaggacctaccactgggcatcatttaaagacattcataccacaaccggtaagattaagagggctgttcttcagttcacgcccgcttcttggacttacgtcaggtggtttgaccccaagagcagtttccaaagagtcgctggggtgtatttatttatgatcatctggcagttgactgaactcaatacatttttcttgaaacacattttcgtgttccaggcttctcacccgctctcttggggcaggatcctttttattggtggtatcaccgcgccaactgtcagacaatactacgcatatctcaccgatactcaatgcaaaagggtcggaacccagtgctgggtgtttggagtgataggatttctggaggccatcgtctgcatcaaatttggccaggatctgttttcaaagacccagattctgtacgtggtcctctggttactttgcgttgctttcactactttcctttgcctctacggtatgatttggtacgccgaacactatggacatcgcgaaaagacatactccgagtgcgaagacggcacctactcacctgagatcagctggcaccaccggaaaggcactaaggggtcagaagactctcctcccaaacacgccggtaataatgagtcacatagctctcgtcggcgaaataggcatagcaaatccaaggtgacaaatggcgttggaaagaaatag

SEQ ID NO: 109178 - DNA, 984 bp, Artificial Sequence
  derived and/or modified sequence
atggagtacgccgtgaactgccacgtgatcacctgggagagaatcatcagccacttcgacatcttcgccttcggccacttctggggctgggccatgaaggccctgctgatcagaagctacggcctgtgctggaccatcagcatcacctgggagctgaccgagctgttcttcatgcacctgctgcccaacttcgccgagtgctggtgggaccaggtgatcctggacatcctgctgtgcaacggcggcggcatctggctgggcatggtggtgtgcagattcctggagatgagaacctaccactgggccagcttcaaggacatccacaccaccaccggcaagatcaagagagccgtgctgcagttcacccccgccagctggacctacgtgagatggttcgaccccaagagcagcttccagagagtggccggcgtgtacctgttcatgatcatctggcagctgaccgagctgaacaccttcttcctgaagcacatcttcgtgttccaggccagccaccccctgagctggggcagaatcctgttcatcggcggcatcaccgcccccaccgtgagacagtactacgcctacctgaccgacacccagtgcaagagagtgggcacccagtgctgggtgttcggcgtgatcggcttcctggaggccatcgtgtgcatcaagttcggccaggacctgttcagcaagacccagatcctgtacgtggtgctgtggctgctgtgcgtggccttcaccaccttcctgtgcctgtacggcatgatctggtacgccgagcactacggccacagagagaagacctacagcgagtgcgaggacggcacctacagccccgagatcagctggcaccacagaaagggcaccaagggcagcgaggacagcccccccaagcacgccggcaacaacgagagccacagcagcagaagaagaaacagacacagcaagagcaaggtgaccaacggcgtgggcaagaagtag

SEQ ID NO: 109179 - protein, 2444 aa, Artificial Sequence
  derived and/or modified sequence
MKAQRERLQIPGLTLDLTPRSLSPTPSSPGSPCSPLLAFHFWSCRTSNRKSLIGNGQSPALPRPHSPLSAHAGNSPQDSPRNFSPSASAHFSFARSLNRTDGRRWSLASLPSSGYGTNTPSSTVSSSCSSQEKLHQLPYQPTPDELHFLSKHFCTTESIATENRCRNTPMRPRSRSLSPGRSPACCDHEIIMMNHVYKERFPKATAQMEERLKEIITSYSPDNVLPLADGVLSFTHHQIIELARDCLDKSHQGLITSRYFLELQHKLDKLLQEAHDRSESGELAFIKQLVRKILIVIARPARLLECLEFDPEEFYYLLEAAEGHAKEGQGIKTDIPRYIISQLGLNKDPLEEMAHLGNYDSGTAETPETDESVSSSNASLKLRRKPRESDFETIKLISNGAYGAVYFVRHKESRQRFAMKKINKQNLILRNQIQQAFVERDILTFAENPFVVSMYCSFETRRHLCMVMEYVEGGDCATLMKNMGPLPVDMARMYFAETVLALEYLHNYGIVHRDLKPDNLLVTSMGHIKLTDFGLSKVGLMSMTTNLYEGHIEKDAREFLDKQVCGTPEYIAPEVILRQGYGKPVDWWAMGIILYEFLVGCVPFFGDTPEELFGQVISDEINWPEKDEAPPPDAQDLITLLLRQNPLERLGTGGAYEVKQHRFFRSLDWNSLLRQKAEFIPQLESEDDTSYFDTRSEKYHHMETEEEDDTNDEDFNVEIRQFSSCSHRFSKVFSSIDRITQNSAEEKEDSVDKTKSTTLPSTETLSWSSEYSEMQQLSTSNSSDTESNRHKLSSGLLPKLAISTEGEQDEAASCPGDPHEEPGKPALPPEECAQEEPEVTTPASTISSSTLSVGSFSEHLDQINGRSECVDSTDNSSKPSSEPASHMARQRLESTEKKKISGKVTKSLSASALSLMIPGDMFAVSPLGSPMSPHSLSSDPSSSRDSSPSRDSSAASASPHQPIVIHSSGKNYGFTIRAIRVYVGDSDIYTVHHIVWNVEEGSPACQAGLKAGDLITHINGEPVHGLVHTEVIELLLKSGNKVSITTTPFENTSIKTGPARRNSYKSRMVRRSKKSKKKESLERRRSLFKKLAKQPSPLLHTSRSFSCLNRSLSSGESLPGSPTHSLSPRSPTPSYRSTPDFPSGTNSSQSSSPSSSAPNSPAGSGHIRPSTLHGLAPKLGGQRYRSGRRKSAGNIPLSPLARTPSPTPQPTSPQRSPSPLLGHSLGNSKIAQAFPSKMHSPPTIVRHIVRPKSAEPPRSPLLKRVQSEEKLSPSYGSDKKHLCSRKHSLEVTQEEVQREQSQREAPLQSLDENVCDVPPLSRARPVEQGCLKRPVSRKVGRQESVDDLDRDKLKAKVVVKKADGFPEKQESHQKSHGPGSDLENFALFKLEEREKKVYPKAVERSSTFENKASMQEAPPLGSLLKDALHKQASVRASEGAMSDGRVPAEHRQGGGDFRRAPAPGTLQDGLCHSLDRGISGKGEGTEKSSQAKELLRCEKLDSKLANIDYLRKKMSLEDKEDNLCPVLKPKMTAGSHECLPGNPVRPTGGQQEPPPASESRAFVSSTHAAQMSAVSFVPLKALTGRVDSGTEKPGLVAPESPVRKSPSEYKLEGRSVSCLKPIEGTLDIALLSGPQASKTELPSPESAQSPSPSGDVRASVPPVLPSSSGKKNDTTSARELSPSSLKMNKSYLLEPWFLPPSRGLQNSPAVSLPDPEFKRDRKGPHPTARSPGTVMESNPQQREGSSPKHQDHTTDPKLLTCLGQNLHSPDLARPRCPLPPEASPSREKPGLRESSERGPPTARSERSAARADTCREPSMELCFPETAKTSDNSKNLLSVGRTHPDFYTQTQAMEKAWAPGGKTNHKDGPGEARPPPRDNSSLHSAGIPCEKELGKVRRGVEPKPEALLARRSLQPPGIESEKSEKLSSFPSLQKDGAKEPERKEQPLQRHPSSIPPPPLTAKDLSSPAARQHCSSPSHASGREPGAKPSTAEPSSSPQDPPKPVAAHSESSSHKPRPGPDPGPPKTKHPDRSLSSQKPSVGATKGKEPATQSLGGSSREGKGHSKSGPDVFPATPGSQNKASDGIGQGEGGPSVPLHTDRAPLDAKPQPTSGGRPLEVLEKPVHLPRPGHPGPSEPADQKLSAVGEKQTLSPKHPKPSTVKDCPTLCKQTDNRQTDKSPSQPAANTDRRAEGKKCTEALYAPAEGDKLEAGLSFVHSENRLKGAERPAAGVGKGFPEARGKGPGPQKPPTEADKPNGMKRSPSATGQSSFRSTALPEKSLSCSSSFPETRAGVREASAASSDTSSAKAAGGMLELPAPSNRDHRKAQPAGEGRTHMTKSDSLPSFRVSTLPLESHHPDPNTMGGASHRDRALSVTATVGETKGKDPAPAQPPPARKQNVGRDVTKPSPAPNTDRPISLSNEKDFVVRQRRGKESLRSSPHKKAL

SEQ ID NO: 109180 - protein, 2444 aa, Artificial Sequence
  derived and/or modified sequence
MKAQRERLQIPGLTLDLTPRSLSPTPSSPGSPCSPLLAFHFWSCRTSNRKSLIGNGQSPALPRPHSPLSAHAGNSPQDSPRNFSPSASAHFSFARRNDRTDGRRWSLASLPSSGYGTNTPSSTVSSSCSSQEKLHQLPYQPTPDELHFLSKHFCTTESIATENRCRNTPMRPRSRSLSPGRSPACCDHEIIMMNHVYKERFPKATAQMEERLKEIITSYSPDNVLPLADGVLSFTHHQIIELARDCLDKSHQGLITSRYFLELQHKLDKLLQEAHDRSESGELAFIKQLVRKILIVIARPARLLECLEFDPEEFYYLLEAAEGHAKEGQGIKTDIPRYIISQLGLNKDPLEEMAHLGNYDSGTAETPETDESVSSSNASLKLRRKPRESDFETIKLISNGAYGAVYFVRHKESRQRFAMKKINKQNLILRNQIQQAFVERDILTFAENPFVVSMYCSFETRRHLCMVMEYVEGGDCATLMKNMGPLPVDMARMYFAETVLALEYLHNYGIVHRDLKPDNLLVTSMGHIKLTDFGLSKVGLMSMTTNLYEGHIEKDAREFLDKQVCGTPEYIAPEVILRQGYGKPVDWWAMGIILYEFLVGCVPFFGDTPEELFGQVISDEINWPEKDEAPPPDAQDLITLLLRQNPLERLGTGGAYEVKQHRFFRSLDWNSLLRQKAEFIPQLESEDDTSYFDTRSEKYHHMETEEEDDTNDEDFNVEIRQFSSCSHRFSKVFSSIDRITQNSAEEKEDSVDKTKSTTLPSTETLSWSSEYSEMQQLSTSNSSDTESNRHKLSSGLLPKLAISTEGEQDEAASCPGDPHEEPGKPALPPEECAQEEPEVTTPASTISSSTLSVGSFSEHLDQINGRSECVDSTDNSSKPSSEPASHMARQRLESTEKKKISGKVTKSLSASALSLMIPGDMFAVSPLGSPMSPHSLSSDPSSSRDSSPSRDSSAASASPHQPIVIHSSGKNYGFTIRAIRVYVGDSDIYTVHHIVWNVEEGSPACQAGLKAGDLITHINGEPVHGLVHTEVIELLLKSGNKVSITTTPFENTSIKTGPARRNSYKSRMVRRSKKSKKKESLERRRSLFKKLAKQPSPLLHTSRSFSCLNRSLSSGESLPGSPTHSLSPRSPTPSYRSTPDFPSGTNSSQSSSPSSSAPNSPAGSGHIRPSTLHGLAPKLGGQRYRSGRRKSAGNIPLSPLARTPSPTPQPTSPQRSPSPLLGHSLGNSKIAQAFPSKMHSPPTIVRHIVRPKSAEPPRSPLLKRVQSEEKLSPSYGSDKKHLCSRKHSLEVTQEEVQREQSQREAPLQSLDENVCDVPPLSRARPVEQGCLKRPVSRKVGRQESVDDLDRDKLKAKVVVKKADGFPEKQESHQKSHGPGSDLENFALFKLEEREKKVYPKAVERSSTFENKASMQEAPPLGSLLKDALHKQASVRASEGAMSDGRVPAEHRQGGGDFRRAPAPGTLQDGLCHSLDRGISGKGEGTEKSSQAKELLRCEKLDSKLANIDYLRKKMSLEDKEDNLCPVLKPKMTAGSHECLPGNPVRPTGGQQEPPPASESRAFVSSTHAAQMSAVSFVPLKALTGRVDSGTEKPGLVAPESPVRKSPSEYKLEGRSVSCLKPIEGTLDIALLSGPQASKTELPSPESAQSPSPSGDVRASVPPVLPSSSGKKNDTTSARELSPSSLKMNKSYLLEPWFLPPSRGLQNSPAVSLPDPEFKRDRKGPHPTARSPGTVMESNPQQREGSSPKHQDHTTDPKLLTCLGQNLHSPDLARPRCPLPPEASPSREKPGLRESSERGPPTARSERSAARADTCREPSMELCFPETAKTSDNSKNLLSVGRTHPDFYTQTQAMEKAWAPGGKTNHKDGPGEARPPPRDNSSLHSAGIPCEKELGKVRRGVEPKPEALLARRSLQPPGIESEKSEKLSSFPSLQKDGAKEPERKEQPLQRHPSSIPPPPLTAKDLSSPAARQHCSSPSHASGREPGAKPSTAEPSSSPQDPPKPVAAHSESSSHKPRPGPDPGPPKTKHPDRSLSSQKPSVGATKGKEPATQSLGGSSREGKGHSKSGPDVFPATPGSQNKASDGIGQGEGGPSVPLHTDRAPLDAKPQPTSGGRPLEVLEKPVHLPRPGHPGPSEPADQKLSAVGEKQTLSPKHPKPSTVKDCPTLCKQTDNRQTDKSPSQPAANTDRRAEGKKCTEALYAPAEGDKLEAGLSFVHSENRLKGAERPAAGVGKGFPEARGKGPGPQKPPTEADKPNGMKRSPSATGQSSFRSTALPEKSLSCSSSFPETRAGVREASAASSDTSSAKAAGGMLELPAPSNRDHRKAQPAGEGRTHMTKSDSLPSFRVSTLPLESHHPDPNTMGGASHRDRALSVTATVGETKGKDPAPAQPPPARKQNVGRDVTKPSPAPNTDRPISLSNEKDFVVRQRRGKESLRSSPHKKAL

SEQ ID NO: 109181 - DNA, 7335 bp, Artificial Sequence
  derived and/or modified sequence
atgaaggcccagagagagagactgcagatccccggcctgaccctggacctgacccccagaagcctgagccccacccccagcagccccggcagcccctgcagccccctgctggccttccacttctggagctgcagaaccagcaacagaaagagcctgatcggcaacggccagagccccgccctgcccagaccccacagccccctgagcgcccacgccggcaacagcccccaggacagccccagaaacttcagccccagcgccagcgcccacttcagcttcgccagaagcctgaacagaaccgacggcagaagatggagcctggccagcctgcccagcagcggctacggcaccaacacccccagcagcaccgtgagcagcagctgcagcagccaggagaagctgcaccagctgccctaccagcccacccccgacgagctgcacttcctgagcaagcacttctgcaccaccgagagcatcgccaccgagaacagatgcagaaacacccccatgagacccagaagcagaagcctgagccccggcagaagccccgcctgctgcgaccacgagatcatcatgatgaaccacgtgtacaaggagagattccccaaggccaccgcccagatggaggagagactgaaggagatcatcaccagctacagccccgacaacgtgctgcccctggccgacggcgtgctgagcttcacccaccaccagatcatcgagctggccagagactgcctggacaagagccaccagggcctgatcaccagcagatacttcctggagctgcagcacaagctggacaagctgctgcaggaggcccacgacagaagcgagagcggcgagctggccttcatcaagcagctggtgagaaagatcctgatcgtgatcgccagacccgccagactgctggagtgcctggagttcgaccccgaggagttctactacctgctggaggccgccgagggccacgccaaggagggccagggcatcaagaccgacatccccagatacatcatcagccagctgggcctgaacaaggaccccctggaggagatggcccacctgggcaactacgacagcggcaccgccgagacccccgagaccgacgagagcgtgagcagcagcaacgccagcctgaagctgagaagaaagcccagagagagcgacttcgagaccatcaagctgatcagcaacggcgcctacggcgccgtgtacttcgtgagacacaaggagagcagacagagattcgccatgaagaagatcaacaagcagaacctgatcctgagaaaccagatccagcaggccttcgtggagagagacatcctgaccttcgccgagaaccccttcgtggtgagcatgtactgcagcttcgagaccagaagacacctgtgcatggtgatggagtacgtggagggcggcgactgcgccaccctgatgaagaacatgggccccctgcccgtggacatggccagaatgtacttcgccgagaccgtgctggccctggagtacctgcacaactacggcatcgtgcacagagacctgaagcccgacaacctgctggtgaccagcatgggccacatcaagctgaccgacttcggcctgagcaaggtgggcctgatgagcatgaccaccaacctgtacgagggccacatcgagaaggacgccagagagttcctggacaagcaggtgtgcggcacccccgagtacatcgcccccgaggtgatcctgagacagggctacggcaagcccgtggactggtgggccatgggcatcatcctgtacgagttcctggtgggctgcgtgcccttcttcggcgacacccccgaggagctgttcggccaggtgatcagcgacgagatcaactggcccgagaaggacgaggcccccccccccgacgcccaggacctgatcaccctgctgctgagacagaaccccctggagagactgggcaccggcggcgcctacgaggtgaagcagcacagattcttcagaagcctggactggaacagcctgctgagacagaaggccgagttcatcccccagctggagagcgaggacgacaccagctacttcgacaccagaagcgagaagtaccaccacatggagaccgaggaggaggacgacaccaacgacgaggacttcaacgtggagatcagacagttcagcagctgcagccacagattcagcaaggtgttcagcagcatcgacagaatcacccagaacagcgccgaggagaaggaggacagcgtggacaagaccaagagcaccaccctgcccagcaccgagaccctgagctggagcagcgagtacagcgagatgcagcagctgagcaccagcaacagcagcgacaccgagagcaacagacacaagctgagcagcggcctgctgcccaagctggccatcagcaccgagggcgagcaggacgaggccgccagctgccccggcgacccccacgaggagcccggcaagcccgccctgccccccgaggagtgcgcccaggaggagcccgaggtgaccacccccgccagcaccatcagcagcagcaccctgagcgtgggcagcttcagcgagcacctggaccagatcaacggcagaagcgagtgcgtggacagcaccgacaacagcagcaagcccagcagcgagcccgccagccacatggccagacagagactggagagcaccgagaagaagaagatcagcggcaaggtgaccaagagcctgagcgccagcgccctgagcctgatgatccccggcgacatgttcgccgtgagccccctgggcagccccatgagcccccacagcctgagcagcgaccccagcagcagcagagacagcagccccagcagagacagcagcgccgccagcgccagcccccaccagcccatcgtgatccacagcagcggcaagaactacggcttcaccatcagagccatcagagtgtacgtgggcgacagcgacatctacaccgtgcaccacatcgtgtggaacgtggaggagggcagccccgcctgccaggccggcctgaaggccggcgacctgatcacccacatcaacggcgagcccgtgcacggcctggtgcacaccgaggtgatcgagctgctgctgaagagcggcaacaaggtgagcatcaccaccacccccttcgagaacaccagcatcaagaccggccccgccagaagaaacagctacaagagcagaatggtgagaagaagcaagaagagcaagaagaaggagagcctggagagaagaagaagcctgttcaagaagctggccaagcagcccagccccctgctgcacaccagcagaagcttcagctgcctgaacagaagcctgagcagcggcgagagcctgcccggcagccccacccacagcctgagccccagaagccccacccccagctacagaagcacccccgacttccccagcggcaccaacagcagccagagcagcagccccagcagcagcgcccccaacagccccgccggcagcggccacatcagacccagcaccctgcacggcctggcccccaagctgggcggccagagatacagaagcggcagaagaaagagcgccggcaacatccccctgagccccctggccagaacccccagccccaccccccagcccaccagcccccagagaagccccagccccctgctgggccacagcctgggcaacagcaagatcgcccaggccttccccagcaagatgcacagcccccccaccatcgtgagacacatcgtgagacccaagagcgccgagccccccagaagccccctgctgaagagagtgcagagcgaggagaagctgagccccagctacggcagcgacaagaagcacctgtgcagcagaaagcacagcctggaggtgacccaggaggaggtgcagagagagcagagccagagagaggcccccctgcagagcctggacgagaacgtgtgcgacgtgccccccctgagcagagccagacccgtggagcagggctgcctgaagagacccgtgagcagaaaggtgggcagacaggagagcgtggacgacctggacagagacaagctgaaggccaaggtggtggtgaagaaggccgacggcttccccgagaagcaggagagccaccagaagagccacggccccggcagcgacctggagaacttcgccctgttcaagctggaggagagagagaagaaggtgtaccccaaggccgtggagagaagcagcaccttcgagaacaaggccagcatgcaggaggccccccccctgggcagcctgctgaaggacgccctgcacaagcaggccagcgtgagagccagcgagggcgccatgagcgacggcagagtgcccgccgagcacagacagggcggcggcgacttcagaagagcccccgcccccggcaccctgcaggacggcctgtgccacagcctggacagaggcatcagcggcaagggcgagggcaccgagaagagcagccaggccaaggagctgctgagatgcgagaagctggacagcaagctggccaacatcgactacctgagaaagaagatgagcctggaggacaaggaggacaacctgtgccccgtgctgaagcccaagatgaccgccggcagccacgagtgcctgcccggcaaccccgtgagacccaccggcggccagcaggagcccccccccgccagcgagagcagagccttcgtgagcagcacccacgccgcccagatgagcgccgtgagcttcgtgcccctgaaggccctgaccggcagagtggacagcggcaccgagaagcccggcctggtggcccccgagagccccgtgagaaagagccccagcgagtacaagctggagggcagaagcgtgagctgcctgaagcccatcgagggcaccctggacatcgccctgctgagcggcccccaggccagcaagaccgagctgcccagccccgagagcgcccagagccccagccccagcggcgacgtgagagccagcgtgccccccgtgctgcccagcagcagcggcaagaagaacgacaccaccagcgccagagagctgagccccagcagcctgaagatgaacaagagctacctgctggagccctggttcctgccccccagcagaggcctgcagaacagccccgccgtgagcctgcccgaccccgagttcaagagagacagaaagggcccccaccccaccgccagaagccccggcaccgtgatggagagcaacccccagcagagagagggcagcagccccaagcaccaggaccacaccaccgaccccaagctgctgacctgcctgggccagaacctgcacagccccgacctggccagacccagatgccccctgccccccgaggccagccccagcagagagaagcccggcctgagagagagcagcgagagaggcccccccaccgccagaagcgagagaagcgccgccagagccgacacctgcagagagcccagcatggagctgtgcttccccgagaccgccaagaccagcgacaacagcaagaacctgctgagcgtgggcagaacccaccccgacttctacacccagacccaggccatggagaaggcctgggcccccggcggcaagaccaaccacaaggacggccccggcgaggccagacccccccccagagacaacagcagcctgcacagcgccggcatcccctgcgagaaggagctgggcaaggtgagaagaggcgtggagcccaagcccgaggccctgctggccagaagaagcctgcagccccccggcatcgagagcgagaagagcgagaagctgagcagcttccccagcctgcagaaggacggcgccaaggagcccgagagaaaggagcagcccctgcagagacaccccagcagcatcccccccccccccctgaccgccaaggacctgagcagccccgccgccagacagcactgcagcagccccagccacgccagcggcagagagcccggcgccaagcccagcaccgccgagcccagcagcagcccccaggacccccccaagcccgtggccgcccacagcgagagcagcagccacaagcccagacccggccccgaccccggcccccccaagaccaagcaccccgacagaagcctgagcagccagaagcccagcgtgggcgccaccaagggcaaggagcccgccacccagagcctgggcggcagcagcagagagggcaagggccacagcaagagcggccccgacgtgttccccgccacccccggcagccagaacaaggccagcgacggcatcggccagggcgagggcggccccagcgtgcccctgcacaccgacagagcccccctggacgccaagccccagcccaccagcggcggcagacccctggaggtgctggagaagcccgtgcacctgcccagacccggccaccccggccccagcgagcccgccgaccagaagctgagcgccgtgggcgagaagcagaccctgagccccaagcaccccaagcccagcaccgtgaaggactgccccaccctgtgcaagcagaccgacaacagacagaccgacaagagccccagccagcccgccgccaacaccgacagaagagccgagggcaagaagtgcaccgaggccctgtacgcccccgccgagggcgacaagctggaggccggcctgagcttcgtgcacagcgagaacagactgaagggcgccgagagacccgccgccggcgtgggcaagggcttccccgaggccagaggcaagggccccggcccccagaagccccccaccgaggccgacaagcccaacggcatgaagagaagccccagcgccaccggccagagcagcttcagaagcaccgccctgcccgagaagagcctgagctgcagcagcagcttccccgagaccagagccggcgtgagagaggccagcgccgccagcagcgacaccagcagcgccaaggccgccggcggcatgctggagctgcccgcccccagcaacagagaccacagaaaggcccagcccgccggcgagggcagaacccacatgaccaagagcgacagcctgcccagcttcagagtgagcaccctgcccctggagagccaccaccccgaccccaacaccatgggcggcgccagccacagagacagagccctgagcgtgaccgccaccgtgggcgagaccaagggcaaggaccccgcccccgcccagcccccccccgccagaaagcagaacgtgggcagagacgtgaccaagcccagccccgcccccaacaccgacagacccatcagcctgagcaacgagaaggacttcgtggtgagacagagaagaggcaaggagagcctgagaagcagcccccacaagaaggccctgtag

SEQ ID NO: 109182 - DNA, 7335 bp, Artificial Sequence
  derived and/or modified sequence
atgaaggcccagagagagagactgcagatccccggcctgaccctggacctgacccccagaagcctgagccccacccccagcagccccggcagcccctgcagccccctgctggccttccacttctggagctgcagaaccagcaacagaaagagcctgatcggcaacggccagagccccgccctgcccagaccccacagccccctgagcgcccacgccggcaacagcccccaggacagccccagaaacttcagccccagcgccagcgcccacttcagcttcgccagaagaaacgacagaaccgacggcagaagatggagcctggccagcctgcccagcagcggctacggcaccaacacccccagcagcaccgtgagcagcagctgcagcagccaggagaagctgcaccagctgccctaccagcccacccccgacgagctgcacttcctgagcaagcacttctgcaccaccgagagcatcgccaccgagaacagatgcagaaacacccccatgagacccagaagcagaagcctgagccccggcagaagccccgcctgctgcgaccacgagatcatcatgatgaaccacgtgtacaaggagagattccccaaggccaccgcccagatggaggagagactgaaggagatcatcaccagctacagccccgacaacgtgctgcccctggccgacggcgtgctgagcttcacccaccaccagatcatcgagctggccagagactgcctggacaagagccaccagggcctgatcaccagcagatacttcctggagctgcagcacaagctggacaagctgctgcaggaggcccacgacagaagcgagagcggcgagctggccttcatcaagcagctggtgagaaagatcctgatcgtgatcgccagacccgccagactgctggagtgcctggagttcgaccccgaggagttctactacctgctggaggccgccgagggccacgccaaggagggccagggcatcaagaccgacatccccagatacatcatcagccagctgggcctgaacaaggaccccctggaggagatggcccacctgggcaactacgacagcggcaccgccgagacccccgagaccgacgagagcgtgagcagcagcaacgccagcctgaagctgagaagaaagcccagagagagcgacttcgagaccatcaagctgatcagcaacggcgcctacggcgccgtgtacttcgtgagacacaaggagagcagacagagattcgccatgaagaagatcaacaagcagaacctgatcctgagaaaccagatccagcaggccttcgtggagagagacatcctgaccttcgccgagaaccccttcgtggtgagcatgtactgcagcttcgagaccagaagacacctgtgcatggtgatggagtacgtggagggcggcgactgcgccaccctgatgaagaacatgggccccctgcccgtggacatggccagaatgtacttcgccgagaccgtgctggccctggagtacctgcacaactacggcatcgtgcacagagacctgaagcccgacaacctgctggtgaccagcatgggccacatcaagctgaccgacttcggcctgagcaaggtgggcctgatgagcatgaccaccaacctgtacgagggccacatcgagaaggacgccagagagttcctggacaagcaggtgtgcggcacccccgagtacatcgcccccgaggtgatcctgagacagggctacggcaagcccgtggactggtgggccatgggcatcatcctgtacgagttcctggtgggctgcgtgcccttcttcggcgacacccccgaggagctgttcggccaggtgatcagcgacgagatcaactggcccgagaaggacgaggcccccccccccgacgcccaggacctgatcaccctgctgctgagacagaaccccctggagagactgggcaccggcggcgcctacgaggtgaagcagcacagattcttcagaagcctggactggaacagcctgctgagacagaaggccgagttcatcccccagctggagagcgaggacgacaccagctacttcgacaccagaagcgagaagtaccaccacatggagaccgaggaggaggacgacaccaacgacgaggacttcaacgtggagatcagacagttcagcagctgcagccacagattcagcaaggtgttcagcagcatcgacagaatcacccagaacagcgccgaggagaaggaggacagcgtggacaagaccaagagcaccaccctgcccagcaccgagaccctgagctggagcagcgagtacagcgagatgcagcagctgagcaccagcaacagcagcgacaccgagagcaacagacacaagctgagcagcggcctgctgcccaagctggccatcagcaccgagggcgagcaggacgaggccgccagctgccccggcgacccccacgaggagcccggcaagcccgccctgccccccgaggagtgcgcccaggaggagcccgaggtgaccacccccgccagcaccatcagcagcagcaccctgagcgtgggcagcttcagcgagcacctggaccagatcaacggcagaagcgagtgcgtggacagcaccgacaacagcagcaagcccagcagcgagcccgccagccacatggccagacagagactggagagcaccgagaagaagaagatcagcggcaaggtgaccaagagcctgagcgccagcgccctgagcctgatgatccccggcgacatgttcgccgtgagccccctgggcagccccatgagcccccacagcctgagcagcgaccccagcagcagcagagacagcagccccagcagagacagcagcgccgccagcgccagcccccaccagcccatcgtgatccacagcagcggcaagaactacggcttcaccatcagagccatcagagtgtacgtgggcgacagcgacatctacaccgtgcaccacatcgtgtggaacgtggaggagggcagccccgcctgccaggccggcctgaaggccggcgacctgatcacccacatcaacggcgagcccgtgcacggcctggtgcacaccgaggtgatcgagctgctgctgaagagcggcaacaaggtgagcatcaccaccacccccttcgagaacaccagcatcaagaccggccccgccagaagaaacagctacaagagcagaatggtgagaagaagcaagaagagcaagaagaaggagagcctggagagaagaagaagcctgttcaagaagctggccaagcagcccagccccctgctgcacaccagcagaagcttcagctgcctgaacagaagcctgagcagcggcgagagcctgcccggcagccccacccacagcctgagccccagaagccccacccccagctacagaagcacccccgacttccccagcggcaccaacagcagccagagcagcagccccagcagcagcgcccccaacagccccgccggcagcggccacatcagacccagcaccctgcacggcctggcccccaagctgggcggccagagatacagaagcggcagaagaaagagcgccggcaacatccccctgagccccctggccagaacccccagccccaccccccagcccaccagcccccagagaagccccagccccctgctgggccacagcctgggcaacagcaagatcgcccaggccttccccagcaagatgcacagcccccccaccatcgtgagacacatcgtgagacccaagagcgccgagccccccagaagccccctgctgaagagagtgcagagcgaggagaagctgagccccagctacggcagcgacaagaagcacctgtgcagcagaaagcacagcctggaggtgacccaggaggaggtgcagagagagcagagccagagagaggcccccctgcagagcctggacgagaacgtgtgcgacgtgccccccctgagcagagccagacccgtggagcagggctgcctgaagagacccgtgagcagaaaggtgggcagacaggagagcgtggacgacctggacagagacaagctgaaggccaaggtggtggtgaagaaggccgacggcttccccgagaagcaggagagccaccagaagagccacggccccggcagcgacctggagaacttcgccctgttcaagctggaggagagagagaagaaggtgtaccccaaggccgtggagagaagcagcaccttcgagaacaaggccagcatgcaggaggccccccccctgggcagcctgctgaaggacgccctgcacaagcaggccagcgtgagagccagcgagggcgccatgagcgacggcagagtgcccgccgagcacagacagggcggcggcgacttcagaagagcccccgcccccggcaccctgcaggacggcctgtgccacagcctggacagaggcatcagcggcaagggcgagggcaccgagaagagcagccaggccaaggagctgctgagatgcgagaagctggacagcaagctggccaacatcgactacctgagaaagaagatgagcctggaggacaaggaggacaacctgtgccccgtgctgaagcccaagatgaccgccggcagccacgagtgcctgcccggcaaccccgtgagacccaccggcggccagcaggagcccccccccgccagcgagagcagagccttcgtgagcagcacccacgccgcccagatgagcgccgtgagcttcgtgcccctgaaggccctgaccggcagagtggacagcggcaccgagaagcccggcctggtggcccccgagagccccgtgagaaagagccccagcgagtacaagctggagggcagaagcgtgagctgcctgaagcccatcgagggcaccctggacatcgccctgctgagcggcccccaggccagcaagaccgagctgcccagccccgagagcgcccagagccccagccccagcggcgacgtgagagccagcgtgccccccgtgctgcccagcagcagcggcaagaagaacgacaccaccagcgccagagagctgagccccagcagcctgaagatgaacaagagctacctgctggagccctggttcctgccccccagcagaggcctgcagaacagccccgccgtgagcctgcccgaccccgagttcaagagagacagaaagggcccccaccccaccgccagaagccccggcaccgtgatggagagcaacccccagcagagagagggcagcagccccaagcaccaggaccacaccaccgaccccaagctgctgacctgcctgggccagaacctgcacagccccgacctggccagacccagatgccccctgccccccgaggccagccccagcagagagaagcccggcctgagagagagcagcgagagaggcccccccaccgccagaagcgagagaagcgccgccagagccgacacctgcagagagcccagcatggagctgtgcttccccgagaccgccaagaccagcgacaacagcaagaacctgctgagcgtgggcagaacccaccccgacttctacacccagacccaggccatggagaaggcctgggcccccggcggcaagaccaaccacaaggacggccccggcgaggccagacccccccccagagacaacagcagcctgcacagcgccggcatcccctgcgagaaggagctgggcaaggtgagaagaggcgtggagcccaagcccgaggccctgctggccagaagaagcctgcagccccccggcatcgagagcgagaagagcgagaagctgagcagcttccccagcctgcagaaggacggcgccaaggagcccgagagaaaggagcagcccctgcagagacaccccagcagcatcccccccccccccctgaccgccaaggacctgagcagccccgccgccagacagcactgcagcagccccagccacgccagcggcagagagcccggcgccaagcccagcaccgccgagcccagcagcagcccccaggacccccccaagcccgtggccgcccacagcgagagcagcagccacaagcccagacccggccccgaccccggcccccccaagaccaagcaccccgacagaagcctgagcagccagaagcccagcgtgggcgccaccaagggcaaggagcccgccacccagagcctgggcggcagcagcagagagggcaagggccacagcaagagcggccccgacgtgttccccgccacccccggcagccagaacaaggccagcgacggcatcggccagggcgagggcggccccagcgtgcccctgcacaccgacagagcccccctggacgccaagccccagcccaccagcggcggcagacccctggaggtgctggagaagcccgtgcacctgcccagacccggccaccccggccccagcgagcccgccgaccagaagctgagcgccgtgggcgagaagcagaccctgagccccaagcaccccaagcccagcaccgtgaaggactgccccaccctgtgcaagcagaccgacaacagacagaccgacaagagccccagccagcccgccgccaacaccgacagaagagccgagggcaagaagtgcaccgaggccctgtacgcccccgccgagggcgacaagctggaggccggcctgagcttcgtgcacagcgagaacagactgaagggcgccgagagacccgccgccggcgtgggcaagggcttccccgaggccagaggcaagggccccggcccccagaagccccccaccgaggccgacaagcccaacggcatgaagagaagccccagcgccaccggccagagcagcttcagaagcaccgccctgcccgagaagagcctgagctgcagcagcagcttccccgagaccagagccggcgtgagagaggccagcgccgccagcagcgacaccagcagcgccaaggccgccggcggcatgctggagctgcccgcccccagcaacagagaccacagaaaggcccagcccgccggcgagggcagaacccacatgaccaagagcgacagcctgcccagcttcagagtgagcaccctgcccctggagagccaccaccccgaccccaacaccatgggcggcgccagccacagagacagagccctgagcgtgaccgccaccgtgggcgagaccaagggcaaggaccccgcccccgcccagcccccccccgccagaaagcagaacgtgggcagagacgtgaccaagcccagccccgcccccaacaccgacagacccatcagcctgagcaacgagaaggacttcgtggtgagacagagaagaggcaaggagagcctgagaagcagcccccacaagaaggccctgtag

SEQ ID NO: 109183 - DNA, 7335 bp, Artificial Sequence
  derived and/or modified sequence
atgaaggctcagagagaacgcctgcagatcccagggctgaccctcgacctcacaccccgtagtcttagtccaaccccctcctccccaggaagtccatgcagccccctattggctttccacttttggagttgccgcaccagtaatcgcaaatccctaattggcaatggccagtcaccagctctccctaggccacatagtccactcagtgcccacgcaggcaactcaccacaagactctccccggaatttcagtccatccgcctccgcccatttcagtttcgccaggagtctgaataggaccgatggccggaggtggagtctagctagcctaccaagcagcggctatggtaccaacaccccatcctcaacggtttcttctagttgttcatcacaagagaagctccatcagctgccctaccaaccaactcccgatgaattgcactttttgtctaaacacttctgtacaactgaatccatcgccactgagaatagatgcaggaacacaccaatgcgtcccaggagccggtctctgagcccaggcaggtctcccgcgtgctgcgaccacgagatcattatgatgaaccatgtatataaggagaggttcccaaaagcgactgcacagatggaggagcgactgaaagagataatcacctcttattcacctgataatgttctgcctcttgctgacggagtgctgtcattcactcatcaccagatcatcgagttggctcgggactgtcttgacaagtcccatcagggactgatcacatcccgctactttttagagctccagcataaactggacaagctgcttcaagaggcccatgatcgctcagagtctggagagctggcttttatcaagcagctagtgcggaaaatcctgattgtcatcgctaggcctgctaggctactggagtgcctagaattcgatccagaagaattttattacctcctagaagcagctgaaggccacgcgaaggaggggcagggtattaagactgatattcctcgatacattataagccaactcggacttaacaaagatccgttggaagaaatggcacacctggggaattatgactccgggactgcagaaacgcccgaaacagacgaaagcgtgagcagttcgaatgcttcactgaagcttcgcagaaaaccacgtgagagtgactttgagactatcaagctgatctcaaacggggcatacggggcagtgtatttcgtcagacataaggaaagtaggcagcgctttgctatgaagaagattaacaaacaaaatcttattctgcgcaatcagattcagcaggccttcgtggaaagggatatcttaaccttcgccgaaaatccctttgtggttagtatgtattgtagtttcgagacccgtaggcatctgtgtatggtgatggaatatgttgaaggaggtgactgtgctacactgatgaagaacatgggccctcttcctgtggatatggctcgcatgtacttcgcagagactgtcctggccttggagtaccttcacaattatggaattgtccatagggatctgaaaccagataatctgctggtgacatccatgggacacattaagctcacagatttcggactcagtaaggtcggcctgatgagcatgacaacaaatctctatgagggacatatcgagaaagatgcacgcgaatttctggataaacaggtgtgcggcactccggaatatatagcccccgaagtgatcctgcgccagggctacggtaaacccgtagattggtgggccatgggcattatcctttatgagttccttgtcggctgtgtaccatttttcggggatacccctgaggagttatttggccaggtgatttcagacgagatcaattggccagagaaggatgaggcccccccacctgacgcacaggacctgattacattgctgttacgacagaatccgctagaacgtctggggacaggaggtgcgtatgaggtcaagcagcatcgattctttaggtctctggattggaacagcctgctcagacagaaggcggaattcatcccccaattagagtccgaggatgacacttcttattttgatacaagaagtgagaaatatcaccatatggaaactgaagaagaggacgatacaaacgacgaagactttaatgtggaaatccgacagttctctagctgttcccatagattttccaaggtgttctcatcaatcgatagaatcacgcagaactctgctgaggagaaagaagacagcgttgacaaaacgaagtcgactactctgccctcaactgagacgctgtcctggagtagcgagtattcggaaatgcagcagctgtcaaccagcaatagctcagacactgaatctaacagacataaactgtcaagtgggctgctgccgaagctcgccatttccactgaaggcgaacaggacgaagccgcaagctgccctggcgatccccatgaggagcctgggaaacctgcactgccccccgaggaatgcgcacaggaggagcctgaagtcactaccccagcgagtaccatctcatctagtaccctgtccgttggatctttttccgaacatctcgaccaaattaatgggcggtccgagtgtgtggacagcactgacaattcctcaaaaccatcctccgaacctgcctctcatatggccagacagcggctggagtccactgaaaaaaaaaaaattagcggcaaggtcactaaatccctgagcgcctctgctctctcactcatgatccccggtgatatgttcgcagtgagtccattgggatcacccatgtcccctcattccctctcatctgacccgagctcttcaagagactcctccccttccagagacagttcggccgctagtgcttcacctcaccagccaatcgtcattcacagtagcggaaagaactacgggtttaccatcagggctatccgagtgtatgttggagacagcgacatttataccgttcaccacatagtctggaacgtggaggagggatcacccgcgtgccaggcagggctcaaggccggggacttaattacccatattaatggcgagccggttcacggactggtccacacagaggtgatcgagcttctgctcaaatctggaaataaggtgtccatcaccactaccccattcgagaataccagtataaagacaggcccagcgcgccgaaatagctacaagagtaggatggtgcgccgtagtaagaagagcaagaaaaaggaatccctggagcggaggaggagcctgttcaagaagcttgcgaaacaacctagtcctttgctccatacctcaagatctttttcctgcctgaatagaagcttaagtagtggcgagtccctgcccggatcgccgactcattccctctccccccgatcccccacccctagttaccgctcaacaccagacttcccaagcggcaccaatagtagtcagtctagcagtccttccagctcggccccgaactctcctgctggttctgggcatatccgcccatctaccttgcacgggttggctccgaaacttggcggccagaggtaccgatcagggcgccgtaaaagcgccggcaacattcccttgtcccccttagctcggactcccagtccaacacctcaacctaccagtccccagagaagtccctcaccccttctcggtcacagccttggtaactcaaaaatagctcaggcctttccttccaaaatgcattcaccccctacgattgtgcggcatattgtgaggcctaagtccgcagaaccccccagatcgcccctcctgaaacgagtccagtctgaggagaaactttcaccaagttatggatccgataagaaacatttatgcagccggaaacactcactggaagtgacgcaagaagaggtgcagcgggaacagtctcagagggaggcaccgctccagagccttgacgaaaacgtttgtgatgtcccccccctgagcagagcaagaccagtcgaacaaggctgtcttaagcggccagtgtctcggaaggtgggacggcaagaatctgtcgatgacctggaccgcgacaagcttaaagcaaaagtggtggtgaaaaaggcggatgggttcccggagaagcaggaatcccaccagaagtcccatggccccgggagcgacctggaaaacttcgcactgtttaagctggaggaaagggagaagaaagtctaccccaaggccgttgaaaggagcagtacttttgaaaacaaggcgtctatgcaggaggccccccctctgggatctctcctgaaagatgcattgcacaaacaggcctctgtgagggctagtgagggagcaatgtctgacggccgggtcccggcggaacacaggcagggtggaggtgatttccgaagagccccagcgcctgggacactccaggacggattgtgccatagtctcgacagaggcatcagcgggaagggcgagggaactgagaaatccagccaagccaaagaactattgcgatgcgagaaactcgatagtaagctggcgaatatagattacctgcgcaagaagatgagtctcgaagacaaggaggataatctctgtcctgtgctcaaaccaaagatgaccgccggatctcatgagtgcctcccggggaacccggtgcggccaacaggagggcagcaggaacctcctcctgcttccgaaagtagagcctttgtcagctctactcatgccgcccaaatgagtgcagtgtcattcgtgcctctgaaggccctgactggaagagtcgattctggcactgagaaaccagggcttgtggcccctgagagtccagtacggaagtctccatctgaatataaattagagggccgctctgttagctgtctaaaaccaattgaaggaacattggacatagctctgttatccggacctcaggcctccaaaacagagctgcctagtccagagtctgcacagtctcccagcccaagtggagatgtgcgggcaagcgtgccccccgttcttccaagtagctccgggaagaagaatgatactaccagcgcccgggagctcagcccctctagcctgaagatgaataagtcctatttattggagccatggtttctgcccccgagccgcgggcttcagaatagcccagctgtctctttgccagatccagaatttaagagagatagaaagggtcctcacccaactgctcgatctccaggaactgtgatggagtctaacccacagcaacgcgagggttcttcccccaaacatcaggatcacacgactgacccaaagctgctcacatgtctggggcagaaccttcattcccctgacctggctcggcccaggtgtccactccccccggaagcgtctccttcaagagagaaaccagggctacgtgaaagctctgagcgggggccccctacggccaggtccgagaggagcgcggccagggccgatacgtgccgggaaccttctatggagctgtgcttcccagagacagcgaaaaccagcgacaacagcaagaatctcttgtctgtcggtcgcactcatccggatttttacacccaaacacaagcaatggaaaaggcttgggctcctggcggcaagactaatcataaggatggccctggcgaggcccgcccaccacctagggacaacagctcactgcatagtgccggaattccatgcgaaaaggagctaggcaaagtgagaaggggtgtcgaacctaaacccgaggccctcctggcacgccgatctttgcagccaccaggcatcgaatcggaaaaaagtgagaagctctcctcattcccttccctgcagaaggacggtgcaaaagaaccagagaggaaagagcagccactccagagacacccgagcagtattcctccccccccgcttactgccaaagacctgagttccccggcagctcgacaacactgtagtagtccctcgcacgcatccgggagggagccaggcgctaagccatccaccgctgagccctcttcctctccccaggacccccccaaaccggtcgccgcccattccgaatcttctagccataagccgaggcccggtcctgatccgggacctcccaagacaaagcatcctgacaggagtctgagctctcagaaaccatcggtgggcgccacaaagggaaaagaacccgcaacccaaagccttggggggagttctcgtgaggggaaaggccatagcaaatcaggcccagacgtgtttccagccactccaggttcccagaacaaagcaagcgacgggattggccagggagaaggcgggccctccgtcccactgcacaccgatcgggcccccctggatgccaagccgcagcccacctctggcggacggccactagaggtactagagaagcctgtgcacttgccgcgcccgggacatcctggccccagcgagcccgccgaccagaagctatcagctgtgggcgagaaacagactctgtcgcctaagcacccaaaaccaagcaccgttaaggactgccctacactttgtaaacagacggataatagacaaacagacaaaagcccctctcagccagctgccaatactgaccgccgggccgagggaaagaagtgcactgaagctctgtacgccccagcagagggcgataagttggaggccggtctgtcttttgtccattccgaaaatcgactaaaaggggctgaaagacccgccgcaggagtagggaagggatttcctgaggctcgtggaaagggtcccgggccacagaaacctcctactgaggccgacaagcctaacgggatgaaacggagtccaagtgccacaggacagagctcttttcgatccactgctctgccggagaaaagtctcagctgtagctcctcatttccggagacccgggctggcgtgagggaggcgtctgctgccagtagcgacactagtagcgccaaagctgcgggcggcatgctggagctccctgcgccttccaatcgggaccacaggaaagcacagccggccggtgaaggaagaacacatatgactaaaagtgattcactgccttccttccgcgtgtctacattgcccctggaatcgcaccaccctgacccaaataccatgggcggtgcctcccacagagatagagctctgagtgttaccgctaccgtcggtgagactaaaggtaaggatcccgcccccgcccagccccctcccgcccgaaagcagaatgtgggcagggacgttaccaaacccagccctgccccaaacaccgacagacccattagcctgagcaatgagaaagactttgttgtcagacagagaagaggcaaagagagtctccgcagcagcccgcataagaaggccctttag

SEQ ID NO: 109184 - DNA, 7335 bp, Artificial Sequence
  derived and/or modified sequence
atgaaagcccagcgtgagagactgcaaatcccgggcctcacacttgatctgactccacggtccctgtcccccaccccttcttctcctggcagcccctgttctcccctgctcgcctttcatttctggtcttgtaggacctccaacaggaaaagcctgattggaaacggacagtctccagccctgcctagaccacactctcctctgtccgcacatgctggaaactccccccaggattcaccacgcaacttctcaccaagtgccagtgcccatttctctttcgctaggcggaatgatcgaacagatgggcggcgctggagccttgcatctcttccttcaagcggttacggcacaaatacaccatcatccacagtgagcagctcctgtagcagtcaggagaagctgcaccagttgccctatcagccaacgcctgacgaactccacttcctgagcaaacacttttgcactacggaatcaattgctactgaaaaccgctgccggaatacacctatgagaccccgctcccggagtctgagcccgggtaggtctcccgcctgctgtgaccacgaaattatcatgatgaatcacgtttacaaagaacggttccctaaagcaaccgctcaaatggaggagcgtctgaaagagatcataacgtcttactccccggacaacgtgctccctctggccgatggagtgctctcttttactcatcaccagataattgagctggcaagggattgcttagataagagtcaccagggcttaataacctcacgctacttcttggagttgcagcacaaattggacaaactgctgcaggaagctcatgatcgctcggagtccggagagctggcctttattaaacaactcgtaagaaagatccttatcgtcatcgcccggccggctcgcctcctggaatgcctggagtttgaccctgaggagttttactatttgttggaggcagccgagggccacgcaaaagaaggccagggaatcaagactgacattccacgctatattatctcccaattgggcctcaacaaggatccccttgaagagatggcccaccttggcaattacgactctgggacagccgagacacccgagacagacgaatccgtatcctcaagtaacgcttctctgaagctgaggaggaagccacgcgagagtgactttgagaccattaagcttatcagcaatggcgcatacggcgctgtatactttgtccgacataaggagtccagacaaagatttgcaatgaaaaagatcaacaagcagaacttgattctccgcaaccagatccagcaagctttcgtcgagcgggatattttgactttcgcagaaaatccattcgtggtctcaatgtactgcagcttcgaaactcgcaggcacttgtgtatggtgatggagtatgttgaaggcggggactgtgccaccctcatgaagaacatgggcccgctcccagttgacatggcgcgtatgtacttcgccgagaccgtgctggccctggagtatttgcataattacggaattgtgcatcgcgacttgaaacctgacaacctcctggtcactagcatgggtcacattaagcttacagacttcggcttatctaaagtggggctcatgagtatgacgactaatctgtacgaaggacatattgaaaaggatgcgagggagttcctcgacaagcaagtatgcgggacccctgagtacatcgcacccgaagtcattctgagacagggctacggaaagcccgtcgactggtgggccatgggcatcattctctatgaatttcttgtgggttgtgtgccctttttcggcgataccccggaagagttatttgggcaggtaatcagcgatgaaataaactggcctgaaaaggacgaggctccaccacccgacgcgcaagatctgattacgctgctccttcgacagaacccccttgaacggttagggaccggtggcgcttacgaagtgaaacagcaccggtttttcagatccctggattggaactcactacttcgtcaaaaggccgaattcatcccccagctcgaaagcgaggatgatactagctacttcgacacccgtagtgaaaaataccaccacatggaaaccgaagaggaggacgacacaaacgatgaggacttcaacgtcgagatcaggcaatttagctcctgtagtcatcgcttttcaaaagtgttttccagtattgaccgcataacacaaaatagcgccgaagaaaaggaggatagcgtggataagacaaaatcaacaacactgccttcaaccgaaactctgtcctggagttctgagtactctgaaatgcaacaactgtccacttcaaattcctctgatacagaaagcaatcggcataagctgtcctcagggcttctgccaaagttagctataagcactgagggagagcaggatgaagctgcctcctgccctggggaccctcatgaagaacccggtaagcctgcgttaccacctgaggagtgcgcccaggaagagccagaggtcactacccccgctagcaccatcagttcttctacattgtctgtgggaagtttcagcgaacacctggaccagattaatgggaggtctgagtgtgtagactccacagacaactcctccaagccatcgtcagaacccgccagccacatggcccgccagcggctcgaatctaccgagaagaaaaaaatttcaggcaaagtaacgaaaagtctaagtgcaagcgcgctgagtttgatgattccaggagatatgttcgctgtgagtcctctggggtctcccatgtccccacacagcttgtcaagcgaccccagctctagtcgggactcttctcctagcagagacagctcagcagcatctgccagcccgcaccagcccattgtgattcactccagcggtaagaactacggcttcacaatccgtgccatccgagtctatgtgggtgactccgacatatacacggttcaccatatcgtgtggaacgtagaggagggttcccctgcctgccaggctggacttaaagcaggagatttgatcacacatatcaacggcgaaccggtccatggtctggttcacactgaggtgatagagctgctgctcaagtccggcaacaaggtttccattacaactaccccattcgaaaatacttctataaaaaccggacctgcgcgtagaaatagctacaaaagtagaatggtgcgccgaagcaagaagagcaaaaagaaggagagcttggagaggcggaggtcacttttcaaaaagctcgcaaaacagccctcccctctgctccatacttcacgatcattcagctgcctcaaccgctctctctctagcggcgagagtctgcctggttccccaacgcactcactgagtccaaggtccccaactccaagttacaggagcacccccgattttccaagtgggacgaattcttctcagagcagcagtccctcctcatctgctcccaatagccccgctgggagtggtcacatccggccaagcacactccacggactcgctcccaagctcggcgggcagagatatcgaagcggtagacgtaaatctgctgggaacatccctctctcgcccttggctcgaacaccttccccgaccccccagcccaccagccctcagcgcagcccaagccccttgctgggacatagccttggcaactcaaaaattgcccaggcgtttccttctaagatgcattcgccgcccactatcgtgaggcacatcgtacgcccaaaaagcgcagagcccccaaggagtcctctgctgaagagagtgcagtccgaggagaaactgtcgccctcatatgggtcagataaaaagcatttgtgcagcaggaagcactctctcgaagtaacccaggaagaagttcaaagggagcaaagtcagcgagaggcccctttgcagagtttggacgaaaatgtctgcgacgtgccgcccctgtcccgggcccgcccagtagaacagggctgcctgaaacgtccggtaagccgtaaggttggaagacaggaaagcgtcgacgacttggaccgcgataaattgaaggcaaaagtagtggtaaaaaaagccgacggctttcctgaaaagcaagagtcccaccagaagtcccatggaccaggatctgacctggagaactttgcgctgttcaaactcgaagaacgcgagaagaaagtttatccgaaagcggttgagcggtcctccaccttcgagaacaaggcttccatgcaagaggctcccccactgggatccctgctgaaggatgcactccacaaacaagctagtgtgagagcctcagagggtgcgatgtcagacgggcgtgtgccggccgaacaccggcagggcgggggtgactttaggagagctcctgccccaggcaccctgcaagatggactgtgtcactcgctggatagaggcatcagcgggaagggagagggcacagagaaaagcagtcaggccaaagagttgctgagatgtgaaaagctggacagcaagctggccaatattgattatctcagaaagaagatgtccctggaagacaaagaagataatctgtgtcccgtgctgaagcccaaaatgacagccggcagtcatgagtgcttacccggaaatcctgtgcgcccaacaggtggccagcaggagccaccacccgcctctgaatctcgagcatttgtgtccagtactcatgctgcccagatgagcgctgtgagctttgtccccctcaaggcattaaccggccgtgtggactcaggaaccgaaaagcccggcttggtagctcctgagagcccggtgaggaagagtccctccgagtataagctcgaaggccggagtgtgtcatgtcttaagccgatagagggcacacttgatatcgccctgctgtccggcccccaggcctccaaaacagaacttcctagtcccgaaagtgctcagagtccaagcccttccggtgacgtacgggcctccgtacccccggtcctgcccagctcttctgggaaaaagaacgacacaacatcagccagagagctttccccttcttcactgaaaatgaataagtcttacctgctggaaccgtggtttctcccaccatcacgcggtctgcagaactcgcccgccgtgagtctccccgacccagagtttaagagagacaggaaggggccgcatcccaccgctcgaagccccggtactgtaatggagagtaatcctcaacagcgtgaagggtcatcccctaaacatcaagaccacaccaccgatcccaaacttctgacctgcctgggacagaatctacactccccagatttagcacgaccacggtgcccactgccccctgaagcttccccctccagagagaaaccagggctccgtgaaagttcggaaaggggaccacccacagctcgatcagaacgctccgcggcaagggccgatacctgtcgagagcccagtatggagctctgctttccggagacagctaaaacatccgataatagtaaaaacctgttgtctgtgggcaggactcatcccgatttctatacacagactcaggcaatggagaaggcttgggcccccggggggaagaccaatcacaaagatggacccggagaggccagacccccacctagagacaatagttctctgcattctgcaggcataccctgcgagaaggagcttggcaaagtccgcaggggggtcgagcctaaacctgaggctctcctagcaaggcgatctctgcagcctcctgggattgaatccgagaagtcggaaaaacttagcagctttccctcacttcagaaagacggggctaaggagccagagaggaaggaacagccattgcagagacacccatccagtatcccccctccccctcttaccgccaaagacttatcctctcctgccgcccgacagcactgttctagcccgtcccacgcttccggtcgggagcccggagcaaaacccagtacagctgagccatctagcagtccccaggatccgccaaaacctgtggcagcacacagcgagtccagttcacataagcccagaccaggtccagaccctggcccacccaagaccaaacaccccgatcggtcattgtcaagccaaaaaccctcagtcggtgctacaaaagggaaggaacccgcaacacagtctttgggcggttcttcgagggagggcaaaggccatagcaaatcgggcccagacgtatttcccgctaccccaggctctcaaaacaaagccagtgacggaatcggccagggtgaagggggtcccagcgtgccactacacactgacagggctcctcttgacgccaaaccccagccaacctccggcggtcggcctctggaggtcctcgagaagccggtgcacctgcctagaccaggacaccctggcccaagcgagccagccgaccagaagctctcagcagttggagagaaacagacactttcccccaagcatccaaagcccagcactgtcaaggattgccctaccctgtgcaaacagaccgataaccggcagactgataagtcaccatctcagcccgctgcaaacaccgatagacgcgctgagggcaaaaaatgtaccgaggccttgtacgccccggccgaaggcgacaaactggaagccggcctgtcattcgtgcactcagagaatcgccttaagggagccgaacggcccgccgctggggtgggcaaaggattcccagaggcacggggtaagggcccaggcccccagaagccgccaactgaagccgacaagcccaatggcatgaagaggagccctagtgccactgggcagagttcctttaggtctacagccttacccgagaaatcgttgagctgcagtagctcatttcctgaaacgagagctggcgttcgcgaggccagcgctgcctcaagtgataccagctcagccaaggccgccggggggatgcttgaattaccagcccctagcaatcgcgatcaccgcaaagcccagccagccggagagggtaggacccacatgacaaagagcgacagcttgccttcctttagggtgtctaccttgccactggaatctcatcatccagacccaaacacaatgggcggcgcatcacaccgagaccgggcactttctgttactgctacggtgggtgaaacaaagggcaaagatcccgctcctgcacagccccccccagctcgaaaacagaacgtcgggcgggacgtgaccaagccatcccccgcccccaataccgaccggccaatctctttaagcaacgaaaaggactttgtggtacgacagcgccgtgggaaagaatctctgaggtcctcgccccacaagaaagcactttag

SEQ ID NO: 109185 - DNA, 7335 bp, Artificial Sequence
  derived and/or modified sequence
atgaaggcccagcgggagcggctgcagatccctggcctgaccctggacctgacccccaggagcctgagccccacccccagcagccctggcagcccctgcagccccctgctggccttccacttctggagctgcaggaccagcaacaggaagagcctgattggaaatggccagagccctgccctgccccggccccacagccccctgagcgcccacgccggcaacagcccccaggacagccccaggaacttcagccccagcgccagcgcccacttctcctttgcccggagcctgaacagaacagatggaagacgctggagcctggccagcctgcccagcagcggctacggcaccaacacccccagcagcacagtgagcagcagctgcagcagccaggagaagctgcaccagctgccctaccagcccaccccagatgagctgcacttcctgagcaagcacttctgcaccacagagagcatcgccacagagaaccgctgcaggaacacccccatgaggcccaggagccgcagcctgagccctggccgcagccctgcctgctgtgaccacgagatcatcatgatgaaccacgtgtacaaggagcgcttccccaaggccacagcccagatggaggagcggctgaaggagatcatcaccagctacagcccagacaacgtgctgcccctggctgatggagtgctgtccttcacccaccaccagatcatcgagctggcccgggactgcctggacaagagccaccagggcctcatcaccagccgctacttcctggagctgcagcacaagctggacaagctgctgcaggaggcccatgacagaagtgagagcggggagctggccttcatcaagcagctggtgaggaagatcctgattgtgattgcccggcctgcccggctgctggagtgcctggagtttgatcctgaggagttctactacctgctggaggccgctgagggccacgccaaggagggccagggcatcaagacagacatcccccgctacatcatcagccagctgggcctgaacaaggaccccctggaggagatggcccacctgggcaactatgattctggaacagctgagaccccagagacagatgagagcgtgagcagcagcaatgccagcctgaagctgcggaggaagccccgggagagtgactttgagaccatcaagctgatcagcaatggagcctacggggctgtgtactttgtgcgccacaaggagagccggcagagatttgccatgaagaagatcaacaagcagaacctgatcctgaggaaccagatccagcaggcctttgtggagcgggacatcctgacctttgctgagaacccctttgtggtgtccatgtactgcagctttgagaccaggaggcacctgtgcatggtgatggagtatgtggagggcggggactgtgccaccctgatgaagaacatgggccccctgcctgtggacatggccaggatgtactttgctgagaccgtgctggccctggagtacctgcacaactacggcatcgtgcaccgggacctgaagccagacaacctgctggtgacctccatgggccacatcaagctgacagactttggcctgagcaaggtgggcctgatgtccatgaccaccaacctgtatgagggccacatcgagaaggatgcccgggagttcctggacaagcaggtgtgtggcaccccagagtacatcgcccctgaggtgatcctgcggcagggctacggcaagcctgtggactggtgggccatgggcatcatcctgtatgagttcctggtgggctgtgtgcccttctttggagacaccccagaggagctgtttggccaggtgatcagtgatgagatcaactggccagagaaggatgaggcccctcctccagatgcccaggacctgatcaccctgctgctgcggcagaaccccctggagcggctgggcaccggcggggcctatgaggtgaagcagcaccgcttcttccgcagcctggactggaacagcctgctgcggcagaaggccgagttcatcccccagctggagagtgaagatgacaccagctactttgacaccaggtctgagaagtaccaccacatggagacagaggaggaggatgacaccaatgatgaggacttcaacgtggagatccggcagttcagcagctgcagccaccgcttcagcaaggtgttcagcagcattgaccgcatcacccagaacagcgctgaggagaaggaggacagcgtggacaagaccaagagcaccaccctgcccagcacagagaccctgtcctggagcagcgagtacagcgagatgcagcagctgagcaccagcaacagcagtgacacagagagcaacagacacaagctgagcagcggcctgctgcccaagctggccatcagcacagaaggagagcaggatgaagctgccagctgccctggggacccccatgaggagcccgggaagccagccctgcccccagaagaatgtgcccaggaggagcctgaggtgaccaccccagccagcaccatcagcagcagcaccctgtctgtgggcagcttcagcgagcacctggaccagatcaatggccgctcagaatgtgtggacagcacagacaacagcagcaagcccagcagcgagcccgccagccacatggcccggcagaggctggagagcacagagaagaagaagatcagcggcaaggtgaccaagagcctgagcgccagcgccctgagcctgatgatccctggggacatgtttgctgtgagccccctgggcagccccatgagcccccacagcctgagcagtgaccccagcagcagccgggacagcagccccagccgggacagcagcgctgccagcgccagcccccaccagcccatcgtcatccacagcagcggcaagaactacggcttcaccatccgggccatccgggtgtatgtgggggacagcgacatctacacagtgcaccacatcgtgtggaatgtggaggagggcagccctgcctgccaggccggcctgaaggccggggacctgatcacccacatcaatggagagcctgtgcacggcctggtgcacacagaggtgattgagctgctgctgaagagcggcaacaaggtgtccatcaccaccaccccatttgagaacaccagcatcaagacaggccctgccaggagaaattcctacaagagcaggatggtgcggcgcagcaagaagagcaagaagaaggagagcctggagcggcggcgcagcctcttcaagaagctggccaagcagcccagccccctgctgcacaccagccgctccttcagctgcctgaacagaagcctgagcagcggggagagcctgcccggcagccccacccacagcctgagccccaggagccccacccccagctaccgcagcaccccagacttccccagcggcaccaacagcagccagagcagcagccccagcagcagcgcccccaacagccctgctggcagcggccacatccggcccagcaccctgcacggcctggcccccaagctgggcggccagcgctaccgcagcggccgcaggaagtctgctggcaacatccccctgagccccctggcccggacccccagccccaccccccagcccaccagcccccagaggagccccagccccctgctgggccacagcctgggcaacagcaagatcgcccaggccttccccagcaagatgcacagcccccccaccatcgtgcgccacatcgtgcggcccaagtctgctgagccccccaggagccccctgctgaagagggtgcagagcgaggagaagctgagccccagctatggcagtgacaagaagcacctgtgcagcaggaagcacagcctggaggtgacccaggaggaggtgcagcgggagcagagccagcgggaggcccccctgcagagcctggatgaaaatgtgtgtgatgtgccccccctgagccgggcccggcctgtggagcagggctgcctgaagaggcctgtgtccaggaaggtgggccggcaggagagcgtggatgacctggaccgggacaagctgaaggccaaggtggtggtgaagaaggcagatggcttccctgagaagcaggagagccaccagaagagccacggccctggcagtgacctggagaactttgccctcttcaagctggaggagcgggagaagaaggtgtaccccaaggctgtggagaggagcagcacctttgagaacaaggcctccatgcaggaggccccacccctgggcagcctgctgaaggatgccctgcacaagcaggcctctgtgcgggccagcgagggcgccatgtctgatggccgggtgcctgctgagcaccggcagggcggcggggacttccggcgggccccagcccctggcaccctgcaggacggcctgtgccacagcctggaccggggcatctctggaaaaggagagggcacagagaagagcagccaggccaaggagctgctgcgctgtgagaagctggacagcaagctggccaacatcgactacctgaggaagaagatgagcctggaggacaaggaggacaacctgtgccctgtgctgaagcccaagatgacagctggcagccatgaatgtctgcccggcaaccctgtgcggcccactggaggccagcaggagcccccaccagccagcgagagccgggcctttgtgagcagcacccacgccgcccagatgtctgctgtgtcctttgtgcccctgaaggccctgaccggccgggtggacagcggcacagagaagccaggcctggtggcccctgagagccctgtgaggaagagccccagcgagtacaagctggagggccgctctgtgtcctgcctgaagcccatcgagggcaccctggacatcgccctgctgagcggcccccaggccagcaagacagagctgcccagccctgagagcgcccagagccccagccccagcggagatgtgcgggcctctgtgccccctgtgctgcccagcagcagcggcaagaagaatgacaccaccagcgcccgggagctgagccccagcagcctgaagatgaacaagagctacctgctggagccctggttcctgccccccagccggggcctgcagaacagccctgctgtgtccctgcctgaccctgagttcaagagggacaggaagggcccccaccccacagcccggagccctggcaccgtgatggagagcaacccccagcagcgggagggcagcagccccaagcaccaggaccacaccacagaccccaagctgctgacctgcctgggccagaacctgcacagcccagacctggcccggccccgctgccccctgcccccagaggccagccccagccgggagaagccaggcctgcgggagagcagcgagcggggccccccaacagcccggtctgagaggtctgctgcccgggctgacacctgccgggagcccagcatggagctgtgcttccctgagacagccaagaccagtgacaacagcaagaacctgctgtctgtgggccgcacccacccagacttctacacccagacccaggccatggagaaggcctgggcccctgggggcaagaccaaccacaaggatggccctggagaggcccggcccccaccccgggacaacagcagcctgcacagcgctggcatcccctgtgagaaggagctgggcaaggtgagaagaggagtggagcccaagccagaggccctgctggcccggcgcagcctgcagcccccaggcatcgagagcgagaagtctgagaagctgagcagcttccccagcctgcagaaggatggagccaaggagcctgagaggaaggagcagcccctgcagaggcaccccagcagcatccccccaccacccctgacagccaaggacctgagcagccctgctgcccggcagcactgcagcagccccagccacgccagcggccgggagcccggggccaagcccagcacagctgagcccagcagcagcccccaggacccccccaagcctgtggccgcccacagcgagagcagcagccacaagcccaggcctggccctgaccccggcccccccaagaccaagcacccagacaggagcctgagcagccagaagcccagcgtgggcgccaccaagggcaaggagcccgccacccagagcctgggcggcagcagccgggagggcaagggccacagcaagagcggcccagatgtgtttcctgccaccccaggcagccagaacaaggccagtgatggcatcggccagggcgagggcggccccagcgtgcccctgcacacagaccgggcccccctggatgccaagccccagcccaccagcggcggccggcccctggaggtgctggagaagcctgtgcacctgccccggcccggccaccctggccccagcgagcctgctgaccagaagctgtctgctgtgggggagaagcagaccctgagccccaagcaccccaagcccagcacagtgaaggactgccccaccctgtgcaagcagacagacaaccggcagacagacaagagccccagccagcctgctgccaacacagaccggcgggcagagggcaagaagtgcacagaggccctgtatgccccagctgagggggacaagctggaggccggcctgagctttgtgcacagcgagaaccggctgaagggagctgagaggcctgctgctggggtgggcaagggcttccctgaggcccggggcaaaggacctggcccccagaagccacccacagaggccgacaagcccaacggcatgaagaggagccccagcgccaccggccagagcagcttccgcagcacagccctgcctgagaagagcctgagctgcagcagcagcttccctgagaccagggctggggtgcgggaggccagcgctgccagcagtgacaccagcagcgccaaggctgctgggggcatgctggagctgcctgcccccagcaacagagaccacaggaaggcccagcctgctggggagggccgcacccacatgaccaagagtgacagcctgcccagcttccgggtgtccaccctgcccctggagagccaccacccagaccccaacaccatgggcggggccagccaccgggaccgggccctgtctgtgacagccaccgtgggggagaccaagggcaaggaccctgccccagcccagcccccaccagccaggaagcagaatgtgggcagagatgtgaccaagcccagccctgcccccaacacagaccggcccatcagcctgagcaatgagaaggactttgtggtgcggcagaggcggggcaaggagagcctgcggagcagcccccacaagaaggccctgtag

SEQ ID NO: 109186 - DNA, 7335 bp, Artificial Sequence
  derived and/or modified sequence
atgaaggcccagcgggagcggctgcagatccctggcctgaccctggacctgacccccaggagcctgagccccacccccagcagccctggcagcccctgcagccccctgctggccttccacttctggagctgcaggaccagcaacaggaagagcctgattggaaatggccagagccctgccctgccccggccccacagccccctgagcgcccacgccggcaacagcccccaggacagccccaggaacttcagccccagcgccagcgcccacttctcctttgccaggagaaatgacagaacagatggaagacgctggagcctggccagcctgcccagcagcggctacggcaccaacacccccagcagcacagtgagcagcagctgcagcagccaggagaagctgcaccagctgccctaccagcccaccccagatgagctgcacttcctgagcaagcacttctgcaccacagagagcatcgccacagagaaccgctgcaggaacacccccatgaggcccaggagccgcagcctgagccctggccgcagccctgcctgctgtgaccacgagatcatcatgatgaaccacgtgtacaaggagcgcttccccaaggccacagcccagatggaggagcggctgaaggagatcatcaccagctacagcccagacaacgtgctgcccctggctgatggagtgctgtccttcacccaccaccagatcatcgagctggcccgggactgcctggacaagagccaccagggcctcatcaccagccgctacttcctggagctgcagcacaagctggacaagctgctgcaggaggcccatgacagaagtgagagcggggagctggccttcatcaagcagctggtgaggaagatcctgattgtgattgcccggcctgcccggctgctggagtgcctggagtttgatcctgaggagttctactacctgctggaggccgctgagggccacgccaaggagggccagggcatcaagacagacatcccccgctacatcatcagccagctgggcctgaacaaggaccccctggaggagatggcccacctgggcaactatgattctggaacagctgagaccccagagacagatgagagcgtgagcagcagcaatgccagcctgaagctgcggaggaagccccgggagagtgactttgagaccatcaagctgatcagcaatggagcctacggggctgtgtactttgtgcgccacaaggagagccggcagagatttgccatgaagaagatcaacaagcagaacctgatcctgaggaaccagatccagcaggcctttgtggagcgggacatcctgacctttgctgagaacccctttgtggtgtccatgtactgcagctttgagaccaggaggcacctgtgcatggtgatggagtatgtggagggcggggactgtgccaccctgatgaagaacatgggccccctgcctgtggacatggccaggatgtactttgctgagaccgtgctggccctggagtacctgcacaactacggcatcgtgcaccgggacctgaagccagacaacctgctggtgacctccatgggccacatcaagctgacagactttggcctgagcaaggtgggcctgatgtccatgaccaccaacctgtatgagggccacatcgagaaggatgcccgggagttcctggacaagcaggtgtgtggcaccccagagtacatcgcccctgaggtgatcctgcggcagggctacggcaagcctgtggactggtgggccatgggcatcatcctgtatgagttcctggtgggctgtgtgcccttctttggagacaccccagaggagctgtttggccaggtgatcagtgatgagatcaactggccagagaaggatgaggcccctcctccagatgcccaggacctgatcaccctgctgctgcggcagaaccccctggagcggctgggcaccggcggggcctatgaggtgaagcagcaccgcttcttccgcagcctggactggaacagcctgctgcggcagaaggccgagttcatcccccagctggagagtgaagatgacaccagctactttgacaccaggtctgagaagtaccaccacatggagacagaggaggaggatgacaccaatgatgaggacttcaacgtggagatccggcagttcagcagctgcagccaccgcttcagcaaggtgttcagcagcattgaccgcatcacccagaacagcgctgaggagaaggaggacagcgtggacaagaccaagagcaccaccctgcccagcacagagaccctgtcctggagcagcgagtacagcgagatgcagcagctgagcaccagcaacagcagtgacacagagagcaacagacacaagctgagcagcggcctgctgcccaagctggccatcagcacagaaggagagcaggatgaagctgccagctgccctggggacccccatgaggagcccgggaagccagccctgcccccagaagaatgtgcccaggaggagcctgaggtgaccaccccagccagcaccatcagcagcagcaccctgtctgtgggcagcttcagcgagcacctggaccagatcaatggccgctcagaatgtgtggacagcacagacaacagcagcaagcccagcagcgagcccgccagccacatggcccggcagaggctggagagcacagagaagaagaagatcagcggcaaggtgaccaagagcctgagcgccagcgccctgagcctgatgatccctggggacatgtttgctgtgagccccctgggcagccccatgagcccccacagcctgagcagtgaccccagcagcagccgggacagcagccccagccgggacagcagcgctgccagcgccagcccccaccagcccatcgtcatccacagcagcggcaagaactacggcttcaccatccgggccatccgggtgtatgtgggggacagcgacatctacacagtgcaccacatcgtgtggaatgtggaggagggcagccctgcctgccaggccggcctgaaggccggggacctgatcacccacatcaatggagagcctgtgcacggcctggtgcacacagaggtgattgagctgctgctgaagagcggcaacaaggtgtccatcaccaccaccccatttgagaacaccagcatcaagacaggccctgccaggagaaattcctacaagagcaggatggtgcggcgcagcaagaagagcaagaagaaggagagcctggagcggcggcgcagcctcttcaagaagctggccaagcagcccagccccctgctgcacaccagccgctccttcagctgcctgaacagaagcctgagcagcggggagagcctgcccggcagccccacccacagcctgagccccaggagccccacccccagctaccgcagcaccccagacttccccagcggcaccaacagcagccagagcagcagccccagcagcagcgcccccaacagccctgctggcagcggccacatccggcccagcaccctgcacggcctggcccccaagctgggcggccagcgctaccgcagcggccgcaggaagtctgctggcaacatccccctgagccccctggcccggacccccagccccaccccccagcccaccagcccccagaggagccccagccccctgctgggccacagcctgggcaacagcaagatcgcccaggccttccccagcaagatgcacagcccccccaccatcgtgcgccacatcgtgcggcccaagtctgctgagccccccaggagccccctgctgaagagggtgcagagcgaggagaagctgagccccagctatggcagtgacaagaagcacctgtgcagcaggaagcacagcctggaggtgacccaggaggaggtgcagcgggagcagagccagcgggaggcccccctgcagagcctggatgaaaatgtgtgtgatgtgccccccctgagccgggcccggcctgtggagcagggctgcctgaagaggcctgtgtccaggaaggtgggccggcaggagagcgtggatgacctggaccgggacaagctgaaggccaaggtggtggtgaagaaggcagatggcttccctgagaagcaggagagccaccagaagagccacggccctggcagtgacctggagaactttgccctcttcaagctggaggagcgggagaagaaggtgtaccccaaggctgtggagaggagcagcacctttgagaacaaggcctccatgcaggaggccccacccctgggcagcctgctgaaggatgccctgcacaagcaggcctctgtgcgggccagcgagggcgccatgtctgatggccgggtgcctgctgagcaccggcagggcggcggggacttccggcgggccccagcccctggcaccctgcaggacggcctgtgccacagcctggaccggggcatctctggaaaaggagagggcacagagaagagcagccaggccaaggagctgctgcgctgtgagaagctggacagcaagctggccaacatcgactacctgaggaagaagatgagcctggaggacaaggaggacaacctgtgccctgtgctgaagcccaagatgacagctggcagccatgaatgtctgcccggcaaccctgtgcggcccactggaggccagcaggagcccccaccagccagcgagagccgggcctttgtgagcagcacccacgccgcccagatgtctgctgtgtcctttgtgcccctgaaggccctgaccggccgggtggacagcggcacagagaagccaggcctggtggcccctgagagccctgtgaggaagagccccagcgagtacaagctggagggccgctctgtgtcctgcctgaagcccatcgagggcaccctggacatcgccctgctgagcggcccccaggccagcaagacagagctgcccagccctgagagcgcccagagccccagccccagcggagatgtgcgggcctctgtgccccctgtgctgcccagcagcagcggcaagaagaatgacaccaccagcgcccgggagctgagccccagcagcctgaagatgaacaagagctacctgctggagccctggttcctgccccccagccggggcctgcagaacagccctgctgtgtccctgcctgaccctgagttcaagagggacaggaagggcccccaccccacagcccggagccctggcaccgtgatggagagcaacccccagcagcgggagggcagcagccccaagcaccaggaccacaccacagaccccaagctgctgacctgcctgggccagaacctgcacagcccagacctggcccggccccgctgccccctgcccccagaggccagccccagccgggagaagccaggcctgcgggagagcagcgagcggggccccccaacagcccggtctgagaggtctgctgcccgggctgacacctgccgggagcccagcatggagctgtgcttccctgagacagccaagaccagtgacaacagcaagaacctgctgtctgtgggccgcacccacccagacttctacacccagacccaggccatggagaaggcctgggcccctgggggcaagaccaaccacaaggatggccctggagaggcccggcccccaccccgggacaacagcagcctgcacagcgctggcatcccctgtgagaaggagctgggcaaggtgagaagaggagtggagcccaagccagaggccctgctggcccggcgcagcctgcagcccccaggcatcgagagcgagaagtctgagaagctgagcagcttccccagcctgcagaaggatggagccaaggagcctgagaggaaggagcagcccctgcagaggcaccccagcagcatccccccaccacccctgacagccaaggacctgagcagccctgctgcccggcagcactgcagcagccccagccacgccagcggccgggagcccggggccaagcccagcacagctgagcccagcagcagcccccaggacccccccaagcctgtggccgcccacagcgagagcagcagccacaagcccaggcctggccctgaccccggcccccccaagaccaagcacccagacaggagcctgagcagccagaagcccagcgtgggcgccaccaagggcaaggagcccgccacccagagcctgggcggcagcagccgggagggcaagggccacagcaagagcggcccagatgtgtttcctgccaccccaggcagccagaacaaggccagtgatggcatcggccagggcgagggcggccccagcgtgcccctgcacacagaccgggcccccctggatgccaagccccagcccaccagcggcggccggcccctggaggtgctggagaagcctgtgcacctgccccggcccggccaccctggccccagcgagcctgctgaccagaagctgtctgctgtgggggagaagcagaccctgagccccaagcaccccaagcccagcacagtgaaggactgccccaccctgtgcaagcagacagacaaccggcagacagacaagagccccagccagcctgctgccaacacagaccggcgggcagagggcaagaagtgcacagaggccctgtatgccccagctgagggggacaagctggaggccggcctgagctttgtgcacagcgagaaccggctgaagggagctgagaggcctgctgctggggtgggcaagggcttccctgaggcccggggcaaaggacctggcccccagaagccacccacagaggccgacaagcccaacggcatgaagaggagccccagcgccaccggccagagcagcttccgcagcacagccctgcctgagaagagcctgagctgcagcagcagcttccctgagaccagggctggggtgcgggaggccagcgctgccagcagtgacaccagcagcgccaaggctgctgggggcatgctggagctgcctgcccccagcaacagagaccacaggaaggcccagcctgctggggagggccgcacccacatgaccaagagtgacagcctgcccagcttccgggtgtccaccctgcccctggagagccaccacccagaccccaacaccatgggcggggccagccaccgggaccgggccctgtctgtgacagccaccgtgggggagaccaagggcaaggaccctgccccagcccagcccccaccagccaggaagcagaatgtgggcagagatgtgaccaagcccagccctgcccccaacacagaccggcccatcagcctgagcaatgagaaggactttgtggtgcggcagaggcggggcaaggagagcctgcggagcagcccccacaagaaggccctgtag

SEQ ID NO: 109187 - DNA, 7335 bp, Artificial Sequence
  derived and/or modified sequence
atgaaggcccagcgggagcggctgcagatccccggcctgaccctggatctcacacctcgctcactgagcccgactcccagtagccccggatccccctgcagtcccttgctcgccttccacttctggtcttgcaggacaagcaaccggaaatcgctgattggaaatggacaatcaccagctctgccaaggccacatagcccattgtccgctcatgctggaaattcacctcaggacagccccaggaatttctctccttctgcttcagcccatttctccttcgccaggtcactgaatcgcaccgatggacgtagatggtcgttggcgagcctgcccagctctggatacggcactaacacaccgtcctcaacggtctcatcatcctgttcgagccaagagaaacttcaccagcttccctaccagcctacgcctgatgagctgcacttcctttcgaagcatttctgtactactgaaagcatcgcaactgagaacagatgtcgaaacacacctatgaggccaaggagtcgcagtctgagtccagggagatccccagcctgttgcgaccatgaaatcattatgatgaatcacgtctataaagaaagatttcctaaggccaccgcgcagatggaagagaggctgaaagaaataattacatcatactccccagataacgtgctgcctctggccgatggtgtgctcagctttacccaccatcagattattgaactcgcccgggattgcctcgacaaaagtcatcaaggcctgattacatccagatattttctcgaactgcaacacaagttagacaagctgctgcaggaagcgcatgatcgctctgaaagcggggagctcgcgtttattaaacagctcgtgcgaaaaatccttatcgttatcgctaggcctgcccggctgttagagtgcctcgaattcgatccagaggagttttattatctgctcgaagctgcagagggccacgcaaaggaagggcaaggaataaagaccgatataccgaggtacatcatctcccaactagggctgaataaggatcctctggaggagatggcccaccttggaaactacgacagcggaacagctgagacccctgaaaccgacgagtccgtctccagcagcaatgcctcgctgaaattgaggcgcaaacccagggagtccgacttcgagactatcaagcttatttccaatggtgcgtatggagctgtgtattttgtgcgacataaggagagtcgccaacggtttgccatgaagaagattaacaaacagaatctgattctgaggaatcagatccagcaggcatttgtggagagagatattctgacctttgccgagaatccttttgtcgtttctatgtactgctcgttcgaaacgagacggcacctctgcatggttatggagtacgtggagggaggggactgcgctacactgatgaagaacatggggccactgccggttgatatggccagaatgtacttcgctgaaactgtcctggctctggagtatctgcacaactacggaattgtacatcgcgatctgaagcccgacaacctcctggttacatctatgggacatatcaaactcactgactttggcctgagtaaagtggggctgatgagcatgactacaaacctctatgaaggccatatcgaaaaagatgctcgcgaatttctggacaagcaggtttgtgggacacctgagtacatcgcgccagaggtcatcctgcgacagggttacggtaagcctgtcgattggtgggccatgggcatcattctgtacgagtttctagtcggctgcgtccctttctttggtgatactccagaggaactgtttggccaagtgatctccgatgaaataaattggcctgagaaagacgaggctccaccccccgacgcgcaggacctgatcactctattgctaagacaaaaccctctcgaacgcctgggcactggcggtgcatatgaggtcaagcagcaccgctttttccggagcctggactggaactccttgctgcggcagaaggccgaatttatcccccagctagagagcgaggacgatacaagctacttcgacactcggtctgaaaaatatcatcacatggaaacggaagaagaggacgataccaacgatgaagattttaacgtggagatccgccagtttagttcctgctcccatcggtttagcaaggttttttcatcgattgatagaattacgcagaactctgcagaggaaaaagaggatagtgtagacaagactaagtccaccaccctccctagcactgagaccctctcctggagtagcgagtactccgagatgcagcagctaagcacatcaaactccagcgatacagagtctaacaggcacaagctctcctccggactcctgccgaagttggccatcagcacagagggagaacaggatgaagcggcctcctgtccaggcgacccacatgaagaacctgggaagcctgccctgccgccggaggagtgcgctcaggaagaacccgaagtgaccaccccagcatcgactatttcatccagtactctctcagtggggtcatttagcgaacatctggatcagatcaatggtagatcagagtgtgttgactcaacagataatagctccaagccgtcctcggagccagcctcgcatatggctcgccaacgactggagtctaccgagaagaagaaaatcagtgggaaggtcaccaagtccctgagcgccagcgccctctccttgatgatccccggtgacatgttcgctgtctctcccctggggtcacctatgtctcctcactccctgtcttctgatccatccagttcccgcgacagctcaccaagccgggacagctctgcagccagcgcctcaccccatcagccaatcgtgatccatagttcaggcaagaactacggttttactatccgcgcaattcgagtttatgtgggcgattccgatatctacacagttcaccatatcgtgtggaacgtggaagagggttcccctgcctgccaggctggcctgaaggccggggatctgatcacccacataaatggtgagcccgtgcacggactcgtgcacacagaagtgattgagttattactgaagtccggcaataaagtttcaataacgactaccccatttgagaatacttccataaaaactgggccagctagaaggaattcgtataaatccagaatggtaagacgatctaagaaatctaagaaaaaagagtctctggaaagaagaaggagcctcttcaagaaattggccaaacagcccagcccactgttacatacatccaggagcttctcctgcctcaatcgaagtctgagctcgggggaaagcctcccaggcagccccactcattcactttcccctcgtagccccactccctcctaccggtctactcctgacttcccatccggtaccaatagttctcagtcgagcagtccctccagcagtgcaccaaatagccccgcaggaagtggtcatatccgaccatccaccctgcatggccttgcccctaagctgggcggccagaggtaccgaagtggcaggcgtaagtctgccgggaacattccactgtcacccctggcacgcacaccaagcccaacgccccaacctacttcgccccaaagatctccctctcctctccttggacactcactggggaatagcaagattgctcaggcatttccctcaaaaatgcacagcccccctaccatcgtacgtcatatcgtgagacccaagagcgccgaaccacctagatctccgttgttgaagcgcgtccaaagcgaagagaagcttagtccctcctacggctcagataagaagcacttgtgctcccggaagcattcattggaagtgacccaggaggaggttcagcgtgaacagtcccagcgagaggcaccactccagtcattagatgaaaatgtatgcgacgtgcctcccctgtcgcgcgctcggcctgtagagcaagggtgtttgaagcgtcccgtatcccgcaaggtgggcaggcaggaatcggtggatgacctcgaccgggataagttaaaggccaaggtcgtagtcaaaaaggcagatggatttccagagaagcaggaatcccaccaaaagtcccatggtcccggctccgacctggaaaatttcgcactgtttaagttagaggaaagggagaagaaggtctatccgaaggcagtagagcgcagttctacctttgagaataaggcttccatgcaggaagcacctccactgggatctttgctcaaagatgccttacacaaacaggcctcagtgcgtgccagtgagggcgccatgtctgatggcagagtgccagccgaacataggcagggtgggggcgacttcaggcgtgctccagctcctggcaccctgcaagacggactttgtcacagcttggatagaggaatctccggtaaaggtgaaggcactgaaaaatccagtcaggcaaaagaactgctgaggtgtgagaagctcgacagtaagctggcaaatatcgattatctaagaaaaaaaatgtcacttgaggacaaggaggataacctatgtcccgtgctaaagcccaagatgaccgccgggagccacgagtgcctgcccggaaatccagtgcgacccacaggtggacaacaggagcctccccccgcctcagaaagtcgcgcctttgtcagcagcacccatgctgcgcagatgagcgcagtgagcttcgtcccattaaaggctctgactggccgggtcgacagcggcaccgaaaagcccggactggtggcacctgaatcccctgtaagaaaaagcccctccgaatataagttggaaggtagatcggtcagctgcctgaaacctatagaagggactttggacatcgctcttctgagtgggccacaggcatctaagaccgaattgccctctcctgagtcagcccagagtcccagcccctcaggggacgttcgggcatctgtcccccccgtcctcccttcttccagcggcaagaagaacgacaccacgagcgccagggagctgagtccttcttctctgaaaatgaataaaagctatctgctggagccctggttcctgcccccctctcgtgggctacagaattcccctgctgtgagcctgcccgaccccgagtttaaacgggatagaaagggaccccacccaaccgcgaggtcacctggtacagtgatggaatctaatccccagcagcgagaaggatccagccccaaacatcaggaccacacgaccgatcctaaactgctgacatgccttggacagaacctgcacagtccagatctggcccgaccccgatgtcccctcccacctgaagctagccctagccgggagaagcctgggcttcgagaaagctcagaacggggacctcctactgcccgttcggagaggtcagccgcacgcgcggatacatgccgtgaaccaagtatggaactttgcttcccagaaaccgccaagacatctgacaatagcaaaaacctgttatcggtcgggcggacccatccagacttctacacccaaacccaagcgatggagaaagcatgggcacctggggggaagaccaaccacaaggatggtccaggagaagctagacctccccccagggataacagctcccttcactctgctggtataccttgcgagaaggagttgggcaaagtgcgtcggggtgttgaaccgaagccagaagcgttacttgcaagaaggtccttacaaccacccggaatagaaagcgaaaagtcggaaaagctgtccagtttcccatcacttcagaaggatggggccaaggaacctgagcggaaagagcagccgttgcaacggcatccttcatccattcctccacctcctttaactgctaaggatctgagcagtccggccgctagacaacattgtagctcccccagccacgcatctggacgggagccaggagctaagccttcaaccgctgaacccagtagctctccccaagacccccccaaaccagtggccgcccattccgaaagctccagccataagcctaggcccggccccgatcccggtccacccaaaactaagcacccagaccggagcctgagttctcaaaaaccgagcgtgggcgcgacaaaagggaaagaacctgccacccaaagccttggaggcagctcacgcgagggcaaggggcacagcaagtctgggcctgatgtgtttcccgcaacccccggctcccagaataaggcctcagacggcatcggccagggggaagggggccctagcgtgcccctgcatactgaccgcgcaccccttgacgctaagccgcagcctacttctggagggcgtccgctcgaagtgctggagaaacccgtacatctgccaaggcccggtcaccccggcccaagcgagccagcagatcagaaattgtccgccgtcggtgagaagcagactcttagcccaaagcatcctaagcctagcacagtgaaagactgccctaccctgtgcaaacagacagataataggcagacggataagtcgccaagtcaacctgcagccaataccgacaggagggccgaaggcaagaaatgcactgaagccctatacgctcctgccgaaggagacaagctggaggctggcctgtcatttgtgcactctgaaaaccggctgaagggagccgaacgtcccgctgcaggagtgggtaagggatttcctgaagcacggggaaaaggcccaggcccccaaaaaccccctaccgaggccgacaagccaaatgggatgaaacggtccccatccgccaccggacagagcagttttcggtctactgcactgccagagaaaagcctgtcttgctccagctcctttcccgaaacacgggccggggttagggaggcctcagctgccagtagtgacacatcttccgctaaggcagcaggcggcatgctcgagcttcccgcgcctagcaaccgtgaccatagaaaagcccagcccgctggggaaggccgcactcacatgactaaaagcgacagcctaccatctttccgcgtcagtaccttgcccctcgagtcccatcaccctgaccctaacaccatgggtggtgctagccaccgggaccgagctttgtcagtaacagcaacagtgggcgagactaaaggaaaggacccagctccagcgcagcctccacctgctcgaaagcagaatgtggggcgggatgtaaccaagccatcccctgctcctaacaccgaccgcccaatcagcctgagcaacgagaaagatttcgttgttagacagaggaggggaaaggagtctctgcggagcagtcctcataagaaggcattgtag

SEQ ID NO: 109188 - DNA, 7335 bp, Artificial Sequence
  derived and/or modified sequence
atgaaggcccagcgggagcggctgcagatccccggcctgaccctggacttgacccccagaagtctgtcaccaacaccttctagtcccggaagcccatgtagtccattactggccttccacttttggagctgtagaacttccaatcgcaaatctctgatcggcaacgggcagagtccagctctgccacggccgcactcacctctgtcagcccacgcaggaaactccccccaagactctcccaggaacttcagtccatctgcctccgcacatttctcatttgcacgacggaatgaccgcactgacggccgcagatggagcttggcgagcctgccttcaagcggttatggtacgaacacgccctctagtacagtgtcaagttcatgttcttctcaggagaagttgcatcagctaccatatcaacccacacccgatgagctccattttctttctaaacatttctgcacgacagagtcaatcgcaaccgagaataggtgtcgcaataccccaatgagacctaggtccagaagtttatccccaggtaggtctcccgcctgctgcgaccacgaaattatcatgatgaatcatgtgtataaagagagatttcctaaggcaacagcccagatggaagagcgcttgaaggagatcattacaagttactcccccgataatgtgctccccctagccgatggtgtgctgtcgtttactcatcaccagatcatagagctcgcgagagattgtttagataagagccaccagggcctcattacctctcgttactttctggaattgcagcacaagttggacaagctcctccaggaggcccacgaccgatccgagtccggcgaactagcgtttatcaaacaactcgtgcgcaagatcttgatcgtgattgcaagacccgctaggctgcttgaatgtctcgagtttgacccagaggaattctactatctacttgaagctgcagaggggcatgctaaggaaggacagggaattaaaaccgatattccgcgatatatcatatcgcagctcggactcaataaggatccccttgaggagatggcccacctgggcaactatgacagtgggacagccgaaaccccagagacagacgagtcagtgagctctagcaacgcctctttgaaactccgtagaaagccacgggaatccgatttcgagacaattaagctcatctccaacggagcttacggggctgtctattttgtgcggcataaagaatcccgccagaggttcgctatgaaaaagataaacaaacagaatctgatcctccggaaccagattcaacaggcctttgtagaaagggacattctgacattcgcagaaaacccattcgtggtgtcaatgtactgtagcttcgaaacgaggcgacacctatgtatggtcatggagtatgtggaaggtggcgattgcgccacactgatgaaaaacatggggccgctgcccgtcgacatggctcgaatgtactttgcagagactgtgctggccctcgagtacttacataattacggtatagtgcatcgagacctgaagcctgacaatcttctggtgacgagtatgggtcatataaaactgaccgacttcgggctgagcaaggtgggactgatgtccatgaccaccaatctgtacgaaggacatatcgagaaggacgcccgggaatttttggataaacaggtctgtgggacacctgagtatatcgccccggaggttatactaagacaagggtatggcaaaccagtagactggtgggccatggggattatactctatgagtttctggtcggatgcgtccccttctttggggatacgcctgaggaactcttcgggcaggtaatctctgacgaaatcaactggcctgagaaggatgaggctccaccccccgacgctcaggatctgatcacccttttgcttcgccagaatccattggagaggttagggaccggaggagcctacgaggttaaacaacacaggtttttccgttctctggattggaactctctgctgcggcagaaggcagaatttatccctcagttagagtctgaggacgatacctcctactttgacacacggagtgaaaaataccaccacatggagacagaagaggaggatgacactaacgatgaagacttcaatgtggagataaggcagtttagctcctgctcccatcgctttagcaaagttttcagctctattgacagaattacacagaattctgctgaagagaaggaggacagtgtggacaaaaccaagtcaacaacactgccgtcaactgagactcttagttggtcttctgaatacagcgagatgcagcagctatccacctccaatagcagtgatacagaaagtaacaggcacaaactgagcagtgggctcctacctaaactggccattagtaccgaaggagagcaggacgaggctgccagttgtccaggagacccacacgaggaacccgggaagcccgcgctgccccctgaggaatgcgcacaagaagaacccgaggtgacaacaccagcgtctactatttcctcctctactctctccgtggggtcattctccgagcacctcgaccagattaacgggagaagtgagtgtgttgattccaccgacaattctagtaaacctagttccgaaccagctagccacatggcacgccaaagactggagagcacagaaaaaaagaagatcagcgggaaggttactaagagcctgtctgcaagcgccctctccttgatgatccccggggacatgtttgctgtttcgccccttggaagcccaatgtcgccgcactctctgtcaagtgatcctagcagcagcagagattccagcccttctagggatagtagcgctgccagcgcatcgccgcaccagcccatcgtcattcattccagcgggaagaattacggattcactattagagccatcagggtgtacgtgggcgactcagatatatatactgtccaccatatcgtctggaacgtggaggagggttctcctgcatgccaggccggacttaaggcaggagatttgataacacacataaatggtgaacctgttcacgggttggttcatacagaagtcattgagctgctcctcaagagcggcaacaaagtctcaatcaccactacgcccttcgaaaatacctctattaagacagggcccgcacgacgaaattcatacaaatctcgcatggtccggcggagcaagaaatccaagaagaaagagtctttggaacggagaaggtcattatttaaaaaactcgccaagcagccctccccccttctacatacatctagaagttttagttgcctcaaccgctctttgtctagcggagagtccctgcctggatcccccacccattctctgagcccccggtctcctactccttcttatcgctccacccccgacttcccaagcggaaccaactcctctcagagctcctctccaagttcaagcgctccaaatagccctgccgggtcgggccacatacggccatccactttacatgggctggccccaaaacttgggggccagcgctaccgctcaggtcggaggaagtcagccggcaatatcccactgtcccccctggctcgtactccttccccaacaccgcagcctacttctccacaaaggagccctagtcccctcttgggccatagtctggggaattcaaagattgcccaggcttttccctcaaaaatgcattctccccccaccatcgtgcgccatattgtgcgcccgaaaagtgctgagccccctcgatccccactgcttaagagggtgcagtccgaggaaaagttgtctccaagctatggatcggacaaaaagcatttatgctccagaaaacacagcctggaggtgacccaagaagaggttcagcgcgagcagagccaaagggaggcaccactgcagtcccttgatgagaacgtgtgcgatgtgccacccctatcccgcgctaggccagtagagcagggctgtttaaaaagacccgtgtcaaggaaagtgggcaggcaggagagcgtggatgacctggaccgagacaagctgaaggccaaagtcgtggtgaagaaggctgacggcttcccagagaagcaggagtcccatcaaaagagtcacgggcctggctctgatcttgaaaattttgctctcttcaaacttgaagaaagggaaaaaaaagtgtatccgaaagccgtggagcgaagctcaaccttcgaaaacaaggctagtatgcaggaggccccccccctggggagcttgctaaaggatgccctgcacaagcaggctagcgtccgcgcgtcggagggtgcaatgtcagatggtagggttcccgcggagcaccggcagggcgggggcgatttccggcgagcgcccgcccctggaactttacaggacggtttgtgtcactccctcgacagaggtatctcaggcaagggtgagggtactgagaaaagttctcaggcaaaagagctgcttaggtgtgaaaagttagacagtaagcttgcaaacattgattacttgagaaagaagatgagccttgaggataaggaagataacctgtgtccagtgctaaagcccaagatgactgctgggtcccatgaatgcctacctgggaaccctgttcggcctacaggcggtcagcaggaacctcctcccgcctcggaaagtagggcctttgtgagttctactcacgcggcacaaatgtcagctgtatcattcgtaccactcaaagctctaaccgggcgtgtggacagcggcacagaaaaaccagggttggtggccccagaaagccccgttcggaaaagcccaagcgagtacaagctggaaggacggagcgtgtcatgcctgaagcccatagagggaaccctcgacatcgccctcctctccggcccacaggccagcaaaacagagcttcctagtcccgagtccgctcagtccccgtctccttctggagacgtgagggcatccgtgcccccagtgctgccgtctagtagcggtaaaaagaatgatacaacctccgccagagaacttagcccttcctccctgaaaatgaacaagagctatctgcttgagccttggttcttgcctccaagccgtggacttcagaactccccagctgtgagcctccccgatcccgagttcaagcgagatcggaaggggcctcacccaactgcccgctcacctggcaccgtgatggaatctaacccccaacagagggagggctcgtctcccaagcatcaggaccatacgactgatccaaagctactgacttgtctcggccaaaaccttcactcaccggatttggccaggcctcggtgtcctttgcccccagaggctagcccttcccgtgaaaagccaggcctgcgggaatcatctgagcgaggccctcctactgccaggagtgagaggagtgccgccagggcagacacgtgcagagagcctagcatggaactgtgttttcccgaaaccgctaaaacttcagataactccaagaatcttctgtcagtggggaggacccatccagacttctatacccaaacacaggctatggagaaagcctgggcccccggcggtaagacaaatcacaaagatggacctggcgaagcccgcccgccaccccgcgataattcgagcctgcatagcgctggaatcccatgtgagaaggaactcggaaaagtgcgtcgcggcgttgagccaaaacctgaggcactgctcgcaaggcgatctttacaaccccccggtatagaaagtgaaaagtcagaaaagctgtcatccttcccgtccttgcagaaggatggcgccaaggagccagagcggaaggaacagcctctgcaaaggcatccaagcagcatccccccgccaccgctcactgccaaggatttgagctctcccgcagccagacagcactgctcttcaccttcgcatgccagcggacgcgaacctggcgcaaagccttccaccgccgaacccagcagttcaccccaggatcctcccaaacccgtggctgcacatagcgaatccagcagccacaaaccaaggccagggcctgatcccggaccaccaaagaccaagcaccccgatagatcgctgtcatcccagaagccgtctgtcggagctaccaagggcaaggagcctgccacacaatcccttggtggttctagccgtgagggaaaaggccactccaagtcggggccagatgtgtttcccgcgacccctggaagccagaacaaggccagtgacggtataggtcaaggggaagggggaccttccgtgccattgcacaccgaccgggcgccactggacgccaagccccaaccgacgtctggggggcgaccgctcgaagtcctcgaaaagcctgtccacttgcctcgccccgggcacccagggccttcggagcctgcagaccagaaactgtctgcagtcggcgagaagcaaactctctcccccaagcaccccaaacctagtaccgtcaaggactgtcccacgctttgcaaacagacagacaataggcagactgacaagtccccctcacaacccgcagcaaacactgacagacgggccgagggaaagaaatgcacagaggctctgtacgcccctgcagagggggataaactcgaagccggattgtcattcgtacatagtgagaatcggctgaaaggtgccgaaagaccagcagcgggggtggggaaagggttccccgaagcaagaggaaagggccccgggccgcagaaacctcctactgaggctgacaagcctaatggtatgaagagaagtccctctgccacaggccaatcctccttccgttcaacagctctccctgaaaagtcgctgagctgcagcagctccttcccagaaacccgtgctggcgtgcgggaagcatccgcggcctcttccgatactagtagcgctaaggcagcaggaggcatgctggagctgccagccccctcaaaccgtgatcaccgaaaagcgcaacctgctggggaaggccgaacacatatgaccaagtccgatagcctgccatcttttcgggtctccacccttcctctggaaagtcaccacccggatcctaataccatgggaggcgccagtcatcgggatcgagcactgagtgtcaccgccacagtgggagaaaccaagggcaaagatcctgctcccgcacagccacccccagccaggaagcaaaatgttggaagggacgtaaccaagcccagccctgcaccaaatactgatcgacctattagcctctcgaacgaaaaagattttgtcgttaggcagaggcggggcaaggagtccctgagaagctctccccataaaaaggcactgtag

SEQ ID NO: 109189 - DNA, 9879 bp, Artificial Sequence
  derived and/or modified sequence
atgaaagcccagcgggaaaggctacagattccggggctgaccttggatctcactcccaggagcctgagtccaaccccatccagcccaggcagtccttgtagtcctctcttggcctttcacttttggagttgccgaacaagcaaccggaaaagcttaataggcaatgggcagtcaccagcattgcctcgaccacactcacctctctctgctcatgcaggaaatagccctcaagatagtccaagaaatttctcccccagtgcctcagcccatttttcatttgcacggagtctcaataggactgatggacgccgctggtcgttggcttctctcccttcctctggctatgggacaaacacacccagctctacggtctcttcatcctgttcctcccaggagaagttgcatcagttaccataccaaccaacaccagacgagttacacttcttatcaaaacatttctgtaccaccgaaagcatcgccactgagaacagatgcaggaacacgccgatgcgcccccgttcccgaagtctgagccctggacgttctcccgcctgctgtgaccatgaaataattatgatgaaccatgtctacaaagaaaggttcccaaaggctacagctcagatggaagaacgtctaaaggaaattatcaccagctactctcctgacaacgttctacccttagcagatggagtgcttagtttcactcaccaccagattattgaactggctcgagattgcttggataaatcccaccagggcctcatcacctcacgatacttccttgaattacagcacaaattagataagttgctacaggaggctcatgatcgttcagaaagtggagaattggcatttattaaacaactagttcgaaagatcctaattgttattgcccgccctgctcggttattagagtgcctggaatttgatccggaagaattttactacctattggaagcagcagaaggccatgccaaagaaggacagggtattaaaaccgacattcccaggtacatcattagccaactgggactcaataaggatcccttggaagaaatggctcatttgggaaactacgatagtgggacagcagaaacaccagaaacagatgaatcagtgagtagctctaatgcctccctgaaacttcgaaggaaacctcgggaaagtgattttgaaacgattaaattgattagcaatggagcctatggggcagtctactttgttcggcataaagaatcccggcagaggtttgccatgaagaagattaataaacagaacctcatccttcgaaaccagatccagcaggcctttgtggagcgggatatcctgacttttgcagaaaacccctttgttgtcagcatgtattgctcctttgaaacaaggcgccacttgtgcatggtcatggaatatgtggaagggggagactgtgctactttaatgaaaaacatgggtcctctccctgttgatatggccagaatgtactttgctgagacggtcttggccttggaatatttacataattatggaattgtacacagggatttgaaaccagacaacttgttggttacctccatggggcacataaagctgacagattttggattatctaaggtgggactaatgagcatgactaccaacctttacgagggtcatattgagaaggatgctagagagttcctggataaacaggtctgtggcacacctgaatacattgcaccagaagtgattctgaggcagggttatggaaagccggtggactggtgggccatggggattatcctctatgaatttctggttggatgcgtgccattctttggggatactccagaggagctatttggacaagtcatcagtgatgagatcaactggcctgagaaggatgaggcacccccacctgatgcccaggatctgattaccttactcctcaggcagaatcccctggagaggctgggaacaggtggtgcatatgaagtcaaacagcatcgattcttccgttctttagactggaacagtttgctgagacagaaggcagaatttattccccaactggaatctgaggatgacacaagttattttgatactcggtctgagaagtatcatcatatggaaacggaggaagaagatgacacaaatgatgaagactttaatgtggaaataaggcagttttcttcatgttcacacaggttttcaaaagttttcagcagtatagatcgaatcactcagaattcagcagaagagaaggaagactctgtggacaaaaccaaaagcaccaccttgccatccacagaaacactgagctggagttcagaatattctgaaatgcaacagctatcaacatccaactcttcagatactgaaagcaacagacataaactcagttctggcctacttcccaaactggctatttcaacagagggagagcaagatgaagctgcctcctgccctggagacccccatgaggagccaggaaagccagcccttcctcctgaagagtgtgcccaggaggagcctgaggtcaccaccccagccagcaccatcagcagctccaccctgtcagttggcagtttttcagagcacttggatcagataaatggacgaagcgagtgtgtggacagtacagataattcctcaaagccatccagtgaacccgcttctcacatggctcggcagcgattagaaagcacagaaaaaaagaaaatctcggggaaagtcacaaagtccctctctgccagtgctctttccctcatgatcccaggagatatgtttgctgtttcccctctgggaagtccaatgtctccccattccctgtcctcggacccttcttcttcacgagattcctctcccagccgagattcctcagcagcttctgccagtccacatcagccgattgtgatccacagttcggggaagaactacggctttaccatccgagccatccgggtgtatgtgggagacagtgacatctatacagtgcaccatatcgtctggaatgtagaagaaggaagtccggcatgccaggcaggactgaaggctggagatcttatcactcacatcaatggagaaccagtgcatggacttgtccacacagaagttatagaactcctactgaagagtgggaataaggtgtcaatcactactaccccatttgaaaacacatcaatcaaaactggaccagccaggagaaacagctataagagccggatggtgaggcggagcaagaaatccaagaagaaagaaagtctcgaaaggaggagatctcttttcaaaaagctagccaagcagccttctcctttactccacaccagccgaagtttctcctgcttgaacagatccctgtcatcgggtgagagcctcccaggttcccccactcatagcttgtctccccggtctccaacaccaagctaccgctccacccctgacttcccatctggtactaattcctcccagagcagctcccctagttctagtgcccccaattccccagcagggtccgggcacatccggcccagcactctccacggtcttgcacccaaactcggcgggcagcggtaccggtccggaaggcgaaagtccgccggcaacatcccactgtccccgctggcccggacgccctctccaaccccgcaacccacctccccgcagcggtcaccatcccctcttctgggacactcactgggcaattccaagatcgcgcaagcctttcccagcaagatgcactccccgcccaccatcgtcagacacatcgtgaggcccaagagtgcggagccccccaggtccccgctgctcaagcgcgtgcagtccgaggagaagctgtcgccctcttacggcagtgacaagaagcacctgtgctcccgcaagcacagcctggaggtgacccaagaggaggtgcagcgggagcagtcccagcgggaggcgccgctgcagagcctggatgagaacgtgtgcgacgtgccgccgctcagccgcgcccggccagtggagcaaggctgcctgaaacgcccagtctcccggaaggtgggccgccaggagtctgtggacgacctggaccgcgacaagctgaaggccaaggtggtggtgaagaaagcagacggcttcccagagaaacaggaatcccaccagaaatcccatggacccgggagtgatttggaaaactttgctctgtttaagctggaagagagagagaagaaagtctatccgaaggctgtggaaaggtcaagtacttttgaaaacaaagcgtctatgcaggaggcgccaccgctgggcagcctgctgaaggatgctcttcacaagcaggccagcgtgcgcgccagcgagggtgcgatgtcggatggccgggtgcctgcggagcaccgccagggtggcggggacttcagacgggcccccgctcctggcaccctccaggatggtctctgccactccctcgacaggggcatctctgggaagggggaaggcacggagaagtcctcccaggccaaggagcttctccgatgtgaaaagttagacagcaagctggccaacatcgattacctccgaaagaaaatgtcacttgaggacaaagaggacaacctctgccctgtgctgaagcccaagatgacagctggctcccacgaatgcctgccagggaacccagtccgacccacgggtgggcagcaggagcccccgccggcttctgagagccgagcttttgtcagcagcacccatgcagctcagatgagtgccgtctcttttgttcccctcaaggccttaacaggccgggtggacagtggaacggagaagcctggcttggttgctcctgagtcccctgttaggaagagcccctccgagtataagctggaaggtaggtctgtctcatgcctgaagccgatcgagggcactctggacattgctctcctgtccggacctcaggcctccaagacagaactgccttccccagagtctgcacagagccccagcccaagtggtgacgtgagggcctctgtgccaccagttctccccagcagcagtgggaaaaagaacgataccaccagtgcaagagagctttctccttccagcttaaagatgaataaatcctacctgctggagccttggttcctgccccccagccgaggtctccagaattcaccagcagtttccctgcctgacccagagttcaagagggacaggaaaggtccccatcctactgccaggagccctggaacagtcatggaaagcaatccccaacagagagagggcagctcccctaaacaccaagaccacaccactgaccccaagcttctgacctgcctggggcagaacctccacagccctgacctggccaggccacgctgcccgctcccacctgaagcttccccctcaagggagaagccaggcctgagggaatcgtctgaaagaggccctcccacagccagaagcgagcgctctgctgcgagggctgacacatgcagagagccctccatggaactgtgctttccagaaactgcgaaaaccagtgacaactccaaaaatctcctctctgtgggaaggacccacccagatttctatacacagacccaggccatggagaaagcatgggcgccgggtgggaaaacgaaccacaaagatggcccaggtgaggcgaggcccccgcccagagacaactcctctctgcactcagctggaattccctgtgagaaggagctgggcaaggtgaggcgtggcgtggaacccaagcccgaagcgcttcttgccaggcggtctctgcagccacctggaattgagagtgagaagagtgaaaagctctccagtttcccatctttgcagaaagatggtgccaaggaacctgaaaggaaggagcagcctctacaaaggcatcccagcagcatccctccgccccctctgacggccaaagacctgtccagcccggctgccaggcagcattgcagttccccaagccacgcttctggcagagagccgggggccaagcccagcactgcagagcccagctcgagcccccaggaccctcccaagcctgttgctgcgcacagtgaaagcagcagccacaagccccggcctggccctgacccgggccctccaaagactaagcaccccgaccggtccctctcctctcagaaaccaagtgtcggggccacaaagggcaaagagcctgccactcagtccctcggtggctctagcagagaggggaagggccacagtaagagtgggccggatgtgtttcctgctaccccaggctcccagaacaaagccagcgatgggattggccagggagaaggtgggccctctgtcccactgcacactgacagggctcctctagacgccaagccacaacccaccagtggtgggcggcccctggaggtgctggagaagcctgtgcatttgccaaggccgggacacccagggcctagtgagccagcggaccagaaactgtccgctgttggtgaaaagcaaaccctgtctccaaagcaccccaaaccatccactgtgaaagattgccccaccctgtgcaaacagacagacaacagacagacagacaaaagcccgagtcagccggccgccaacaccgacagaagggcggaagggaagaaatgcactgaagcactttatgctccagcagagggcgacaagctcgaggccggcctttcctttgtgcatagcgagaaccggttgaaaggcgcggagcggccagccgcgggggtggggaagggcttccctgaggccagagggaaagggcccggtccccagaagccaccgacggaggcagacaagcccaatggcatgaaacggtccccctcagccactgggcagagttctttccgatccacggccctcccggaaaagtctctgagctgctcctccagcttccctgaaaccagggccggagttagagaggcctctgcagccagcagcgacacctcttctgccaaggccgccgggggcatgctggagcttccagcccccagcaacagggaccataggaaggctcagcctgccggggagggccgaacccacatgacaaagagtgactccctgccctccttccgggtctccaccctgcctctggagtcacaccaccccgacccaaacaccatgggcggggccagccaccgggacagggctctctcggtgactgccaccgtaggggaaaccaaagggaaggaccctgccccagcccagcctcccccagctaggaaacagaacgtgggcagagacgtgaccaagccatccccagccccaaacactgaccgccccatctctctttctaatgagaaggactttgtggtacggcagaggcgggggaaagagagtttgcgtagcagccctcacaaaaaggccttgtaacggggagggcccaggggcaggactgtggagacccgtcctgaacgggcgactgtgtcttgactacctttcaaaaccagcactgtgtgggaatgtccgccaggcagagctcggagcctcattgagacaggggagagagaaagacaaagaggggaccttcttccagatgccttcccagttgtaaccggtaaaactgttaccagatagtgtttgtacaaaaaaaaaaaaaaaaaaaaaaaaaaaaattacctttacagttgagggttgttgaggaaaatgattttctttgtaaatatatagcatcgtgtttggtttgggatgtagagtctatacctggctgctgattgcgtcgtttactacagctttttttaaataagatttttgctttaccatttatcataatgtagtaatgaagcaaaatggtcaaaactgggtgtgtgtgaacagagatacacccatattcgtgtatatacacatccacctacatgttttggtctgtggtttaagagactatttcaaggttccatttttataagctaaaacattctaagttaagatggaagaaagccctaaacacagtagattctgagtttttatgtgtattttaaccagagtttctgatagtactgtatctggctacctatatttccagatctaaagcaagaactactctaagtactgcatttggaatcctcctccattaggaatggccaggacaagtggagctagccattttcattacacggccatcccaatggacactggatccctggtccaactgtctaaaaggccagttgttcctttctgtggatgtggatgtctggccttcacctgaggtagagcggggactataaacacacatcaactttctttctgtttgctttcttttccttcttttcaaactcttaaactcaggcctttatgctgtgagtgactagtccaagaagcacacattttgtagtagtcctgcaccagccctgctcttgaataaaaaggaaaattactggctgcacccaaatcttctagtacttgagtaataagcatcaggcattggaagaggttttaaatttgcttttttgaggaaaagaactgggggtggattttggcatcgtagcatatcgattaaagaataatcaggacatcagatacattttaatacatagctggggccttatgttgtagatgaagcttgctgtttttagcaagttcctgggtttcacattcatttctgctgcatctagtagctccacacatttcataacctgatctctttatttgtatgcaaaaaatactgtcttaatacagagcagcatttttgtaacaaagagactcgctggagctatttggtgcttgaatgtgaccatcctttttacttttgctaagccttatttaaattttgtataccgtggaatatgtagaatttgtcaaatcattttagtgctgaaggtttttgatttcttgtttttgtttctgttgttgcagtttctttggtggcttgttttgtattgtaagatggcacttgctgatataaatactaaggcactaagagaaaatacagataagtatttataagttgcttgggaaccatagcagaattttttgtttggttttgtaagagaaaaaaaattaccaataaataactgatctagcacccaaactctcttgggggatgtcttagtatcttcacgctataaaattgttcatctaagcacagcatcatcttatggccttatggattgtaaatcttctagtgaggctataaactccactctgaaaacaaaggcataacttaaccgactgctcagttgtccttcgttgtaaaatgaattggctttgggaaaaaggaaaaaaacaaacaaaaaaagaaaaagaaaaaagcctcctccttgcccctaatttttttttcccatatggttttagccattccccatcactatattgtgaagctgtaaaaatatatatatatactttacaagagtttactaatggatttcaaaactggtctcaacgtttataatacatatctgtgtttggcagttgtcataacccaatcctacattcagccatcgggacaagtctgtcggggaggtagttcatggtttacaagcctttgctttttaactgtccaatttcctttaaagcacaactagctatttgtttacaaatgatatttttatgtatattttgtatagtgtatcatcatttttgccaaatatgtttttcattataaatgagtaaagagtacttaaggttgcattcatgtattacatgtttgttgttgtaaacctctccaatcagctggtagaaattctcctcattgtgttctatttggtcagtctctgtgtgattgtaggatgtgctccttggtagtactcccagctgtagatttaccagcttaaaagtttgttaggatctgtgcaataaagtgtttgcagtcttattttctctaagaaattccttatggacgtcataattgttgtatattgaacaaaatatttatacttatgcagttgcataacattgaaataaaaatttagcatgaaaaga

SEQ ID NO: 109190 - DNA, 7713 bp, Artificial Sequence
  derived and/or modified sequence
ttatttttttgccccagtctgcagggtgaaaaggacttttcatttcactgaggtgaaaagtgggtctgtgagtagagcgactttctttaaaaaaaaaaaaaaaaatcagaaaccaattacttgatatgcagagctgcaagcctcgttcctttaacaaaatcagtgcagtgtgcactgccgttaacctgaggaaagcagctgacatctcttgattacggctagaggtggaaggacccaaacttgcagcctccccctccccctcgagagagtgttagtccagtcctttagagaggttcggtttggctctctgtcatcaccgggacgctggcagggagtgtgtgtcatggttacaatagagtgtgctaacatataacaaccatgaaagcccagcgggaaaggctacagattccggggctgaccttggatctcactcccaggagcctgagtccaaccccatccagcccaggcagtccttgtagtcctctcttggcctttcacttttggagttgccgaacaagcaaccggaaaagcttaataggcaatgggcagtcaccagcattgcctcgaccacactcacctctctctgctcatgcaggaaatagccctcaagatagtccaagaaatttctcccccagtgcctcagcccatttttcatttgcacggagaaatgacaggactgatggacgccgctggtcgttggcttctctcccttcctctggctatgggacaaacacacccagctctacggtctcttcatcctgttcctcccaggagaagttgcatcagttaccataccaaccaacaccagacgagttacacttcttatcaaaacatttctgtaccaccgaaagcatcgccactgagaacagatgcaggaacacgccgatgcgcccccgttcccgaagtctgagccctggacgttctcccgcctgctgtgaccatgaaataattatgatgaaccatgtctacaaagaaaggttcccaaaggctacagctcagatggaagaacgtctaaaggaaattatcaccagctactctcctgacaacgttctacccttagcagatggagtgcttagtttcactcaccaccagattattgaactggctcgagattgcttggataaatcccaccagggcctcatcacctcacgatacttccttgaattacagcacaaattagataagttgctacaggaggctcatgatcgttcagaaagtggagaattggcatttattaaacaactagttcgaaagatcctaattgttattgcccgccctgctcggttattagagtgcctggaatttgatccggaagaattttactacctattggaagcagcagaaggccatgccaaagaaggacagggtattaaaaccgacattcccaggtacatcattagccaactgggactcaataaggatcccttggaagaaatggctcatttgggaaactacgatagtgggacagcagaaacaccagaaacagatgaatcagtgagtagctctaatgcctccctgaaacttcgaaggaaacctcgggaaagtgattttgaaacgattaaattgattagcaatggagcctatggggcagtctactttgttcggcataaagaatcccggcagaggtttgccatgaagaagattaataaacagaacctcatccttcgaaaccagatccagcaggcctttgtggagcgggatatcctgacttttgcagaaaacccctttgttgtcagcatgtattgctcctttgaaacaaggcgccacttgtgcatggtcatggaatatgtggaagggggagactgtgctactttaatgaaaaacatgggtcctctccctgttgatatggccagaatgtactttgctgagacggtcttggccttggaatatttacataattatggaattgtacacagggatttgaaaccagacaacttgttggttacctccatggggcacataaagctgacagattttggattatctaaggtgggactaatgagcatgactaccaacctttacgagggtcatattgagaaggatgctagagagttcctggataaacaggtctgtggcacacctgaatacattgcaccagaagtgattctgaggcagggttatggaaagccggtggactggtgggccatggggattatcctctatgaatttctggttggatgcgtgccattctttggggatactccagaggagctatttggacaagtcatcagtgatgagatcaactggcctgagaaggatgaggcacccccacctgatgcccaggatctgattaccttactcctcaggcagaatcccctggagaggctgggaacaggtggtgcatatgaagtcaaacagcatcgattcttccgttctttagactggaacagtttgctgagacagaaggcagaatttattccccaactggaatctgaggatgacacaagttattttgatactcggtctgagaagtatcatcatatggaaacggaggaagaagatgacacaaatgatgaagactttaatgtggaaataaggcagttttcttcatgttcacacaggttttcaaaagttttcagcagtatagatcgaatcactcagaattcagcagaagagaaggaagactctgtggacaaaaccaaaagcaccaccttgccatccacagaaacactgagctggagttcagaatattctgaaatgcaacagctatcaacatccaactcttcagatactgaaagcaacagacataaactcagttctggcctacttcccaaactggctatttcaacagagggagagcaagatgaagctgcctcctgccctggagacccccatgaggagccaggaaagccagcccttcctcctgaagagtgtgcccaggaggagcctgaggtcaccaccccagccagcaccatcagcagctccaccctgtcagttggcagtttttcagagcacttggatcagataaatggacgaagcgagtgtgtggacagtacagataattcctcaaagccatccagtgaacccgcttctcacatggctcggcagcgattagaaagcacagaaaaaaagaaaatctcggggaaagtcacaaagtccctctctgccagtgctctttccctcatgatcccaggagatatgtttgctgtttcccctctgggaagtccaatgtctccccattccctgtcctcggacccttcttcttcacgagattcctctcccagccgagattcctcagcagcttctgccagtccacatcagccgattgtgatccacagttcggggaagaactacggctttaccatccgagccatccgggtgtatgtgggagacagtgacatctatacagtgcaccatatcgtctggaatgtagaagaaggaagtccggcatgccaggcaggactgaaggctggagatcttatcactcacatcaatggagaaccagtgcatggacttgtccacacagaagttatagaactcctactgaagagtgggaataaggtgtcaatcactactaccccatttgaaaacacatcaatcaaaactggaccagccaggagaaacagctataagagccggatggtgaggcggagcaagaaatccaagaagaaagaaagtctcgaaaggaggagatctcttttcaaaaagctagccaagcagccttctcctttactccacaccagccgaagtttctcctgcttgaacagatccctgtcatcgggtgagagcctcccaggttcccccactcatagcttgtctccccggtctccaacaccaagctaccgctccacccctgacttcccatctggtactaattcctcccagagcagctcccctagttctagtgcccccaattccccagcagggtccgggcacatccggcccagcactctccacggtcttgcacccaaactcggcgggcagcggtaccggtccggaaggcgaaagtccgccggcaacatcccactgtccccgctggcccggacgccctctccaaccccgcaacccacctccccgcagcggtcaccatcccctcttctgggacactcactgggcaattccaagatcgcgcaagcctttcccagcaagatgcactccccgcccaccatcgtcagacacatcgtgaggcccaagagtgcggagccccccaggtccccgctgctcaagcgcgtgcagtccgaggagaagctgtcgccctcttacggcagtgacaagaagcacctgtgctcccgcaagcacagcctggaggtgacccaagaggaggtgcagcgggagcagtcccagcgggaggcgccgctgcagagcctggatgagaacgtgtgcgacgtgccgccgctcagccgcgcccggccagtggagcaaggctgcctgaaacgcccagtctcccggaaggtgggccgccaggagtctgtggacgacctggaccgcgacaagctgaaggccaaggtggtggtgaagaaagcagacggcttcccagagaaacaggaatcccaccagaaatcccatggacccgggagtgatttggaaaactttgctctgtttaagctggaagagagagagaagaaagtctatccgaaggctgtggaaaggtcaagtacttttgaaaacaaagcgtctatgcaggaggcgccaccgctgggcagcctgctgaaggatgctcttcacaagcaggccagcgtgcgcgccagcgagggtgcgatgtcggatggccgggtgcctgcggagcaccgccagggtggcggggacttcagacgggcccccgctcctggcaccctccaggatggtctctgccactccctcgacaggggcatctctgggaagggggaaggcacggagaagtcctcccaggccaaggagcttctccgatgtgaaaagttagacagcaagctggccaacatcgattacctccgaaagaaaatgtcacttgaggacaaagaggacaacctctgccctgtgctgaagcccaagatgacagctggctcccacgaatgcctgccagggaacccagtccgacccacgggtgggcagcaggagcccccgccggcttctgagagccgagcttttgtcagcagcacccatgcagctcagatgagtgccgtctcttttgttcccctcaaggccttaacaggccgggtggacagtggaacggagaagcctggcttggttgctcctgagtcccctgttaggaagagcccctccgagtataagctggaaggtaggtctgtctcatgcctgaagccgatcgagggcactctggacattgctctcctgtccggacctcaggcctccaagacagaactgccttccccagagtctgcacagagccccagcccaagtggtgacgtgagggcctctgtgccaccagttctccccagcagcagtgggaaaaagaacgataccaccagtgcaagagagctttctccttccagcttaaagatgaataaatcctacctgctggagccttggttcctgccccccagccgaggtctccagaattcaccagcagtttccctgcctgacccagagttcaagagggacaggaaaggtccccatcctactgccaggagccctggaacagtcatggaaagcaatccccaacagagagagggcagctcccctaaacaccaagaccacaccactgaccccaagcttctgacctgcctggggcagaacctccacagccctgacctggccaggccacgctgcccgctcccacctgaagcttccccctcaagggagaagccaggcctgagggaatcgtctgaaagaggccctcccacagccagaagcgagcgctctgctgcgagggctgacacatgcagagagccctccatggaactgtgctttccagaaactgcgaaaaccagtgacaactccaaaaatctcctctctgtgggaaggacccacccagatttctatacacagacccaggccatggagaaagcatgggcgccgggtgggaaaacgaaccacaaagatggcccaggtgaggcgaggcccccgcccagagacaactcctctctgcactcagctggaattccctgtgagaaggagctgggcaaggtgaggcgtggcgtggaacccaagcccgaagcgcttcttgccaggcggtctctgcagccacctggaattgagagtgagaagagtgaaaagctctccagtttcccatctttgcagaaagatggtgccaaggaacctgaaaggaaggagcagcctctacaaaggcatcccagcagcatccctccgccccctctgacggccaaagacctgtccagcccggctgccaggcagcattgcagttccccaagccacgcttctggcagagagccgggggccaagcccagcactgcagagcccagctcgagcccccaggaccctcccaagcctgttgctgcgcacagtgaaagcagcagccacaagccccggcctggccctgacccgggccctccaaagactaagcaccccgaccggtccctctcctctcagaaaccaagtgtcggggccacaaagggcaaagagcctgccactcagtccctcggtggctctagcagagaggggaagggccacagtaagagtgggccggatgtgtttcctgctaccccaggctcccagaacaaagccagcgatgggattggccagggagaaggtgggccctctgtcccactgcacactgacagggctcctctagacgccaagccacaacccaccagtggtgggcggcccctggaggtgctggagaagcctgtgcatttgccaaggccgggacacccagggcctagtgagccagcggaccagaaactgtccgctgttggtgaaaagcaaaccctgtctccaaagcaccccaaaccatccactgtgaaagattgccccaccctgtgcaaacagacagacaacagacagacagacaaaagcccgagtcagccggccgccaacaccgacagaagggcggaagggaagaaatgcactgaagcactttatgctccagcagagggcgacaagctcgaggccggcctttcctttgtgcatagcgagaaccggttgaaaggcgcggagcggccagccgcgggggtggggaagggcttccctgaggccagagggaaagggcccggtccccagaagccaccgacggaggcagacaagcccaatggcatgaaacggtccccctcagccactgggcagagttctttccgatccacggccctcccggaaaagtctctgagctgctcctccagcttccctgaaaccagggccggagttagagaggcctctgcagccagcagcgacacctcttctgccaaggccgccgggggcatgctggagcttccagcccccagcaacagggaccataggaaggctcagcctgccggggagggccgaacccacatgacaaagagtgactccctgccctccttccgggtctccaccctgcctctggagtcacaccaccccgacccaaacaccatgggcggggccagccaccgggacagggctctctcggtgactgccaccgtaggggaaaccaaagggaaggaccctgccccagcccagcctcccccagctaggaaacagaacgtgggcagagacgtgaccaagccatccccagccccaaacactgaccgccccatctctctttctaatgagaaggactttgtggtacggcagaggcgggggaaagagagtttgcgtagcagccctcacaaaaaggccttgtaa

SEQ ID NO: 109191 - DNA, 7334 bp, Artificial Sequence
  derived and/or modified sequence
atgaaagcccagagggaaaggttgcagatccctggactaacactggatctaaccccaaggagcctgtcccccacaccgtcttctcccggatctccatgcagcccgttgctagccttccacttttggtcatgtagaacaagcaaccgaaagtctctgatcggcaatggacagtccccagccctacccagaccccactctccccttagcgcccacgcaggcaatagtcctcaggattcccctcggaatttttctccaagcgctagtgcgcacttttctttcgcaagaagtctgaatagaactgatggcaggcggtggtcgctggcatctttacccagctccggttatggcacaaacacaccctcaagcacagtgagctctagctgctcctcccaggaaaagctccatcaactgccctaccaacctacacccgatgagttgcatttcctgagtaagcatttctgcaccacggaatctatcgccacagagaacagatgcaggaacacccccatgagacccagaagcagatctctgagcccaggccgtagtcccgcttgttgcgatcatgagatcattatgatgaatcatgtttataaggaacggttcccaaaagcaaccgcccaaatggaagagcgtcttaaggagataattaccagctattctcccgataacgtcctacctctagccgatggagtactctccttcacacatcaccagattatcgagctggctcgagattgtctcgataagtctcaccagggccttatcacgtcaagatactttctagagctccagcataaactcgacaaattactgcaggaagcgcacgacaggtcagaatctggggagctcgcattcatcaaacagctcgtgcggaaaatcctcatcgtgatcgcgaggcccgctaggttattggagtgtcttgaattcgatccagaggagttctactacttgctggaggcggcagaaggtcacgcaaaggaagggcagggtataaaaaccgatatccctagatatattatttcccagctaggcctgaataaggatccgctggaggagatggcgcacctgggaaactacgactccgggactgcggagacccctgaaacggacgagtctgtgtctagcagcaatgcttctctgaagttgcggaggaagcccagggagtccgacttcgagacgataaagcttatctctaatggagcttatggagctgtatactttgtgaggcacaaagaatcacggcaacgctttgccatgaaaaaaatcaataagcagaatctaatcttacggaatcagatccagcaggcattcgtcgagagagacattctcacatttgccgagaacccctttgtggtttcgatgtattgtagctttgagacacgcaggcacctgtgtatggtcatggaatacgtcgagggtggtgattgcgccacactgatgaagaacatggggcctttgccagtggatatggccaggatgtattttgccgaaactgtactggcattggagtaccttcacaattatggcattgtacaccgtgatctcaagccagataatctattagtcacatccatgggacacatcaagctgaccgattttggactttctaaggttggtttgatgtccatgacaacgaatctgtatgagggccatattgagaaagatgcccgtgaatttctggacaagcaggtgtgcggcacgcccgagtatatcgctcctgaagtgatcctgcgacagggctacgggaagcccgtcgactggtgggcgatgggaataattctttacgaattcctggtgggttgtgtgcctttctttggcgatacacctgaggaactctttgggcaggtgatcagcgacgagatcaattggcctgagaaggatgaggcccctccccctgacgctcaggaccttattaccttactcctgagacagaacccactagagaggctgggtacaggcggagcctatgaagtaaaacagcatcgttttttccggtctctggattggaactcccttctaagacaaaaggcggagtttattccgcaactcgagtcagaggacgacactagttatttcgacactcgcagcgaaaagtatcaccatatggagaccgaagaggaggatgacacaaacgacgaggacttcaacgtagaaatcagacagttttctagctgcagtcatagattttcaaaggttttcagtagcatcgatcgcattactcagaactccgccgaggagaaggaggattccgtggacaagaccaaatccactacattaccaagcacagaaactctgagctggagtagcgagtactccgaaatgcagcagctgtcgacatctaattcaagtgacactgagtcgaaccgtcacaaactttcatcgggcctgctgcccaagctggcgatatccaccgagggggaacaggatgaagcagccagctgccccggtgaccctcacgaagaacccggtaaacccgcattacctcccgaggagtgcgcacaggaggagccggaggttaccactcctgccagcacaatcagcagttccaccctatcagtggggagtttttctgaacatcttgaccagatcaatggacgttcagaatgtgtggacagcaccgataactccagtaagccctccagtgaacccgctagccatatggcacgccagcgattggagtccaccgagaaaaagaaaatatctgggaaagtgactaagtcactttctgccagcgcgctatcactgatgatcccgggagatatgtttgccgtcagccccctcggctctcccatgtctccacacagcctcagctccgatccttcctcttcgcgcgattccagtccgagtagagattctagcgcagcctcagccagcccacaccagcccatcgttatccacagcagcggtaagaattatggatttactattcgagcaatacgagtgtacgtcggtgacagtgacatttatactgtgcaccatattgtctggaacgtggaagagggatctcccgcttgccaggccggtctgaaagcaggggatctgattacacatataaatggggaaccagtgcacggactcgtacacacagaagtgatagaactgttactgaagagtgggaataaggtgtccatcaccactacccctttcgaaaacacttcaattaagacaggcccagctaggcgcaactcctataagtctcggatggtgcgtcgttctaaaaaaagcaaaaaaaaagaatctttagaacggcgacgctctctctttaagaagctggccaaacagccctcccccttgttgcatactagccgttccttttcatgcttgaacagatcactgagcagtggagagtcacttccgggatcccctacccacagtctcagcccccgatcccccactccctcatacagatcaacaccagacttccccagtggaacaaattcctcccagagctctagcccttccagttcagcgcctaacagccccgcaggatctggacatattaggcccagcacacttcatggacttgcacctaagctcgggggacaacgctatcgcagcggtcggagaaagagcgctggaaacatcccgctgtctccgctggcaaggacaccgagcccaacaccccagcctacgtcccctcagagatcccctagcccacttctgggtcattctctcggtaacagtaaaatcgctcaggccttccccagcaaaatgcactcacctcccaccatcgtgaggcatatcgtgagacccaagagcgccgaacccccacgaagtcccttactgaagcgagttcaaagtgaggagaagcttagtcccagctatgggtccgacaagaaacatttatgctccagaaagcattcactggaggtgacacaagaagaggtccagagagaacagtcccagagggaagccccactccagtcccttgatgagaatgtgtgtgacgtccctcccctaagccgagctcgcccagtggagcaggggtgtttgaagaggcctgtgtcaagaaaggtgggccgacaggagagtgttgacgacctggatcgggataagttgaaagccaaggttgtagtgaagaaggcggatgggtttccagaaaaacaagagagtcaccagaagtcacacggcccaggtagtgacctggagaactttgctctcttcaagttggaggagagggagaaaaaagtgtacccaaaagccgtggaacgctccagcacattcgagaataaggctagcatgcaagaggctccacctcttggcagtctgctgaaagatgccctccacaagcaggcaagtgtccgcgcttctgaaggcgcaatgtctgacgggcgagtgccagcagagcaccgtcaggggggtggcgactttcgtcgtgctcctgcccctggtaccctgcaggatggcctatgtcacagtctggatcgcggaattagtggcaagggggagggaacagaaaagagctcacaggctaaggagctattgagatgcgagaagttagactccaaactggccaatatcgactacctgcggaagaaaatgtccctagaggacaaagaggataacctttgtcccgtgctaaaacccaaaatgaccgcaggttcgcacgagtgtttgcccggaaaccccgtgagacctactggtgggcagcaagaacctccccctgcctcagagagtcgagcctttgtctcatctactcacgcagctcagatgagtgcagtgagctttgtgcccctgaaggccctcactggaagggtggactccggaactgagaaaccaggactggtggccccagaaagtcctgtcagaaagtccccatctgagtacaagttggagggaaggtctgtctcctgtcttaagcccattgaaggaacactcgacatcgccctcttgtccggccctcaggctagcaaaacggaactcccatctcctgagtctgctcagagtcctagtccttccggtgacgtgcgcgcttctgtgccacctgtgctgccatcctcttccggaaagaagaatgatactacctccgcccgagaattatctccttcaagtctgaaaatgaacaagagttacctactcgagccttggttccttccgccaagtagggggctccagaatagtccagcagtgagcctgccagatccggagtttaaaagggacagaaaaggacctcaccccaccgcgaggtccccgggaacagtcatggagtcgaatccccagcagcgtgagggatcctctccgaagcatcaagaccacacgacagatcctaagctcctgacttgcctggggcagaatctgcatagccccgacctagcgagacctcgttgcccactgccccctgaggcgagcccctctagggaaaaacctgggctgagagagtcttcggaacgagggccacctaccgcccgatccgaacgaagtgcggctagagcagacacgtgccgggagccaagcatggaactatgtttccccgagacggccaagactagtgataacagtaagaacctgcttagcgtgggcaggactcaccccgatttctacacgcaaacgcaggccatggaaaaagcctgggcccctggaggaaagacaaatcataaagacgggcctggggaagctcggcctccaccacgtgacaacagtagtctccactcagccggtattccctgcgagaaagagttaggcaaagtacgcagaggagtggaacctaagccagaagcacttctggcacgcaggtccctacagccaccagggattgagagtgagaagagtgagaagctatcctcctttccttccctccagaaggacggtgcgaaagagccggaaagaaaagaacagccactgcaacggcacccctcgagcatccctcctcccccattgactgctaaggatctctcatctcctgccgctcgtcagcattgttctagcccttcccacgcgagcgggagggagccaggcgctaagccctccaccgcagagccttcatcaagcccccaagaccctcctaagcctgttgcagcccacagtgaatccagctctcataaacctcgccctgggcctgaccccggaccgcctaagaccaagcaccccgacaggtccttaagcagccagaagccttctgtgggtgcaacaaagggtaaagaacctgcaacacagtccctgggcggaagttctagggaggggaaggggcactcaaagtccgggccagatgttttccctgccacgcccggatcccaaaataaggcgagcgatgggatcggtcagggcgaaggcggacctagcgtacccctccacactgaccgcgcacccctggatgccaaaccccagcccacatccggcggtcggcctctggaagtgctggaaaaaccagtgcatctgccacgccctgggcatcctggaccatctgagcctgcagaccaaaaactctccgccgtgggagaaaaacagaccttgagcccaaaacaccccaaaccatccacagttaaagactgtccaactctgtgcaagcagaccgataataggcagacagataaatcaccatctcagcccgcagccaacaccgaccgaagagccgaggggaaaaaatgcactgaggcactctatgcacctgccgagggagataaactcgaagctgggttatcattcgtccattcggagaatcgcctgaaaggagccgagcgcccagcagctggcgtaggaaaggggttcccggaggccagagggaaaggccctggaccccagaagccgcctaccgaggccgataaaccaaatggcatgaagcgctccccatcagccacaggccagtccagctttcgctccacggccctgccagagaaatcgctgtcctgttcgtcatctttccccgaaacgcgcgctggtgtccgagaggcgtctgccgcttcctcagataccagttcagcaaaagctgcgggtggaatgcttgagctcccagctccatccaatcgcgatcacaggaaggcacagccagccggtgagggacgaacgcacatgaccaaaagcgatagtttacccagcttccgtgtatccaccctgcctctggaatcacaccaccccgatccgaatacgatgggcggagcatcccatagggaccgggctctgtccgtcaccgcaacagtgggtgaaactaagggcaaggacccagcacctgctcaaccgcctcccgctcgaaagcagaacgttggaagggatgtcactaaaccctcccctgcgccaaacaccgaccggccaatttccctatctaacgagaaggactttgttgtaaggcagaggcgaggaaaggagagtctacgcagctctccccacaaaaaggccctgta

SEQ ID NO: 109192 - DNA, 7334 bp, Artificial Sequence
  derived and/or modified sequence
atgaaggcccagagagaaaggctgcagatcccgggactaaccctggatctaactccacgatcactaagccctacaccatcctctcctggcagcccctgttctccactgttagcttttcacttttggtcgtgccggacatccaatcggaaatccctgatcggtaacggacagagcccggctctgcccagaccacactcacccttaagcgcccacgccggtaattctccacaagatagccccagaaacttctcccccagtgcatcagctcattttagctttgccaggagaaatgatagaacagatgggcgacgatggagccttgcatctctcccgagttccggctacggtactaatacacccagctctaccgtctcttctagctgctcgtcacaggaaaagctacaccagttgccgtaccagcctacgccggacgagctccacttcctcagcaaacacttctgtacaactgagtccattgcgacagagaacaggtgtcgaaatacaccaatgcgtccgcgttccagaagcctgagtccaggtcggtcgccagcatgttgcgatcatgaaattataatgatgaaccatgtgtataaagagcgttttcctaaggccactgcacagatggaggagcgcctgaaggagatcatcacaagttacagcccagacaatgtgctgccactggctgatggtgtccttagctttactcatcaccaaatcatcgaactggctagggactgcttggataagagccaccagggtctgataaccagtaggtacttcctcgagttacagcataaactggataagttgctgcaggaggctcacgataggtccgagtctggcgagcttgcctttattaaacagctggtgcggaaaattcttatagttatcgcgaggcccgctcgactgcttgagtgtctagagtttgaccctgaagaattctactacctcctggaagctgccgagggccacgctaaggaagggcagggaataaaaaccgacattccaaggtacattatctcccagctgggtctgaacaaagaccccctcgaggaaatggctcacttgggtaactacgactcaggcacagccgaaactcctgagacggacgagtccgtgagctcatctaatgcatctttgaagctgcgtcgaaagcctcgcgaatccgatttcgaaacgattaagctgattagcaacggtgcttatggagccgtgtatttcgttagacacaaagagagccgccagcgctttgccatgaagaaaattaacaagcagaacctcattctgcgtaatcaaatccaacaagccttcgtggaaagggacatcctgacatttgccgaaaacccgtttgttgtctcaatgtattgctcctttgagaccagaaggcacctgtgcatggttatggagtatgtggagggcggagattgcgctactctgatgaaaaacatgggtcctctccctgttgatatggcgcgtatgtatttcgccgaaacggtgttagccctggagtacctccacaattacggaatcgtccaccgggatttgaaacctgacaacctgctcgtcacctccatgggtcatatcaagcttaccgattttgggctgtccaaggtcgggctgatgtccatgacgaccaacctttacgaaggtcacattgagaaagatgctcgggagtttctggataagcaggtgtgcggtactcctgagtacattgccccagaagtcatactgcgccagggctacggaaagcctgtcgactggtgggccatgggcatcatactgtatgagtttctcgttggatgtgtgccgtttttcggtgataccccagaggaactcttcggacaggtcattagtgatgagattaactggccagagaaggacgaagcccctccacccgatgcccaggatcttattacattattgctgcggcagaacccattggagcgtctgggcaccggcggagcatatgaagtaaagcaacaccggttttttagatctctggattggaacagcttgctccgtcagaaggctgagtttattcctcagctcgagtcggaggatgacacctcatacttcgacacgcgcagtgaaaagtatcaccatatggagactgaggaggaagacgacaccaatgatgaagatttcaacgtggagattcgacagttctcctcctgctcccacaggttcagtaaggttttctcctctatcgatcggattacccaaaattcagcggaagaaaaggaagatagcgtggacaagaccaagagcacaaccttgcccagcacggagactctgagctggtcctctgagtactccgagatgcagcaattaagtacctcaaattcctctgatacagagagcaacagacataagctgtcatcagggctgctgcccaagctcgccatcagcaccgaaggagagcaggacgaggccgcttcctgtccaggcgatccacacgaggaacccggtaaaccagctctgccccctgaggaatgtgcccaggaggaacccgaagtgaccacgcccgcaagtactatctccagctccaccctctctgtggggtcattcagtgagcacttggatcagatcaatgggagatctgaatgcgttgacagcacagataactccagcaaaccatctagtgagcccgcttctcacatggccagacagcgacttgaatctacagagaagaaaaaaatttcagggaaagttacaaagtccctgtccgcgagtgcactgtcgctcatgataccaggcgatatgtttgccgtcagtcctctcggatctccaatgtccccacactccctgtccagtgatcctagtagttctcgtgattccagcccctctcgggattcttcggccgcaagcgcgagtccccaccaacccattgtcatccattcctcgggcaagaactacggattcacaattagggcaattcgagtctacgtgggcgattccgatatctacacggtgcaccacatcgtttggaacgtcgaagagggctccccagcatgtcaagcgggtctgaaagcaggggacctgataacccatattaatggggaacctgtacatgggctagttcataccgaagttattgagctgctcctgaagtccggaaacaaagtgtccataacaaccacacctttcgagaacacaagcatcaaaaccgggccagctcggcgaaactcctacaagagccggatggttcggcgatcaaaaaagtcaaaaaagaaagagagcctcgaaagacggcgtagtttatttaaaaaactcgccaaacagccaagccccttactgcataccagtcgatctttctcctgccttaacaggtcactcagttccggagagagtttgcccggatcccctactcactccctcagcccgcgtagtcctactccgagttatcggagcacaccggatttccccagcgggacaaactccagtcaaagtagcagtccctcttcttccgcccctaacagccctgccggtagcggccacatccggcctagcactctgcacggactggccccaaagttgggcggacaaagatatcgctccgggagaaggaagtctgccggtaatatccccctgtcccctttagcccgaactccatctcccacacctcagcccacaagtccgcagcgctctccatccccgcttcttggccactccctgggtaacagcaaaatcgcccaggcgttcccaagtaaaatgcactcaccccctacaatcgtgcgacatatcgtgcgaccaaagagcgccgagcctcctcggtcacctctactcaaaagagttcaatcggaagagaaactgagccctagctacggctccgataaaaagcatctgtgctccaggaaacatagcctagaggtgactcaagaagaggtgcaaagggagcaaagtcagcgagaggcaccactgcagtcactggacgagaacgtgtgtgacgtacctccactgtctcgagctagacctgtggagcagggctgcctgaaacgcccagtgagccggaaagtgggaaggcaagagagcgtggatgatctcgatagagataagttaaaagctaaagtcgtggtgaagaaagctgatggtttccccgaaaaacaagaatcacatcagaaatctcatggcccaggcagcgacctggagaatttcgcccttttcaaactggaggagcgagagaagaaggtataccccaaagccgtcgaacgatccagtacttttgagaacaaagcctccatgcaagaggctccaccacttggctccctgttaaaggatgccttgcataaacaggcttctgtgcgggcatccgagggagcgatgagcgacggcagggtgcctgcagaacacaggcagggagggggagatttccggagggctcccgcacccggaaccctccaggatgggctgtgtcactccctggatcgcggtatctcaggcaaaggcgagggcaccgaaaagtcatcccaagcaaaggagcttctgcggtgcgaaaaactggacagtaaacttgccaacatcgattacctgcgcaagaagatgtccctcgaagataaagaagacaatctgtgccccgtcctgaaacctaagatgaccgccggtagtcatgaatgcctgccagggaatccagtacgcccaacggggggtcagcaggagccgcctcctgcttctgagtcccgggcatttgtctcctccacacatgcggcacaaatgagtgctgtttcattcgttccattgaaggccctgaccggccgtgtggattctggaactgaaaagcccggtctcgtcgcccctgaaagtcccgtcagaaaaagtccctcagaatataaactggagggaagatccgtttcgtgtctcaaacctattgagggcacactggatatagccctcctatcaggcccacaggccagcaagaccgagctcccgtcgcctgagtcagcccagtcccccagtccttccggagatgtcagagcgtccgttccgccagtgctaccctcgagttctggaaaaaaaaacgatacaacttcagcgagagagcttagtccgtctagcttaaagatgaacaaatcctacctgttggagccatggtttctgcccccttctagaggcctccagaattcccctgctgtaagtcttccagatcccgagttcaagcgcgatcgcaagggccctcaccctacagctcgtagccccggaaccgtcatggaaagcaacccacaacagcgcgagggaagttcacctaagcatcaggatcacactacagaccctaaactcctcacttgtctgggacagaatctccactcacctgatcttgcacgtccgaggtgccctcttccaccggaagcttccccttccagagagaaacccggtctgagagaaagctcagagcggggaccccctactgccagatctgagaggagcgctgcacgagctgacacttgtagggaaccctctatggagctgtgcttccctgagacagccaaaacctccgataacagtaaaaatctcctgagcgtaggcagaacccaccccgatttctacacccagactcaggcaatggagaaggcctgggcgcctggcggaaaaaccaatcacaaggatggaccaggcgaggcacgccctccccctcgcgacaacagttcgctccattcagcagggattccatgtgaaaaggaattaggcaaggtgcgacgtggcgtggagcctaagccagaagccctgttagcgcgtcgttcactgcaaccccctggcattgagtccgagaagagtgagaaattgtctagctttcctagtctgcagaaagatggagccaaggagcccgaacgcaaggagcagcccctacaacggcatccttcgtcaattccccctccccctctcaccgccaaagatctcagttctcctgccgcacgacagcattgttccagtccaagccacgcatctggcagagagccaggagccaagcctagtactgctgaaccatcatcttctcctcaggacccaccaaagccagtggcagctcacagcgaaagctcttcacacaaacctcgtccaggaccagaccccggtcctcccaagaccaagcatccagatcggtccctaagctctcagaagccgtccgtcggcgcaaccaaaggtaaggagcccgcaacacaaagccttggtggtagtagtcgcgaaggaaaggggcattccaagagcggcccagacgtattcccagctacaccaggaagtcagaataaggcttccgacgggattggacagggtgaagggggaccatctgttccccttcacaccgacagagcaccactggacgcaaagcctcaaccaacttccggaggacgccctttggaggtgctcgaaaaacctgtccatttacccagacccggacatcctggcccatctgaacccgcagaccaaaaattgagcgctgtcggagaaaaacagactttatcccctaagcacccaaagccttccacagtgaaggattgcccaacgctgtgcaagcagacggataaccggcagaccgataagtccccgtcacaacctgccgcaaacaccgatagaagagctgaaggcaagaagtgcacagaggccttatatgcacctgcggagggtgacaagttggaggcagggctgagctttgtacatagcgaaaaccgcctaaaaggcgctgagcggcctgctgccggtgtcggaaaaggctttcctgaagcccgaggcaagggcccaggccctcagaaacctcccacggaagccgacaagccaaatggaatgaaacgatcgccgtccgccaccgggcaaagcagtttcaggagcaccgccctcccagaaaaaagcctgagttgtagcagctccttcccggagactcgggcaggcgtgcgtgaggcttctgccgcatcatccgataccagcagcgcaaaagcagccggaggaatgttagagctgccagctcccagcaaccgcgatcacaggaaagcccagccagctggcgaaggcagaacacatatgaccaagtccgattcgctccccagcttccgagtaagcactctgcccctggagtcacaccaccctgatccaaatactatgggcggagcaagccatagggaccgggctttgagtgtgacagctactgtgggagagacaaagggtaaggacccagcgcctgcccaacctcctcctgcgaggaaacagaacgtggggagggatgtcactaagccttccccagccccaaacacggatcgtcctatctctctgagtaacgagaaggattttgtggtgaggcagagacggggtaaggaaagtctaaggagctcaccccacaaaaaagccctcta

SEQ ID NO: 109193 - protein, 993 aa, Artificial Sequence
  derived and/or modified sequence
MDMSDPNFWTVLSNFTLPHLRSGNRLRRTQSCRTSNRKSLIGNGQSPALPRPHSPLSAHAGNSPQDSPRNFSPSASAHFSFARRTDGRRWSLASLPSSGYGTNTPSSTVSSSCSSQEKLHQLPYQPTPDELHFLSKHFCTTESIATENRCRNTPMRPRSRSLSPGRSPACCDHEIIMMNHVYKERFPKATAQMEERLKEIITSYSPDNVLPLADGVLSFTHHQIIELARDCLDKSHQGLITSRYFLELQHKLDKLLQEAHDRSESGELAFIKQLVRKILIVIARPARLLECLEFDPEEFYYLLEAAEGHAKEGQGIKTDIPRYIISQLGLNKDPLEEMAHLGNYDSGTAETPETDESVSSSNASLKLRRKPRESDFETIKLISNGAYGAVYFVRHKESRQRFAMKKINKQNLILRNQIQQAFVERDILTFAENPFVVSMYCSFETRRHLCMVMEYVEGGDCATLMKNMGPLPVDMARMYFAETVLALEYLHNYGIVHRDLKPDNLLVTSMGHIKLTDFGLSKVGLMSMTTNLYEGHIEKDAREFLDKQVCGTPEYIAPEVILRQGYGKPVDWWAMGIILYEFLVGCVPFFGDTPEELFGQVISDEINWPEKDEAPPPDAQDLITLLLRQNPLERLGTGGAYEVKQHRFFRSLDWNSLLRQKAEFIPQLESEDDTSYFDTRSEKYHHMETEEEDDTNDEDFNVEIRQFSSCSHRFSKVFSSIDRITQNSAEEKEDSVDKTKSTTLPSTETLSWSSEYSEMQQLSTSNSSDTESNRHKLSSGLLPKLAISTEGEQDEAASCPGDPHEEPGKPALPPEECAQEEPEVTTPASTISSSTLSDMFAVSPLGSPMSPHSLSSDPSSSRDSSPSRDSSAASASPHQPIVIHSSGKNYGFTIRAIRVYVGDSDIYTVHHIVWNVEEGSPACQAGLKAGDLITHINGEPVHGLVHTEVIELLLKSGNKVSITTTPFENTSIKTGPARRNSYKSRMVRRSKKS

SEQ ID NO: 109194 - DNA, 2982 bp, Artificial Sequence
  derived and/or modified sequence
atggacatgagcgaccccaacttctggaccgtgctgagcaacttcaccctgccccacctgagaagcggcaacagactgagaagaacccagagctgcagaaccagcaacagaaagagcctgatcggcaacggccagagccccgccctgcccagaccccacagccccctgagcgcccacgccggcaacagcccccaggacagccccagaaacttcagccccagcgccagcgcccacttcagcttcgccagaagaaccgacggcagaagatggagcctggccagcctgcccagcagcggctacggcaccaacacccccagcagcaccgtgagcagcagctgcagcagccaggagaagctgcaccagctgccctaccagcccacccccgacgagctgcacttcctgagcaagcacttctgcaccaccgagagcatcgccaccgagaacagatgcagaaacacccccatgagacccagaagcagaagcctgagccccggcagaagccccgcctgctgcgaccacgagatcatcatgatgaaccacgtgtacaaggagagattccccaaggccaccgcccagatggaggagagactgaaggagatcatcaccagctacagccccgacaacgtgctgcccctggccgacggcgtgctgagcttcacccaccaccagatcatcgagctggccagagactgcctggacaagagccaccagggcctgatcaccagcagatacttcctggagctgcagcacaagctggacaagctgctgcaggaggcccacgacagaagcgagagcggcgagctggccttcatcaagcagctggtgagaaagatcctgatcgtgatcgccagacccgccagactgctggagtgcctggagttcgaccccgaggagttctactacctgctggaggccgccgagggccacgccaaggagggccagggcatcaagaccgacatccccagatacatcatcagccagctgggcctgaacaaggaccccctggaggagatggcccacctgggcaactacgacagcggcaccgccgagacccccgagaccgacgagagcgtgagcagcagcaacgccagcctgaagctgagaagaaagcccagagagagcgacttcgagaccatcaagctgatcagcaacggcgcctacggcgccgtgtacttcgtgagacacaaggagagcagacagagattcgccatgaagaagatcaacaagcagaacctgatcctgagaaaccagatccagcaggccttcgtggagagagacatcctgaccttcgccgagaaccccttcgtggtgagcatgtactgcagcttcgagaccagaagacacctgtgcatggtgatggagtacgtggagggcggcgactgcgccaccctgatgaagaacatgggccccctgcccgtggacatggccagaatgtacttcgccgagaccgtgctggccctggagtacctgcacaactacggcatcgtgcacagagacctgaagcccgacaacctgctggtgaccagcatgggccacatcaagctgaccgacttcggcctgagcaaggtgggcctgatgagcatgaccaccaacctgtacgagggccacatcgagaaggacgccagagagttcctggacaagcaggtgtgcggcacccccgagtacatcgcccccgaggtgatcctgagacagggctacggcaagcccgtggactggtgggccatgggcatcatcctgtacgagttcctggtgggctgcgtgcccttcttcggcgacacccccgaggagctgttcggccaggtgatcagcgacgagatcaactggcccgagaaggacgaggcccccccccccgacgcccaggacctgatcaccctgctgctgagacagaaccccctggagagactgggcaccggcggcgcctacgaggtgaagcagcacagattcttcagaagcctggactggaacagcctgctgagacagaaggccgagttcatcccccagctggagagcgaggacgacaccagctacttcgacaccagaagcgagaagtaccaccacatggagaccgaggaggaggacgacaccaacgacgaggacttcaacgtggagatcagacagttcagcagctgcagccacagattcagcaaggtgttcagcagcatcgacagaatcacccagaacagcgccgaggagaaggaggacagcgtggacaagaccaagagcaccaccctgcccagcaccgagaccctgagctggagcagcgagtacagcgagatgcagcagctgagcaccagcaacagcagcgacaccgagagcaacagacacaagctgagcagcggcctgctgcccaagctggccatcagcaccgagggcgagcaggacgaggccgccagctgccccggcgacccccacgaggagcccggcaagcccgccctgccccccgaggagtgcgcccaggaggagcccgaggtgaccacccccgccagcaccatcagcagcagcaccctgagcgacatgttcgccgtgagccccctgggcagccccatgagcccccacagcctgagcagcgaccccagcagcagcagagacagcagccccagcagagacagcagcgccgccagcgccagcccccaccagcccatcgtgatccacagcagcggcaagaactacggcttcaccatcagagccatcagagtgtacgtgggcgacagcgacatctacaccgtgcaccacatcgtgtggaacgtggaggagggcagccccgcctgccaggccggcctgaaggccggcgacctgatcacccacatcaacggcgagcccgtgcacggcctggtgcacaccgaggtgatcgagctgctgctgaagagcggcaacaaggtgagcatcaccaccacccccttcgagaacaccagcatcaagaccggccccgccagaagaaacagctacaagagcagaatggtgagaagaagcaagaagagctag

SEQ ID NO: 109195 - DNA, 2982 bp, Artificial Sequence
  derived and/or modified sequence
atggatatgtcagatcctaatttttggaccgtgcttagtaattttactctgccgcatctgcggtcagggaaccggttacgtcggacgcagagctgcaggacctcaaaccggaagtcgcttatcggaaacggccagagtccagccctccctcgaccccacagccctctgagtgcccacgctggtaatagtcctcaggatagtccaagaaacttcagcccaagtgccagcgcccactttagtttcgcacgacgcaccgacgggagacggtggtcactcgcctctctgccctccagtggctacggtactaatacacctagttctacggtctcttctagttgttcatctcaggaaaagttacaccaactgccatatcagcctacaccagacgagctccactttctcagtaaacacttctgcacaacagagagtatcgctacagaaaaccggtgccggaatacgcctatgcgtcccagatcaaggagtctgtccccggggcgatctccggcctgttgcgatcacgagataatcatgatgaaccacgtgtataaagaaaggtttccaaaggccacagctcaaatggaggaacgcttgaaagaaatcataacgtcatacagcccggataatgtgcttccgttagccgacggagtgctatcatttactcatcaccagatcatagaacttgcacgggactgcctggacaagtcccaccagggccttattacaagccgttacttcttagagctgcaacacaaattggataagttactgcaggaggctcacgacaggtccgagagcggagagctggcctttatcaaacagctggttcgcaaaattcttattgtgatcgctcggcccgccaggctactggaatgtctggagttcgatcccgaggagttctactacctcctggaagccgccgagggtcacgctaaggagggccaaggcattaagacagatataccgagatatatcatttcccagctcggcctgaataaggatccactggaggaaatggctcacctcggcaattatgatagcggtacagcagaaactccagagactgacgaatctgtatcctcctctaacgcgagtctgaaactccggcgcaaaccacgcgaaagcgactttgagacaataaagctgatttccaatggagcgtatggagctgtttatttcgtgcgacacaaagagtctcgacagagattcgcgatgaaaaaaataaacaagcaaaatctcatcctaagaaaccaaatccagcaagccttcgttgagcgcgacattctgacgttcgccgaaaatcccttcgtggtgtccatgtactgttcatttgagacgaggagacatctgtgtatggtgatggagtacgtggaaggcggggactgtgccacactgatgaagaatatgggaccacttcctgtggacatggcacgtatgtatttcgcagagacagttctggctctggaatacctccataattacggaattgtacaccgcgatttgaagcctgataatctcttggtcacctcaatggggcatattaagctgactgacttcggtctctcaaaggtgggcttgatgagtatgaccactaacctctatgagggtcacatcgagaaagatgccagagaattcctcgataaacaggtgtgcgggacaccagaatacatagcacccgaggtaatactgcggcaggggtatggaaaacccgtggactggtgggctatgggtattatcctttatgaattcctggtgggctgcgtgccattctttggcgatacacccgaagagctcttcggccaggtgatttctgatgagatcaactggcctgagaaggacgaggccccccctcctgacgctcaggacttgattactctgctcctaaggcaaaatcccctggagagactggggactggaggggcctatgaggtgaagcagcacaggtttttcaggtccctggactggaattcattactgagacagaaggccgagttcatcccccaacttgagtctgaggatgatactagctacttcgatactcggtccgagaagtaccatcacatggagaccgaggaggaagacgacaccaatgacgaggacttcaacgtcgagatacgccagttctcaagctgtagccaccggttcagcaaagtgttttcctctatcgacagaataacccagaatagtgccgaggagaaggaggacagcgtggataaaactaaatccacgaccctgcccagtacggaaactttgagctggtcctctgagtatagtgagatgcaacaactctccacttctaactcatccgataccgagtccaacagacacaagcttagttccgggctattgcccaaactcgcaatcagcactgagggcgagcaggatgaagcagcatcttgccctggggatcctcacgaagagcccggcaaaccagccctcccccccgaggaatgtgctcaggaagaacccgaggttacgacccccgcgagcactatctccagtagcacactgagtgacatgtttgcagtgtcgcccttgggtagccccatgtcaccccacagcctgtcgtccgatccatcgagttcccgggattctagccccagtagagactccagcgccgcttccgccagtcctcaccaaccaattgtgatccactcctcaggcaagaattacggatttactataagggctattcgagtgtatgtaggagactcagacatttacacagtacatcacatcgtttggaatgtggaggagggttcccccgcatgccaggccggccttaaggcaggggacttgatcacccatatcaacggagaacccgttcacggcctggtccacacggaagttattgagctgctcctgaaaagtggcaataaggtgagcattaccacaaccccctttgaaaacacttccatcaagaccggccccgcccggaggaactcctataagagtaggatggtccggcggtctaagaagagctag

SEQ ID NO: 109196 - DNA, 2982 bp, Artificial Sequence
  derived and/or modified sequence
atggacatgtctgaccccaacttctggacagtgctgagcaacttcaccctgccccacctgcggagcggcaaccggctgcggaggacccagagctgcaggaccagcaacaggaagagcctgattggaaatggccagagccctgccctgccccggccccacagccccctgagcgcccacgccggcaacagcccccaggacagccccaggaacttcagccccagcgccagcgcccacttctcctttgccaggagaacagatggccgccgctggagcctggccagcctgcccagcagcggctacggcaccaacacccccagcagcacagtgagcagcagctgcagcagccaggagaagctgcaccagctgccctaccagcccaccccagatgagctgcacttcctgagcaagcacttctgcaccacagagagcatcgccacagaaaatcgctgcaggaacacccccatgaggcccaggagccgcagcctgagccctggccgcagccctgcctgctgtgaccacgagatcatcatgatgaaccacgtgtacaaggagcgcttccccaaggccacagcccagatggaggagcggctgaaggagatcatcaccagctacagcccagacaacgtgctgcccctggctgatggagtgctgtccttcacccaccaccagatcatcgagctggcccgggactgcctggacaagagccaccagggcctcatcaccagccgctacttcctggagctgcagcacaagctggacaagctgctgcaggaggcccatgacagaagtgaaagtggagagctggccttcatcaagcagctggtgaggaagatcctgattgtcatcgcccggcctgcccggctgctggagtgcctggagtttgatcctgaggagttctactacctgctggaggccgctgagggccacgccaaggagggccagggcatcaagacagacatcccccgctacatcatcagccagctgggcctgaacaaggaccccctggaggagatggcccacctgggcaactatgacagcggcacagctgagaccccagagacagatgaatctgtgagcagcagcaatgccagcctgaagctgcggaggaagccccgggagagtgactttgagaccatcaagctgatcagcaatggagcctatggagctgtgtactttgtgcgccacaaggagagccggcagagatttgccatgaagaagatcaacaagcagaacctgatcctgaggaaccagatccagcaggcctttgtggagcgggacatcctgacctttgctgagaacccctttgtggtgtccatgtactgcagctttgagacccggcggcacctgtgcatggtgatggagtatgtggagggcggggactgtgccaccctgatgaagaacatgggccccctgcctgtggacatggccaggatgtactttgctgagaccgtgctggccctggagtacctgcacaactatggaattgtgcaccgggacctgaagccagacaacctgctggtgacctccatgggccacatcaagctgacagactttggcctgagcaaggtgggcctgatgtccatgaccaccaacctgtatgagggccacatcgagaaggatgcccgggagttcctggacaagcaggtgtgtggcaccccagagtacatcgcccctgaggtgatcctgcggcagggctacggcaagcctgtggactggtgggccatgggcatcatcctgtatgagttcctggtgggctgtgtgcccttcttcggggacaccccagaggagctgtttggccaggtgatcagtgatgagatcaactggccagagaaggatgaggcccctcctccagatgcccaggacctgatcaccctgctgctgcggcagaaccccctggagcggctgggcactggaggagcctatgaggtgaagcagcaccgcttcttccgcagcctggactggaacagcctgctgcggcagaaggccgagttcatcccccagctggagagtgaagatgacaccagctactttgacaccaggtctgagaagtaccaccacatggagacagaggaggaggatgacaccaatgatgaggacttcaacgtggagatccggcagttcagcagctgcagccaccgcttcagcaaggtgttcagcagcattgaccgcatcacccagaacagcgctgaggagaaggaggacagcgtggacaagaccaagagcaccaccctgcccagcacagagaccctgtcctggagcagcgagtacagcgagatgcagcagctgagcaccagcaacagcagtgacacagagagcaacagacacaagctgagcagcggcctgctgcccaagctggccatcagcacagaaggagagcaggatgaggccgccagctgccctggggacccccatgaggagcccgggaagccagccctgcccccagaggagtgtgcccaggaggagcctgaggtgaccaccccagccagcaccatcagcagcagcaccctgagtgacatgtttgctgtgagccccctgggcagccccatgagcccccacagcctgagcagtgaccccagcagcagccgggacagcagccccagccgggacagcagcgctgccagcgccagcccccaccagcccatcgtcatccacagcagcggcaagaactacggcttcaccatccgggccatccgggtgtatgtgggggacagcgacatctacacagtgcaccacatcgtgtggaatgtggaggagggcagccctgcctgccaggccggcctgaaggccggggacctgatcacccacatcaatggagagcctgtgcacggcctggtgcacacagaggtgattgagctgctgctgaagagcggcaacaaggtgtccatcaccaccaccccatttgagaacaccagcatcaagacaggccctgccaggagaaattcctacaagagcaggatggtgcggcgcagcaagaagagctag

SEQ ID NO: 109197 - DNA, 2982 bp, Artificial Sequence
  derived and/or modified sequence
atggacatgagcgaccccaacttctggaccgtgctgagcaacttcactcttccacacctgaggtccggaaacaggctcagaaggacgcagtcgtgtcgcacatcaaatcgcaagtctcttatcgggaacggccagtcaccagctttaccccggcctcattcacctctttccgcccatgctggcaatagccctcaggattctcccaggaattttagtccatccgccagcgcacacttctcattcgctaggcgcacagacggtcggaggtggtctctcgcctccttaccgtcaagtggctatgggacgaatactccctcttccactgttagctccagctgcagctctcaggagaagctccatcagctgccgtaccagcctacccctgatgaactgcatttcctatccaagcacttctgcaccacagagtctatcgctactgaaaataggtgcaggaatactcccatgcggcctcgctctagaagtctgtccccagggcgaagcccggcgtgttgcgatcatgagattatcatgatgaatcatgtctacaaggagcggttcccgaaggcgactgctcagatggaggagcgactgaaggagatcattacttcatactcaccagacaatgtgctccccctcgccgacggagtgctgtctttcacacaccatcagattatagagttggctagggactgcctagataaatcacaccagggacttataacaagtagatacttcctcgaactccagcataagctggacaaactgttacaggaagctcacgaccggtcagagagtggcgagttagcctttattaaacagctggtacgcaaaatcctgatcgtcatcgcaagaccggcccggctgctagagtgtttggagttcgaccctgaggagttttactatctgctcgaagctgcagaaggccatgccaaagagggccagggcataaaaacagacatcccaaggtatataatttcccagctaggcctcaacaaggacccgctggaagagatggcgcatctgggtaactatgatagtggcacggcagaaacgccggagacggacgaatccgtttcatcctcaaatgcaagcctcaagctgcggagaaagccgcgcgagtccgactttgaaacaattaagcttatctctaatggcgcatacggcgctgtgtacttcgtgcgccacaaagagagtcgccaacggtttgctatgaaaaagattaacaagcaaaacttaattttaaggaatcaaattcaacaggctttcgttgagcgcgatattcttacgttcgctgagaacccgttcgtggtctcaatgtactgtagctttgagacacggcggcacttgtgcatggtcatggaatatgtggaaggaggcgactgcgccacccttatgaagaacatgggacctctgcccgtcgacatggcaagaatgtacttcgcagaaacggtactggccctggagtatcttcacaactatggaatcgttcatcgggacttaaagcccgataacctgctggtaacgtcaatggggcatatcaagttgactgactttggcctgtctaaagttgggttgatgtcaatgactacaaacctttacgagggccacattgaaaaagacgctcgtgaattcttggataagcaagtctgcggcaccccagagtacatcgcccctgaagtgattttaaggcaggggtacgggaaaccagtcgattggtgggcaatggggataatcctctatgagtttctggttggttgcgttcccttctttggggatacacccgaggagctgtttggacaggtgatttccgacgaaattaactggcctgagaaagatgaggccccaccaccggatgctcaggatctgattactcttttactgcgtcaaaaccctttagagagactgggcacggggggcgcgtatgaagtaaaacaacataggttcttcaggtcgctcgactggaactctcttctgaggcaaaaggcagagttcattccccagctggagtcagaggatgatacttcctattttgacacacgttccgaaaagtatcatcacatggaaaccgaggaagaggacgatacaaacgatgaagactttaatgtagaaatacgacagttctctagctgttctcatcggttttcgaaggtctttagtagcatcgataggatcacccagaactccgctgaggagaaggaggactccgtggacaaaaccaagtccacaaccctgccgagcaccgagaccttgagctggagtagtgagtacagtgagatgcagcagttgtctacttccaactcttccgacacggagagtaaccgacacaagctgagctcaggactgctaccgaaactggctattagtaccgagggagagcaagatgaagccgctagctgtcctggcgacccgcatgaggaacccgggaaacctgctcttcctccagaagagtgcgcccaggaggagcctgaggttactacaccggccagtactatcagctcctctacactcagcgatatgtttgcagttagcccattgggatcccctatgtccccccactccctgagttctgacccttcttccagccgggattccagccctagcagggactccagtgcagcttccgcctcccctcatcaacccatcgtcatacactcctccggcaagaattacggtttcaccatccgagctatccgcgtgtacgtgggtgatagcgatatatacactgtccatcatattgtctggaatgtggaagagggctctcctgcttgtcaggctgggctgaaggccggggacctgattactcatattaatggcgaacctgtgcacggacttgttcacactgaggtcattgagctacttctcaagagtggcaataaggtgtccattactacgacccccttcgagaacacctccattaagacgggacccgcacgacgcaacagctacaagtcccgtatggtaagacggagcaaaaagtcgtag

SEQ ID NO: 109198 - DNA, 9633 bp, Artificial Sequence
  derived and/or modified sequence
atggatatgtctgaccccaatttttggactgtgctctcaaactttactttgcctcatttgaggagtgggaacaggcttcggcgaacacaaagttgccgaacaagcaaccggaaaagcttaataggcaatgggcagtcaccagcattgcctcgaccacactcacctctctctgctcatgcaggaaatagccctcaagatagtccaagaaatttctcccccagtgcctcagcccatttttcatttgcacggaggactgatggacgccgctggtcgttggcttctctcccttcctctggctatgggacaaacacacccagctctacggtctcttcatcctgttcctcccaggagaagttgcatcagttaccataccaaccaacaccagacgagttacacttcttatcaaaacatttctgtaccaccgaaagcatcgccactgagaacagatgcaggaacacgccgatgcgcccccgttcccgaagtctgagccctggacgttctcccgcctgctgtgaccatgaaataattatgatgaaccatgtctacaaagaaaggttcccaaaggctacagctcagatggaagaacgtctaaaggaaattatcaccagctactctcctgacaacgttctacccttagcagatggagtgcttagtttcactcaccaccagattattgaactggctcgagattgcttggataaatcccaccagggcctcatcacctcacgatacttccttgaattacagcacaaattagataagttgctacaggaggctcatgatcgttcagaaagtggagaattggcatttattaaacaactagttcgaaagatcctaattgttattgcccgccctgctcggttattagagtgcctggaatttgatccggaagaattttactacctattggaagcagcagaaggccatgccaaagaaggacagggtattaaaaccgacattcccaggtacatcattagccaactgggactcaataaggatcccttggaagaaatggctcatttgggaaactacgatagtgggacagcagaaacaccagaaacagatgaatcagtgagtagctctaatgcctccctgaaacttcgaaggaaacctcgggaaagtgattttgaaacgattaaattgattagcaatggagcctatggggcagtctactttgttcggcataaagaatcccggcagaggtttgccatgaagaagattaataaacagaacctcatccttcgaaaccagatccagcaggcctttgtggagcgggatatcctgacttttgcagaaaacccctttgttgtcagcatgtattgctcctttgaaacaaggcgccacttgtgcatggtcatggaatatgtggaagggggagactgtgctactttaatgaaaaacatgggtcctctccctgttgatatggccagaatgtactttgctgagacggtcttggccttggaatatttacataattatggaattgtacacagggatttgaaaccagacaacttgttggttacctccatggggcacataaagctgacagattttggattatctaaggtgggactaatgagcatgactaccaacctttacgagggtcatattgagaaggatgctagagagttcctggataaacaggtctgtggcacacctgaatacattgcaccagaagtgattctgaggcagggttatggaaagccggtggactggtgggccatggggattatcctctatgaatttctggttggatgcgtgccattctttggggatactccagaggagctatttggacaagtcatcagtgatgagatcaactggcctgagaaggatgaggcacccccacctgatgcccaggatctgattaccttactcctcaggcagaatcccctggagaggctgggaacaggtggtgcatatgaagtcaaacagcatcgattcttccgttctttagactggaacagtttgctgagacagaaggcagaatttattccccaactggaatctgaggatgacacaagttattttgatactcggtctgagaagtatcatcatatggaaacggaggaagaagatgacacaaatgatgaagactttaatgtggaaataaggcagttttcttcatgttcacacaggttttcaaaagttttcagcagtatagatcgaatcactcagaattcagcagaagagaaggaagactctgtggacaaaaccaaaagcaccaccttgccatccacagaaacactgagctggagttcagaatattctgaaatgcaacagctatcaacatccaactcttcagatactgaaagcaacagacataaactcagttctggcctacttcccaaactggctatttcaacagagggagagcaagatgaagctgcctcctgccctggagacccccatgaggagccaggaaagccagcccttcctcctgaagagtgtgcccaggaggagcctgaggtcaccaccccagccagcaccatcagcagctccaccctgtcagatatgtttgctgtttcccctctgggaagtccaatgtctccccattccctgtcctcggacccttcttcttcacgagattcctctcccagccgagattcctcagcagcttctgccagtccacatcagccgattgtgatccacagttcggggaagaactacggctttaccatccgagccatccgggtgtatgtgggagacagtgacatctatacagtgcaccatatcgtctggaatgtagaagaaggaagtccggcatgccaggcaggactgaaggctggagatcttatcactcacatcaatggagaaccagtgcatggacttgtccacacagaagttatagaactcctactgaagagtgggaataaggtgtcaatcactactaccccatttgaaaacacatcaatcaaaactggaccagccaggagaaacagctataagagccggatggtgaggcggagcaagaaatccaagaagaaagaaagtctcgaaaggaggagatctcttttcaaaaagctagccaagcagccttctcctttactccacaccagccgaagtttctcctgcttgaacagatccctgtcatcgggtgagagcctcccaggttcccccactcatagcttgtctccccggtctccaacaccaagctaccgctccacccctgacttcccatctggtactaattcctcccagagcagctcccctagttctagtgcccccaattccccagcagggtccgggcacatccggcccagcactctccacggtcttgcacccaaactcggcgggcagcggtaccggtccggaaggcgaaagtccgccggcaacatcccactgtccccgctggcccggacgccctctccaaccccgcaacccacctccccgcagcggtcaccatcccctcttctgggacactcactgggcaattccaagatcgcgcaagcctttcccagcaagatgcactccccgcccaccatcgtcagacacatcgtgaggcccaagagtgcggagccccccaggtccccgctgctcaagcgcgtgcagtccgaggagaagctgtcgccctcttacggcagtgacaagaagcacctgtgctcccgcaagcacagcctggaggtgacccaagaggaggtgcagcgggagcagtcccagcgggaggcgccgctgcagagcctggatgagaacgtgtgcgacgtgccgccgctcagccgcgcccggccagtggagcaaggctgcctgaaacgcccagtctcccggaaggtgggccgccaggagtctgtggacgacctggaccgcgacaagctgaaggccaaggtggtggtgaagaaagcagacggcttcccagagaaacaggaatcccaccagaaatcccatggacccgggagtgatttggaaaactttgctctgtttaagctggaagagagagagaagaaagtctatccgaaggctgtggaaaggtcaagtacttttgaaaacaaagcgtctatgcaggaggcgccaccgctgggcagcctgctgaaggatgctcttcacaagcaggccagcgtgcgcgccagcgagggtgcgatgtcggatggccgggtgcctgcggagcaccgccagggtggcggggacttcagacgggcccccgctcctggcaccctccaggatggtctctgccactccctcgacaggggcatctctgggaagggggaaggcacggagaagtcctcccaggccaaggagcttctccgatgtgaaaagttagacagcaagctggccaacatcgattacctccgaaagaaaatgtcacttgaggacaaagaggacaacctctgccctgtgctgaagcccaagatgacagctggctcccacgaatgcctgccagggaacccagtccgacccacgggtgggcagcaggagcccccgccggcttctgagagccgagcttttgtcagcagcacccatgcagctcagatgagtgccgtctcttttgttcccctcaaggccttaacaggccgggtggacagtggaacggagaagcctggcttggttgctcctgagtcccctgttaggaagagcccctccgagtataagctggaaggtaggtctgtctcatgcctgaagccgatcgagggcactctggacattgctctcctgtccggacctcaggcctccaagacagaactgccttccccagagtctgcacagagccccagcccaagtggtgacgtgagggcctctgtgccaccagttctccccagcagcagtgggaaaaagaacgataccaccagtgcaagagagctttctccttccagcttaaagatgaataaatcctacctgctggagccttggttcctgccccccagccgaggtctccagaattcaccagcagtttccctgcctgacccagagttcaagagggacaggaaaggtccccatcctactgccaggagccctggaacagtcatggaaagcaatccccaacagagagagggcagctcccctaaacaccaagaccacaccactgaccccaagcttctgacctgcctggggcagaacctccacagccctgacctggccaggccacgctgcccgctcccacctgaagcttccccctcaagggagaagccaggcctgagggaatcgtctgaaagaggccctcccacagccagaagcgagcgctctgctgcgagggctgacacatgcagagagccctccatggaactgtgctttccagaaactgcgaaaaccagtgacaactccaaaaatctcctctctgtgggaaggacccacccagatttctatacacagacccaggccatggagaaagcatgggcgccgggtgggaaaacgaaccacaaagatggcccaggtgaggcgaggcccccgcccagagacaactcctctctgcactcagctggaattccctgtgagaaggagctgggcaaggtgaggcgtggcgtggaacccaagcccgaagcgcttcttgccaggcggtctctgcagccacctggaattgagagtgagaagagtgaaaagctctccagtttcccatctttgcagaaagatggtgccaaggaacctgaaaggaaggagcagcctctacaaaggcatcccagcagcatccctccgccccctctgacggccaaagacctgtccagcccggctgccaggcagcattgcagttccccaagccacgcttctggcagagagccgggggccaagcccagcactgcagagcccagctcgagcccccaggaccctcccaagcctgttgctgcgcacagtgaaagcagcagccacaagccccggcctggccctgacccgggccctccaaagactaagcaccccgaccggtccctctcctctcagaaaccaagtgtcggggccacaaagggcaaagagcctgccactcagtccctcggtggctctagcagagaggggaagggccacagtaagagtgggccggatgtgtttcctgctaccccaggctcccagaacaaagccagcgatgggattggccagggagaaggtgggccctctgtcccactgcacactgacagggctcctctagacgccaagccacaacccaccagtggtgggcggcccctggaggtgctggagaagcctgtgcatttgccaaggccgggacacccagggcctagtgagccagcggaccagaaactgtccgctgttggtgaaaagcaaaccctgtctccaaagcaccccaaaccatccactgtgaaagattgccccaccctgtgcaaacagacagacaacagacagacagacaaaagcccgagtcagccggccgccaacaccgacagaagggcggaagggaagaaatgcactgaagcactttatgctccagcagagggcgacaagctcgaggccggcctttcctttgtgcatagcgagaaccggttgaaaggcgcggagcggccagccgcgggggtggggaagggcttccctgaggccagagggaaagggcccggtccccagaagccaccgacggaggcagacaagcccaatggcatgaaacggtccccctcagccactgggcagagttctttccgatccacggccctcccggaaaagtctctgagctgctcctccagcttccctgaaaccagggccggagttagagaggcctctgcagccagcagcgacacctcttctgccaaggccgccgggggcatgctggagcttccagcccccagcaacagggaccataggaaggctcagcctgccggggagggccgaacccacatgacaaagagtgactccctgccctccttccgggtctccaccctgcctctggagtcacaccaccccgacccaaacaccatgggcggggccagccaccgggacagggctctctcggtgactgccaccgtaggggaaaccaaagggaaggaccctgccccagcccagcctcccccagctaggaaacagaacgtgggcagagacgtgaccaagccatccccagccccaaacactgaccgccccatctctctttctaatgagaaggactttgtggtacggcagaggcgggggaaagagagtttgcgtagcagccctcacaaaaaggccttgtaacggggagggcccaggggcaggactgtggagacccgtcctgaacgggcgactgtgtcttgactacctttcaaaaccagcactgtgtgggaatgtccgccaggcagagctcggagcctcattgagacaggggagagagaaagacaaagaggggaccttcttccagatgccttcccagttgtaaccggtaaaactgttaccagatagtgtttgtacaaaaaaaaaaaaaaaaaaaaaaaaaaaaattacctttacagttgagggttgttgaggaaaatgattttctttgtaaatatatagcatcgtgtttggtttgggatgtagagtctatacctggctgctgattgcgtcgtttactacagctttttttaaataagatttttgctttaccatttatcataatgtagtaatgaagcaaaatggtcaaaactgggtgtgtgtgaacagagatacacccatattcgtgtatatacacatccacctacatgttttggtctgtggtttaagagactatttcaaggttccatttttataagctaaaacattctaagttaagatggaagaaagccctaaacacagtagattctgagtttttatgtgtattttaaccagagtttctgatagtactgtatctggctacctatatttccagatctaaagcaagaactactctaagtactgcatttggaatcctcctccattaggaatggccaggacaagtggagctagccattttcattacacggccatcccaatggacactggatccctggtccaactgtctaaaaggccagttgttcctttctgtggatgtggatgtctggccttcacctgaggtagagcggggactataaacacacatcaactttctttctgtttgctttcttttccttcttttcaaactcttaaactcaggcctttatgctgtgagtgactagtccaagaagcacacattttgtagtagtcctgcaccagccctgctcttgaataaaaaggaaaattactggctgcacccaaatcttctagtacttgagtaataagcatcaggcattggaagaggttttaaatttgcttttttgaggaaaagaactgggggtggattttggcatcgtagcatatcgattaaagaataatcaggacatcagatacattttaatacatagctggggccttatgttgtagatgaagcttgctgtttttagcaagttcctgggtttcacattcatttctgctgcatctagtagctccacacatttcataacctgatctctttatttgtatgcaaaaaatactgtcttaatacagagcagcatttttgtaacaaagagactcgctggagctatttggtgcttgaatgtgaccatcctttttacttttgctaagccttatttaaattttgtataccgtggaatatgtagaatttgtcaaatcattttagtgctgaaggtttttgatttcttgtttttgtttctgttgttgcagtttctttggtggcttgttttgtattgtaagatggcacttgctgatataaatactaaggcactaagagaaaatacagataagtatttataagttgcttgggaaccatagcagaattttttgtttggttttgtaagagaaaaaaaattaccaataaataactgatctagcacccaaactctcttgggggatgtcttagtatcttcacgctataaaattgttcatctaagcacagcatcatcttatggccttatggattgtaaatcttctagtgaggctataaactccactctgaaaacaaaggcataacttaaccgactgctcagttgtccttcgttgtaaaatgaattggctttgggaaaaaggaaaaaaacaaacaaaaaaagaaaaagaaaaaagcctcctccttgcccctaatttttttttcccatatggttttagccattccccatcactatattgtgaagctgtaaaaatatatatatatactttacaagagtttactaatggatttcaaaactggtctcaacgtttataatacatatctgtgtttggcagttgtcataacccaatcctacattcagccatcgggacaagtctgtcggggaggtagttcatggtttacaagcctttgctttttaactgtccaatttcctttaaagcacaactagctatttgtttacaaatgatatttttatgtatattttgtatagtgtatcatcatttttgccaaatatgtttttcattataaatgagtaaagagtacttaaggttgcattcatgtattacatgtttgttgttgtaaacctctccaatcagctggtagaaattctcctcattgtgttctatttggtcagtctctgtgtgattgtaggatgtgctccttggtagtactcccagctgtagatttaccagcttaaaagtttgttaggatctgtgcaataaagtgtttgcagtcttattttctctaagaaattccttatggacgtcataattgttgtatattgaacaaaatatttatacttatgcagttgcataacattgaaataaaaatttagcatgaaaaga

SEQ ID NO: 109199 - DNA, 459 bp, Artificial Sequence
  derived and/or modified sequence
atgcccggcctggtgttcttcaagttcgccaacctgggcggcggctgggggagccgtaagatgttagaaccagggatgtgccccgccgagatgtccctgacgccctttgtgacaaggtcgctaaatcttctttgctttagcgttacccacagaggtagagggaaagacaaccctctccacttctttctgcagttactggctcccagtgccagtgcatctctggggcttgggcgtgaaactggacctctgccttctccaggactgagtcccggcttgctgagtgagacttttgtttctgagggaccactccttacccttcagatttcctggtgtgggacagaatgtcttatggatggccagggacccctcatccacttacattcacaaaacatacgtatctcattcggtgcaacacagcctcccctgctgttggtgtacgagatccgctggaaccggtag

SEQ ID NO: 109200 - DNA, 2982 bp, Artificial Sequence
  derived and/or modified sequence
atggatatgtcagatccaaatttctggacagtgctgtcaaattttacactgcctcacctccgcagcggaaaccgattgcggaggactcagtcatgtagaacaagcaatagaaagtcgttgattggtaatgggcagtctcccgctctcccacggccacactccccactgagtgcccacgctggtaacagccctcaggattctccaaggaatttcagcccctctgcatcagcacatttctcgtttgcgaggcgtacagacgggcgaagatggagtctggctagtctgccttcttccggttacggaacaaatacaccctcaagcacggtatcaagttcatgttcttctcaggagaagttacaccagctcccataccagcccacccccgatgaacttcacttcctttctaagcatttctgcacaacggaatctatcgcgaccgaaaacagatgtaggaacacgccaatgcgcccaaggtctagaagcctgtctcccggacgatcccctgcctgttgcgatcacgaaattatcatgatgaatcatgtgtacaaagaacgattccccaaggctacagcccagatggaagaaagactgaaggagatcatcacatcttacagccccgataatgtgcttccgctggctgatggcgtcctatcctttacccatcaccagataatcgagctagcacgagattgtctggacaagagtcatcagggcttaatcacatcccggtatttcctggaactgcagcataaactcgataaactgctccaggaggcgcacgacaggtctgaaagtggcgaactggcctttattaagcagttagttaggaagattctgattgtgatcgctcgaccagctaggttgttggagtgtctggagttcgaccctgaggagttttactatcttctggaagcagccgagggtcatgcaaaggaaggtcagggcattaaaacagacatccccaggtatatcatcagccagctcggcctgaacaaggatccgctggaagaaatggcccatctgggaaactatgacagcgggactgcagaaacacccgagactgacgagtctgtgtccagctctaatgccagtcttaagcttagacgcaagccacgtgagtcggattttgaaacgattaagctcataagcaacggcgcttacggggcagtgtactttgtccgacataaggaatcaagacagcggtttgctatgaagaagattaataaacaaaatctcattctgagaaaccagatccaacaggcgtttgttgaaagggatatactgacatttgccgaaaatccctttgttgtgtccatgtactgctcatttgagacgagaagacatctgtgtatggtgatggaatatgtggaggggggtgattgtgcaactctgatgaaaaacatgggacctctgcccgtggatatggcgaggatgtactttgccgaaactgttctcgcgctggaatatctccacaattacggtatcgtgcatcgagacctgaaacctgacaatctgctggtgacgagcatgggtcacattaagctgaccgattttggtcttagtaaagtggggctcatgtctatgaccacaaacctgtacgagggtcacatagaaaaggacgcccgagaattcctggataaacaggtgtgtgggactcctgagtacatcgctcccgaggtgatcctacgacagggctacggcaaacccgtggattggtgggcaatgggaataatactgtacgagttcttggtagggtgcgtccccttcttcggagacacacccgaggagcttttcggacaggtcatatctgacgaaatcaattggccagagaaggacgaagctccccctccagacgcccaggatttgataacacttctgttacggcagaaccccctggagcgcctgggtactgggggagcgtatgaggtgaagcagcaccgcttctttcggagcctggactggaactcccttctgcgccagaaagccgagttcattccacagctggagagcgaggacgacactagctacttcgacaccagaagtgagaagtatcatcacatggagacagaagaagaggacgacacaaatgacgaggatttcaacgtcgagattagacaattttcctcctgctcacaccgttttagcaaagtttttagttccatcgaccggattacccaaaactcagcggaggaaaaggaagactccgtggataagaccaagtcaactaccctgccaagtacagagactttgagttggagtagtgagtacagtgagatgcagcagctgtctaccagcaatagttccgatacggagagcaacaggcacaagctctcctccggcctgttacccaagctagccatcagcactgagggcgagcaggacgaggcggctagctgtcctggagacccgcacgaggagcccggaaagccggctttaccgcctgaggagtgcgctcaggaagagccagaagtcactaccccggcttcgaccataagtagcagtacactgagcgacatgttcgcagtatctcccttaggatcccccatgtctcctcactctctctccagcgaccccagctcaagcagggactcctcacctagtcgggacagctctgccgctagcgctagccctcatcaaccgatagtgatacattcttccgggaaaaactacggcttcaccatccgggctatccgagtgtacgttggagattctgatatttacacagtgcatcatatcgtgtggaacgtggaggaaggcagccctgcttgccaggctggactaaaggccggtgatctcatcactcatatcaacggggagccagtgcacgggctcgtgcacaccgaggtgattgaattgctgctgaagtctggtaataaagtgagtatcactactacaccgtttgagaacacgtcaattaagactggccctgccagacggaacagctacaagagtaggatggtgaggcgatctaaaaagtcctag

SEQ ID NO: 109201 - protein, 758 aa, Artificial Sequence
  derived and/or modified sequence
MTTAKEPSASGKSVQQQEQELVGSNPPQRNWKGIAIALLVILVICSLIVTSVILLTPAEDNSLSQKKKVTVEDLFSEDFKIHDPEAKWISDTEFIYREQKGTVRLWNVETNTSTVLIEGKKIESLRAIRYEISPDREYALFSYNVEPIFIFENNIYYCAHVGKQAIRVVSTGKEGVIYNGLSDWLYEEEILKTHIAHWWSPDGTRLAYAAINDSRVPIMELPTYTGSIYPTVKPYHYPKAGSENPSISLHVIGLNGPTHDLEMMPPDDPRMREYYITMVKWATSTKVAVTWLNRAQNVSILTLCDATTGVCTKKHEDESEAWLHRQNEEPVFSKDGRKFFFIRAIPQGGRGKFYHITVSSSQPNSSNDNIQSITSGDWDVTKILAYDEKGNKIYFLSTEDLPRRRQLYSANTVGNFNRQCLSCDLVENCTYFSASFSHSMDFFLLKCEGPGVPMVTVHNTTDKKKMFDLETNEHVKKAINDRQMPKVEYRDIEIDDYNLPMQILKPATFTDTTHYPLLLVVDGTPGSQSVAEKFEVSWETVMVSSHGAVVVKCDGRGSGFQGTKLLHEVRRRLGLLEEKDQMEAVRTMLKEQYIDRTRVAVFGKDYGGYLSTYILPAKGENQGQTFTCGSALSPITDFKLYASAFSERYLGLHGLDNRAYEMTKVAHRVSALEEQQFLIIHPTADEKIHFQHTAELITQLIRGKANYSLQIYPDESHYFTSSSLKQHLYRSIINFFVECFRIQDKLLTVTAKEDEEED

SEQ ID NO: 109202 - DNA, 2277 bp, Artificial Sequence
  derived and/or modified sequence
atgaccaccgctaaggagccaagcgcgtccggtaaaagcgtgcagcagcaggaacaggaactagtaggtagcaacccgccacagcgcaactggaagggaattgctattgccttgctggtgattcttgtgatatgttcgttgatcgtgaccagcgtgattctcctcactcctgctgaggacaattcactgagtcagaagaagaaggtgacagtggaggatcttttcagcgaggattttaaaatccacgaccccgaggctaagtggatctccgataccgagtttatctaccgcgagcagaagggaacagttaggttgtggaacgtcgaaacaaacacttctaccgtccttattgaggggaagaaaatagaaagtctgcgagctatcagatacgagatatcaccagaccgggagtatgctcttttttcctacaacgtcgagccaatatttattttcgagaacaatatttactactgcgcccatgtgggtaagcaggccatacgcgtagtgtcaacggggaaagagggggtaatttacaacggcctttcggactggctctacgaggaagagatcttaaaaacacacatagcacactggtggtctcccgatggcacccgattggcctatgccgccatcaatgacagtcgggtccctatcatggagctccccacgtacacagggtcaatttatccaaccgtgaagccatatcactaccctaaggcagggtcagagaatccctcaatttccctgcacgtcatcggcctgaatggtcctacacacgacctcgaaatgatgcctccggacgacccgagaatgcgcgagtattatataacaatggtgaaatgggccaccagcactaaagtggccgtaacctggctcaatcgggcccagaacgtgtctattctgacactgtgcgacgccacgaccggggtttgcacaaaaaagcacgaagacgagtccgaagcgtggctgcacaggcagaatgaagaaccagtgttctctaaggatggccggaagtttttcttcatccgcgccattccccaaggcgggcgtggaaaattctatcacatcaccgtgtcctcctctcagcccaacagcagcaatgacaatatccagtccataacaagtggtgactgggatgtcacaaagatactggcctacgatgaaaaaggcaataagatatacttcttatccacagaagacttacctaggcgccgtcagctctacagcgctaacaccgtcggcaatttcaatcggcagtgtttgtcttgcgatcttgtggagaactgcacttacttcagcgcgagttttagtcacagtatggatttttttctgctgaaatgcgaggggcctggagtacccatggttactgtgcataacaccactgataaaaagaagatgtttgatcttgaaaccaatgaacacgtcaaaaaagccattaacgaccgccagatgcccaaagtggaatatagggacatcgaaattgacgattacaacctgcctatgcaaatactcaagcctgctacattcacagacacaacccactacccactcctcttggtggtggacgggacacctgggtcacagtctgttgctgagaagtttgaggtcagttgggaaactgtaatggtgtcctcccatggagccgtggtggtgaagtgcgatggcagaggcagtgggttccaggggacaaaattgctgcacgaagtccggaggagacttggtttgctggaagaaaaggaccaaatggaagcagtgaggactatgttgaaagagcaatacatagaccgtaccagagtcgcagtgttcggcaaggattatggaggatatctctccacctacatactcccagccaaaggagagaaccaaggacagacattcacttgtggatccgccctgtcccccatcacagattttaaattatacgcctctgctttctctgagagataccttggactacatggactggacaatcgggcgtacgaaatgaccaaagtggcccacagggtgtccgccctggaggaacaacagtttctcataattcacccaactgctgatgaaaagattcactttcaacataccgcagagctgatcacacagctcattaggggcaaggccaattattcactgcagatctatcccgacgaatcccactactttacaagttcctccctaaagcagcatctctaccgaagcatcatcaacttttttgtggagtgttttcgcatccaagacaagctgctgacagtcaccgcaaaggaggatgaagaagaggactag

SEQ ID NO: 109203 - DNA, 2277 bp, Artificial Sequence
  derived and/or modified sequence
atgaccacagccaaggagcccagcgccagcggcaagtctgtgcagcagcaggagcaggagctggtgggcagcaaccccccccagaggaactggaagggcatcgccatcgccctgctggtgatcctggtgatctgcagcctcatcgtgaccagcgtcatcctgctgaccccagctgaggacaacagcctgagccagaagaagaaggtgacagtggaggacctcttcagcgaggacttcaagatccatgaccctgaggccaagtggatcagtgacacagagttcatctaccgggagcagaagggcaccgtgcggctgtggaatgtggagaccaacaccagcacagtgctgattgagggcaagaagattgagagcctgcgggccatccgctatgagatcagcccagaccgggagtatgccctcttctcctacaacgtggagcccatcttcatctttgagaacaacatctactactgtgcccacgtgggcaagcaggccatccgggtggtgtccacaggcaaggagggcgtcatctacaacggcctgagtgactggctgtatgaggaggagatcctgaagacccacatcgcccactggtggagcccagatggcacccggctggcctatgctgccatcaatgacagccgggtgcccatcatggagctgcccacctacacaggcagcatctaccccaccgtgaagccctaccactaccccaaggccggcagcgagaaccccagcatcagcctgcacgtgattggcctgaatggccccacccatgacctggagatgatgcccccagatgaccccaggatgagggagtactacatcaccatggtgaagtgggccaccagcaccaaggtggccgtgacctggctgaacagagcccagaatgtgtccatcctgaccctgtgtgatgccaccaccggggtgtgcaccaagaagcatgaagatgaaagtgaggcctggctgcaccggcagaatgaggagcccgtcttcagcaaggatggcaggaagttcttcttcatccgggccatcccccagggcggccggggcaagttctaccacatcaccgtgagcagcagccagcccaacagcagcaatgacaacatccagagcatcaccagcggggactgggatgtgaccaagatcctggcctatgatgagaagggcaacaagatctacttcctgagcacagaggacctgccccggcggcggcagctgtacagcgccaacacagtgggcaacttcaaccggcagtgcctgagctgtgacctggtggagaactgcacctacttcagcgccagcttcagccacagcatggacttcttcctgctgaagtgtgagggccctggggtgcccatggtgacagtgcacaacaccacagacaagaagaagatgtttgacctggagaccaatgagcacgtgaagaaggccatcaatgaccggcagatgcccaaggtggagtacagagacatcgagattgatgactacaacctgcccatgcagatcctgaagccagccaccttcacagacaccacccactaccccctgctgctggtggtggatggcaccccaggcagccagagcgtggccgagaagtttgaggtgtcctgggagaccgtgatggtgagcagccacggggctgtggtggtgaagtgtgatggccggggcagcggcttccagggcaccaagctgctgcacgaggtgagaagaaggctgggcctgctggaggagaaggaccagatggaggccgtgaggaccatgctgaaggagcagtacatcgacaggaccagggtggccgtgtttgggaaggactatggaggctacctgagcacctacatcctgcctgccaagggggagaaccagggccagaccttcacctgtggcagcgccctgagccccatcacagacttcaagctgtatgccagcgccttcagcgagcgctacctgggcctgcacggcctggacaacagagcctatgagatgaccaaggtggcccaccgggtgtctgccctggaggagcagcagttcctgatcatccaccccacagcagatgagaagatccacttccagcacacagctgagctgatcacccagctgatccggggcaaggccaactacagcctgcagatctacccagatgagagccactacttcaccagcagcagcctgaagcagcacctgtaccgcagcatcatcaacttctttgtggagtgcttccgcatccaggacaagctgctgactgtgacagccaaggaggatgaggaggaggactag

SEQ ID NO: 109204 - DNA, 2277 bp, Artificial Sequence
  derived and/or modified sequence
atgaccaccgccaaggagcccagcgccagcggcaagagcgtgcagcagcaggagcaagagctggttgggtctaacccgccgcaacgcaactggaaggggatcgccatcgccttgttggtgatactagtgatatgttcgctgatcgtgaccagtgtcattctgttgactccagcggaggacaacagtctttcccaaaagaagaaggtgaccgtggaggacctcttttcggaggactttaagatccatgaccccgaagccaagtggattagtgatacagaatttatttacagggagcagaagggaactgtgcgattgtggaacgttgagacgaataccagcaccgtcctaattgagggcaagaagattgagtctctccgagccatacggtatgaaatctcaccagacagagaatacgccctgttttcctataatgtggaacctatcttcatctttgaaaataatatttactattgtgctcatgtggggaaacaggcgattcgtgtggtctccaccggcaaggagggggttatctataacgggttgtcagattggctctatgaggaagaaatcttaaaaacgcacatcgcccattggtggagcccagacggcactcggctggcatatgcggccataaatgattctagagttcctatcatggagttgccaacctacaccgggtctatctatccaacagtcaagccttaccactaccctaaagcgggatctgaaaatccatctatttcgttgcatgtgatcggtctgaatgggcccacacacgatctggaaatgatgccaccggatgacccgagaatgcgggaatattacatcaccatggtaaaatgggcaacatccaccaaagttgcggtgacgtggttgaatcgggcccagaatgtcagcatacttaccttgtgtgatgcgacgactggagtgtgcacaaaaaagcatgaagacgagagtgaagcctggctgcacagacagaacgaggaacctgtgttttccaaagacggacgaaaattcttctttatccgagctataccacagggaggtcgtgggaaattctatcacattaccgtgtcctcatcacaaccaaactccagcaatgataatatccaatcgattacctcaggggattgggacgtgacaaagatcctggcctatgacgagaaaggcaataaaatctactttctctccacagaagacctccctaggcggaggcagttgtactccgctaatactgtgggaaatttcaataggcagtgcttgtcatgcgatcttgttgaaaactgcacttatttttctgcgtcattttcgcatagcatggacttcttcttactaaaatgtgagggtcctggggtccccatggtgacagtccataataccaccgataaaaagaaaatgttcgatctggaaacaaatgaacatgttaaaaaggccataaacgacagacagatgcccaaggtcgagtacagggacattgagatcgacgattataatctccccatgcagattttaaagcccgccaccttcaccgataccacacactatccgctgctgctggtagtggacggcacacctggaagtcaatctgtggccgagaagtttgaagtgagttgggaaactgttatggtgtcctcgcacggagctgtggttgtaaagtgtgatggcagagggagtgggttccagggcaccaagttgctgcatgaagtaagacggagacttgggctgctggaggagaaggaccagatggaggccgtacgcaccatgttgaaagaacagtacattgaccggacgcgcgttgcagtctttgggaaggactatggaggctatctttccacttacatcctgcccgccaaaggggaaaatcagggtcagactttcacctgcgggagtgctctgtccccaattaccgacttcaagttatatgcaagtgccttttccgagcgataccttggtcttcacggcctagataatcgggcatacgaaatgaccaaagtcgcccaccgggtgtccgccctggaagagcagcagttcctaataattcatccaacggcggatgagaaaattcatttccagcacaccgcggagctgatcacccaactgattagaggtaaggctaactacagtctgcagatctaccctgacgaatcccattacttcacgtcctcatctctgaagcagcacctgtacagaagtataatcaacttcttcgtcgaatgttttagaatccaggacaaactactcaccgtgaccgccaaagaagacgaggaagaggattag

SEQ ID NO: 109205 - DNA, 2277 bp, Artificial Sequence
  derived and/or modified sequence
atgactaccgcgaaggagccatcagcctctgggaaaagcgtccagcaacaagaacaggaactcgttgggagcaatccacctcagaggaattggaagggaatcgctattgcactgctggtgatccttgttatctgctcgcttatagttactagcgtgatcctgctgacccccgctgaagataactccctctcacagaaaaaaaaggtcacagtagaggacctctttagcgaggattttaaaattcatgaccctgaggccaagtggataagcgacactgagtttatctaccgcgaacagaagggcacggtccgcctctggaatgtggaaacaaacacgagtacagtgcttatcgaggggaaaaaaatagaatctctgagagccatccgctatgagatttctcctgaccgtgaatatgccctgttttcctataatgtggagccgatatttatctttgagaataatatctattactgcgcccatgttggtaagcaggcaattcgagtggtttctaccggtaaggaaggggtaatttataatgggttgtcggattggctctacgaggaggagatcttaaagacacatatcgcccattggtggtctccagatggaactcgtctggcctacgctgctattaatgatagccgggtgccaattatggaactccctacttacaccgggtcgatttatcctaccgtgaagccttaccactatccaaaagctggttctgagaacccgtctatttctttacatgtgatcggccttaatggcccaacccacgacttggaaatgatgcctcctgacgacccccgaatgagggaatactacatcaccatggttaaatgggccacaagtacgaaagtggcagtgacttggctgaatagggcacagaacgtttccatcctgaccctgtgtgatgcaacaacgggagtatgcactaaaaaacacgaggatgagtcggaagcctggctacataggcagaatgaagaacccgtgttctcaaaggatggcaggaagttcttttttatccgcgcaattccccaagggggaagggggaaattctaccacataacagtgtcctctagccagcccaacagctcaaatgacaacattcagagtataacctctggcgattgggatgttaccaagattctagcctacgacgaaaaagggaacaagatttactttctctcgactgaagacctacctagaagaaggcagctgtacagcgctaacacagtgggcaattttaatcgccagtgcctctcttgtgacctagttgaaaattgcacatatttcagcgcttcattttctcattctatggattttttccttctcaagtgtgaagggcctggcgtgccaatggttacagtccacaacaccacggacaaaaagaagatgtttgacctggagaccaacgagcacgtgaaaaaggcaattaacgacagacagatgcctaaggtagagtacagagatatagagatcgatgattacaatttgcccatgcagatcctgaagccagcaacgtttacggatacgactcactatcccctcttacttgttgtcgatggaacaccgggaagccaaagtgtggcagagaagttcgaggtctcctgggagacagtcatggtgtcttcgcatggggctgtggtggtcaagtgcgatggacggggatcaggcttccagggcacgaagctgctccacgaggtcaggcgacggctcggtttactagaagagaaggaccaaatggaggccgttcgcacaatgctcaaggaacagtacatcgacagaacacgcgtggcagtgttcgggaaagactacgggggttacctgtccacatacattctgcctgctaagggcgaaaaccaggggcaaacattcacatgtgggtcagctctcagcccaataacagacttcaagctatatgcctccgccttcagcgaacggtatctgggcctgcacgggctcgacaacagggcttatgaaatgactaaggtcgcacacagggtgtccgctctggaagaacaacagtttcttatcattcaccctacagcagacgaaaagatacattttcagcatactgccgagctgatcactcaactgatccgcggaaaagccaattactccctgcagatctaccccgatgagtcacattatttcactagctcaagcctgaagcagcacctgtaccggtctatcattaacttctttgtcgagtgtttccgaattcaagacaagctgcttaccgtgaccgctaaggaagatgaagaggaggactag

SEQ ID NO: 109206 - DNA, 2277 bp, Artificial Sequence
  derived and/or modified sequence
atgaccaccgccaaggagcccagcgccagcggcaagagcgtgcagcagcaggagcaggagctggtgggcagcaaccccccccagagaaactggaagggcatcgccatcgccctgctggtgatcctggtgatctgcagcctgatcgtgaccagcgtgatcctgctgacccccgccgaggacaacagcctgagccagaagaagaaggtgaccgtggaggacctgttcagcgaggacttcaagatccacgaccccgaggccaagtggatcagcgacaccgagttcatctacagagagcagaagggcaccgtgagactgtggaacgtggagaccaacaccagcaccgtgctgatcgagggcaagaagatcgagagcctgagagccatcagatacgagatcagccccgacagagagtacgccctgttcagctacaacgtggagcccatcttcatcttcgagaacaacatctactactgcgcccacgtgggcaagcaggccatcagagtggtgagcaccggcaaggagggcgtgatctacaacggcctgagcgactggctgtacgaggaggagatcctgaagacccacatcgcccactggtggagccccgacggcaccagactggcctacgccgccatcaacgacagcagagtgcccatcatggagctgcccacctacaccggcagcatctaccccaccgtgaagccctaccactaccccaaggccggcagcgagaaccccagcatcagcctgcacgtgatcggcctgaacggccccacccacgacctggagatgatgccccccgacgaccccagaatgagagagtactacatcaccatggtgaagtgggccaccagcaccaaggtggccgtgacctggctgaacagagcccagaacgtgagcatcctgaccctgtgcgacgccaccaccggcgtgtgcaccaagaagcacgaggacgagagcgaggcctggctgcacagacagaacgaggagcccgtgttcagcaaggacggcagaaagttcttcttcatcagagccatcccccagggcggcagaggcaagttctaccacatcaccgtgagcagcagccagcccaacagcagcaacgacaacatccagagcatcaccagcggcgactgggacgtgaccaagatcctggcctacgacgagaagggcaacaagatctacttcctgagcaccgaggacctgcccagaagaagacagctgtacagcgccaacaccgtgggcaacttcaacagacagtgcctgagctgcgacctggtggagaactgcacctacttcagcgccagcttcagccacagcatggacttcttcctgctgaagtgcgagggccccggcgtgcccatggtgaccgtgcacaacaccaccgacaagaagaagatgttcgacctggagaccaacgagcacgtgaagaaggccatcaacgacagacagatgcccaaggtggagtacagagacatcgagatcgacgactacaacctgcccatgcagatcctgaagcccgccaccttcaccgacaccacccactaccccctgctgctggtggtggacggcacccccggcagccagagcgtggccgagaagttcgaggtgagctgggagaccgtgatggtgagcagccacggcgccgtggtggtgaagtgcgacggcagaggcagcggcttccagggcaccaagctgctgcacgaggtgagaagaagactgggcctgctggaggagaaggaccagatggaggccgtgagaaccatgctgaaggagcagtacatcgacagaaccagagtggccgtgttcggcaaggactacggcggctacctgagcacctacatcctgcccgccaagggcgagaaccagggccagaccttcacctgcggcagcgccctgagccccatcaccgacttcaagctgtacgccagcgccttcagcgagagatacctgggcctgcacggcctggacaacagagcctacgagatgaccaaggtggcccacagagtgagcgccctggaggagcagcagttcctgatcatccaccccaccgccgacgagaagatccacttccagcacaccgccgagctgatcacccagctgatcagaggcaaggccaactacagcctgcagatctaccccgacgagagccactacttcaccagcagcagcctgaagcagcacctgtacagaagcatcatcaacttcttcgtggagtgcttcagaatccaggacaagctgctgaccgtgaccgccaaggaggacgaggaggaggactag

SEQ ID NO: 109207 - DNA, 2388 bp, Artificial Sequence
  derived and/or modified sequence
aactcgccgtcagaccccacctgccccggtggtgggaagcgcctggacagaccatgaccacagccaaggagccaagcgcttcggggaaatccgtgcagcagcaggaacaggagctggtggggagtaaccctccgcagaggaattggaaaggaatagcaattgcactgcttgtcattctggtcatctgctccttgatcgtcacctcggtcatacttctgacaccagcggaagataatagtctgtctcaaaagaagaaggtcactgtagaagatctcttcagtgaagacttcaaaattcatgaccccgaggctaagtggataagtgatacagaattcatctacagagaacagaaaggaacagtgagactgtggaatgttgaaacaaatacttctactgtcttaatagaaggcaaaaaaattgaatcattaagagccatcagatatgaaatatctccagatagagagtatgcacttttttcatacaatgtggaacccatatttatttttgaaaacaatatctactactgtgcacatgtcgggaaacaggccatccgtgtggtctccactggcaaggaaggtgtgatttacaatggcctcagtgactggctgtatgaagaggagattttgaagacacacatcgcacactggtggtctccggatggcacgagactcgcctacgccgccatcaatgattcccgtgtccccatcatggagctcccaacttacaccggctccatctaccccaccgtgaagccctaccactatcccaaggctggaagtgagaaccccagcatttccctacacgttattggcttaaatggacccacccatgatctggagatgatgccgcctgatgatccacggatgagggagtactacatcaccatggtgaagtgggccaccagcaccaaggtcgccgtgacctggctgaaccgggcgcagaacgtgtccatcctcaccctctgcgacgccaccacgggggtctgcacgaagaaacacgaggatgaaagtgaggcctggctccacagacagaatgaagaacctgtgttctccaaggatggccgaaagtttttcttcatcagagccatcccccagggaggacgagggaaattctatcacatcacggtgtcctcgtcccagcccaacagcagcaacgacaacatccagtccatcacctccggggactgggacgtgaccaagatcctagcctacgatgagaaggggaataagatctacttcctgagcacggaggacctgcctcggagacgacaactctacagtgccaacacggtgggcaacttcaacaggcagtgcctctcctgtgacctggttgagaactgcacctacttcagcgcttccttcagccatagcatggacttcttcctgctcaagtgcgaaggtcctggtgttcctatggtgacggtgcacaacacaacagataagaaaaaaatgtttgacctagaaacaaatgaacatgtcaagaaggccataaatgaccgacagatgcctaaagtggaatacagggacattgagattgatgattacaacctgcccatgcagatactgaagccagcaaccttcaccgacaccacccactaccctctgctcctggtggtggatggcaccccaggcagccagagtgtggctgagaagttcgaggtgagctgggagacggtgatggtgagcagccacggcgcggtggtggtaaagtgtgacggccgtggcagcggcttccaagggaccaagctcctgcacgaagtgaggcggcggctgggcttgctggaggagaaggaccagatggaggccgtgcggacgatgctgaaggagcagtacattgacaggacgcgcgtggccgtgtttgggaaggattacggtggctacctgagcacctacatcctcccagcaaagggagaaaatcaaggccagacattcacctgcggctctgctctctctccaataacagacttcaaactctatgcctctgcgttttccgagaggtacttgggcctccatggacttgacaacagagcatacgagatgaccaaggtagcccatcgagtctccgcgctggaagaacagcagttcctgatcattcatcccactgccgatgaaaaaattcatttccagcacacagcagaactcattacacaactaattaggggaaaggctaattacagcttacagatttacccggacgaaagccattactttaccagctccagcctcaaacagcatctgtaccggtccatcatcaacttcttcgtggaatgcttcaggatccaggacaaactgctgacagtcacagcgaaagaggacgaggaggaggactaagctcaggtcgctctaagcacaaacgtggctctttctacaaccagatgcaaccgaggga

SEQ ID NO: 109208 - DNA, 159 bp, Artificial Sequence
  derived and/or modified sequence
atgaaactgtgtgtgaccgtgttgtcactcctggtgttggttgccgccttctgttccctggccctgtctgcgccaagtaataagcctctagaggcttccaagagcgccctgactcctgtgtcaccaggatcgcggagcacctgtatgacttggaattag

SEQ ID NO: 109209 - DNA, 421 bp, Artificial Sequence
  derived and/or modified sequence
gagtcgattgcctcactgcatgtgtattcgtgagttcgcggttgaacaactgttcctttactctgctccctgtctttgatcttggccccctcaagtcctgagtgccttggttcctctttgatgcctttaaaaagctgggcttttgtttgtttgttttctggcttgtttgtttggaaggaggttggtctgatacgtgctactccagtttagccagggtgctgactgggttacttttttaaacactaggaatggtaatttctactcttctggacttcaaactaagaagttaaagagacttctctgtaaataaacaaatctcttctgctgtccttttgcatttggagacagctttatttcaccatatccaaggagtataactagtgctgtcattatgaatgtgacaagtttattttcctttaca

SEQ ID NO: 109210 - protein, 2180 aa, Artificial Sequence
  derived and/or modified sequence
MSFRGKVFKREPSEFWKKRRTVRRVNQEEIHRFSSQEKPRLLEPLDYETVIEELEKTYRNDPLQDLLFFPSDDFSAATVSWDIRTLYSTVPEDAEHKAENLLVKEACKFYSSQWHVVNYKYEQYSGDIRQLPRAEYKPEKLPSHSFEIDHEDADKDEDTTSHSSSKGGGGAGGTGVFKSGWLYKGNFNSTVNNTVTVRSFKKRYFQLTQLPDNSYIMNFYKDEKISKEPKGCIFLDSCTGVVQNNRLRKYAFELKMNDLTYFVLAAETESDMDEWIHTLNRILQISPEGPLQGRRSTELTDLGLDSLDNSVTCECTPEETDSSENNLHADFAKYLTETEDTVKTTRNMERLNLFSLDPDIDTLKLQKKDLLEPESVIKPFEEKAAKRIMIICKALNSNLQGCVTENENDPITNIEPFFVSVALYDLRDSRKISADFHVDLNHAAVRQMLLGASVALENGNIDTITPRQSEEPHIKGLPEEWLKFPKQAVFSVSNPHSEIVLVAKIEKVLMGNIASGAEPYIKNPDSNKYAQKILKSNRQFCSKLGKYRMPFAWAVRSVFKDNQGNVDRDSRFSPLFRQESSKISTEDLVKLVSDYRRADRISKMQTIPGSLDIAVDNVPLEHPNCVTSSFIPVKPFNMMAQTEPTVEVEEFVYDSTKYCRPYRVYKNQIYIYPKHLKYDSQKCFNKARNITVCIEFKNSDEESAKPLKCIYGKPGGPLFTSAAYTAVLHHSQNPDFSDEVKIELPTQLHEKHHILFSFYHVTCDINAKANAKKKEALETSVGYAWLPLMKHDQIASQEYNIPIATSLPPNYLSFQDSASGKHGGSDIKWVDGGKPLFKVSTFVVSTVNTQDPHVNAFFQECQKREKDMSQSPTSNFIRSCKNLLNVEKIHAIMSFLPIILNQLFKVLVQNEEDEITTTVTRVLTDIVAKCHEEQLDHSVQSYIKFVFKTRACKERTVHEELAKNVTGLLKSNDSTTVKHVLKHSWFFFAIILKSMAQHLIDTNKIQLPRPQRFPESYQNELDNLVMVLSDHVIWKYKDALEETRRANHSVARFLKRCFTFMDRGYVFKMVNNYISMFSSGDLKTLCQYKFDFLQEVCQHEHFIPLCLPIRSANIPDPLTPSESTQELHASDMPEYSVTNEFCRKHFLIGILLREVGFALQEDQDVRHLALAVLKNLMAKHSFDDRYREPRKQAQIASLYMPLYGMLLDNMPRIYLKDLYPFTVNTSNQGSRDDLSTNGGFQSQTAIKHANSVDTSFSKDVLNSIAAFSSIAISTVNHADSRASLASLDSNPSTNEKSSEKTDNCEKIPRPLSLIGSTLRFDKLDQAETRSLLMCFLHIMKTISYETLIAYWQRAPSPEVSDFFSILDVCLQNFRYLGKRNIIRKIAAAFKFVQSTQNNGTLKGSNPSCQTSGLLSQWMHSTSSHEGHKQHRSQTLPIIRGKNALSNPKLLQMLDNTMTSNSNEIDIVHHVDTEANIATEVCLTILDLLSLFTQTHQRQLQQCDCQNSLMKRVFDTYMLFFQVNQSATALKHVFASLRLFVCKFPSAFFQGPADLCGSFCYEVLKCCNHRSRSTQTEASALLYFFMRKNFEFNKQKSIVRSHLQLIKAVSQLIADAGIGGSRFQHSLAITNNFANGDKQMKNSNFPAEVKDLTKRIRTVLMATAQMKEHEKDPEMLVDLQYSLANSYASTPELRRTWLESMAKIHARNGDLSEAAMCYIHIAALIAEYLKRKGYWKVEKICTASLLSEDTHPCDSNSLLTTPSGGSMFSMGWPAFLSITPNIKEEGAMKEDSGMQDTPYNENILVEQLYMCVEFLWKSERYELIADVNKPIIAVFEKQRDFKKLSDLYYDIHRSYLKVAEVVNSEKRLFGRYYRVAFYGQGFFEEEEGKEYIYKEPKLTGLSEISQRLLKLYADKFGADNVKIIQDSNKVNPKDLDPKYAYIQVTYVTPFFEEKEIEDRKTDFEMHHNINRFVFETPFTLSGKKHGGVAEQCKRRTILTTSHLFPYVKKRIQVISQSSTELNPIEVAIDEMSKKVSELNQLCTMEEVDMIRLQLKLQGSVSVKVNAGPMAYARAFLEETNAKKYPDNQVKLLKEIFRQFADACGQALDVNERLIKEDQLEYQEELRSHYKDMLSELSTVMNEQITGRDDLSKRGVDQTCTRVISKATPALPTVSISSSAEV

SEQ ID NO: 109211 - DNA, 6543 bp, Artificial Sequence
  derived and/or modified sequence
atgtcctttcgaggcaaagtcttcaagcgcgaaccttccgaattttggaagaaacgtagaaccgtgcgtagagtgaatcaggaggagatccacagattttcctcacaggagaagcctagattacttgaaccgctggattacgagacagtgatcgaagaactcgagaaaacctatcgcaatgatccattacaggaccttttgttcttcccatcggatgattttagtgccgccacagtgagttgggatattcgaaccctgtactcaacagtgcctgaagacgccgagcacaaggccgagaaccttctggtaaaggaagcctgcaagttctatagttcacaatggcatgtggtcaactacaagtatgagcaatacagcggagatatcagacagctgcccagagcagaatacaaaccagagaaactgccaagtcatagttttgaaattgaccatgaggacgcagataaggacgaggacactactagccactcctcttcaaagggaggggggggggctggagggacaggcgtctttaaatccgggtggctatacaagggaaattttaattccaccgtgaataataccgttaccgtgagaagcttcaagaagcgctacttccagcttacccaactgccagacaacagttacataatgaacttctataaggacgaaaagatttctaaagaaccaaagggctgtatttttctggattcatgcaccggagtcgtccagaacaataggctccgtaagtatgcgttcgaactgaaaatgaacgatctgacctatttcgtcctggccgcggagactgaaagcgatatggacgagtggatacacacccttaataggatccttcagatttctcctgagggacccctacaagggcgccgatcgactgaactcaccgacctgggactggactctcttgacaacagcgtcacgtgtgagtgcacccctgaggaaacagattcgagcgaaaataacctacacgccgatttcgcaaagtacctgacagaaacagaggacaccgtaaagaccacacgcaacatggagcggttgaatctgttttccctcgatcctgatattgacacactgaagttgcagaagaaagacctgctcgagccagaaagcgtcattaaaccttttgaggagaaagctgctaagcgcatcatgatcatatgcaaggcactcaattcaaacctgcagggatgtgtgaccgagaatgaaaacgaccccattactaacatcgaaccctttttcgtgtccgtagcactgtacgacctacgcgattcacgaaagatttccgcagatttccacgtggatctgaaccacgcggctgtaaggcagatgttgctgggcgcaagcgtggccctcgaaaacggcaacattgacaccatcacaccaagacagagtgaggagcctcatattaagggattgcccgaagagtggctcaagttccctaagcaggccgtcttctctgtttcaaatcctcactcagagatcgtcttagtggctaaaatcgagaaggtgctgatgggaaatatcgcctccggcgctgaaccctacatcaagaacccggacagtaacaagtacgctcagaagattcttaagtccaatcgccaattttgctctaagctgggaaagtatcgcatgcccttcgcctgggcggtgagatctgtttttaaagacaaccaggggaatgtagatcgtgattctcgcttcagtccactcttcagacaagagagctccaaaatctcaacggaggacctggtgaaactggtgtctgactatcggagagctgaccggattagcaagatgcagacaattcctggatctttggacatcgctgttgacaacgtgcccctggagcaccccaactgtgttaccagtagcttcattcccgttaagcctttcaacatgatggcacagacggaaccaaccgtagaagtagaggagttcgtttatgattccacgaagtattgtaggccataccgggtgtacaaaaaccaaatttatatttacccgaagcatctcaagtatgatagccaaaagtgttttaacaaagctaggaatattactgtgtgcatagaattcaaaaactccgacgaggaatccgcaaaaccacttaagtgtatctatgggaaaccagggggccccttattcacctccgctgcttacacggctgtcttgcaccactcccagaacccagacttttctgatgaggtgaagatcgaattgccaacacagctccacgagaaacatcacatcctcttttctttctaccatgtgacctgtgatattaatgccaaagcaaacgctaagaagaaggaagcccttgagaccagcgtagggtatgcctggctgcctctcatgaaacacgatcagatagctagtcaggagtataatatcccgatcgccaccagtctcccgccaaactatctatcctttcaggattcagcttctgggaagcacggcggcagtgacatcaagtgggtcgatggtggaaagccactgttcaaggtgtctactttcgttgtgagcacggtgaatacacaagatccacacgtgaatgcctttttccaggagtgtcagaaacgcgagaaggacatgtcgcagtcccctaccagtaacttcattagaagctgtaagaatttattgaatgtggagaagattcacgcgattatgagctttctccccattattctgaatcagctgttcaaggtcctggtacaaaacgaagaggatgagataacgacgacagttacaagagtgttgacggacattgtggctaaatgtcatgaagagcagcttgaccacagcgttcagtcctatatcaagttcgtgttcaaaacccgggcctgcaaggaaagaaccgtgcacgaagagctggctaaaaatgtaactggtctcctcaaatccaatgattcaacaacagtcaagcacgtgctcaagcattcctggttctttttcgccatcatcctgaaatcaatggctcagcacctgatcgacacaaataagatccaattgccccgcccacagaggtttccagagtcatatcagaatgaactcgacaacctcgtaatggtcttatctgatcacgtgatctggaagtacaaggacgcccttgaggagacacggagggctaatcactcggtcgctaggttcttaaagcggtgcttcacattcatggacaggggttatgtctttaagatggttaacaattacatttcaatgttctcttctggcgatctgaagactctgtgtcagtataaattcgacttcctgcaggaagtgtgtcagcatgaacactttattcccttatgcctccccatccgctctgccaacatccctgaccctcttaccccttccgagtcaacccaggagctgcacgcttctgatatgcccgaatattccgtgaccaacgaattctgtagaaagcactttcttattggtatcctgctgagagaagtggggtttgccctacaggaagaccaggatgtccggcacctcgctctcgctgtgttaaagaatttgatggcaaaacactccttcgatgataggtatcgcgaacctaggaagcaagcgcaaatcgcttcactgtatatgcctctgtacggaatgttattggataatatgccgaggatctatctgaaagacttgtatcccttcacagtaaacaccagcaaccagggctctagagacgatctttcaaccaatggagggttccagtcccaaacagccattaaacatgccaactctgtagacacatcctttagcaaggacgtgctgaattcgatcgctgccttttcctcaattgccatcagtactgttaatcatgcggactcccgggcttcgctcgcgtccctcgacagcaatcctagcactaacgaaaaaagttccgaaaaaactgataactgcgaaaaaattcctagacctctgagcctcattgggagcaccctgagattcgataagttggatcaagccgagaccagatcccttctcatgtgttttttgcacatcatgaagaccatctcgtacgaaacattaatagcatactggcaaagagcaccgtcaccggaagtatcagatttcttttccattctcgacgtgtgcctgcaaaactttcggtatctcggtaagagaaacattatcaggaagattgccgccgctttcaagttcgtgcagagtactcagaacaatggtactcttaaaggctctaacccaagttgtcagacgtctggcctcctgtcacaatggatgcactccacgtccagccacgaaggtcacaagcagcataggtctcagacgttgccaattattcggggtaaaaacgccttaagtaaccccaagctgttacagatgctggataacactatgacctccaatagtaacgagattgatatcgtccatcatgtggacacggaggccaatatcgcgaccgaagtctgtctaactatcctggacctgctgtcattatttacacaaactcaccagcggcagctccagcaatgcgattgtcagaacagtctcatgaagagggtgtttgatacttatatgctcttttttcaggtgaaccaatctgctacagccttaaaacacgtatttgccagtctaaggcttttcgtgtgcaagtttccgagtgcctttttccagggcccagccgacctgtgcggctctttctgctatgaggtcctgaagtgctgcaatcaccggtcacgatctacccagacagaagcaagtgcactcctgtacttcttcatgcgcaagaactttgaattcaataagcagaaatccatcgtgagaagtcatcttcagcttattaaggccgtgtctcagctcatcgctgacgcaggtattggtggttcacggttccagcattctttagctattacaaacaattttgcgaacggcgacaagcagatgaaaaacagcaactttcctgccgaggtcaaagacctgacaaaacgaatccggacagttctcatggccacagcgcagatgaaggagcacgagaaagatcctgagatgctagtggaccttcagtacagtcttgccaacagttatgcttcgacaccggagctccgtagaacgtggctggaatctatggccaagatacatgcccgcaacggagatttatccgaagcggccatgtgttatatacacatcgccgcactgatcgcagagtatttgaaaagaaagggttactggaaggtcgagaagatctgcactgcatccctgctctccgaagacacccacccatgtgattctaatagtcttttgaccactcccagcgggggcagcatgttctccatgggctggccagcatttctcagtatcacccccaatataaaagaggagggagctatgaaagaagactcgggcatgcaggatactccttataatgagaatatcctagtggagcagctttatatgtgcgtcgagtttctctggaagtctgagcggtacgagctgatcgctgacgtcaataagccaatcattgcagtgttcgaaaagcagagggacttcaaaaaactgagcgacctgtactatgatatacaccgatcctatctaaaggtggcggaggttgtgaattcagagaaacgcctgtttggtcgctattaccgggtcgcattctatgggcaggggttctttgaggaagaagagggaaaggagtacatttataaagagccaaaactcacaggcctgagtgagatttcgcagcgactgctgaagctgtatgcggataagtttggagccgacaacgttaaaataatacaggattctaataaggtcaatcctaaagatctggacccaaagtacgcctatatccaggtaacatatgtgacaccctttttcgaagagaaggagatcgaggacaggaaaactgacttcgaaatgcaccacaatattaacaggtttgtgtttgaaaccccttttaccctatccggaaagaagcacggcggcgttgccgagcagtgcaaacgccgcacgatcctgacaacctctcatctcttcccctacgtgaagaagcgtattcaggttatctcccagtctagcaccgagctgaatcctattgaggtggcaatcgatgaaatgagcaagaaggtatctgagctgaaccagctgtgcactatggaggaggttgatatgatccggctgcaactcaaacttcaggggagcgtgagcgtcaaggtgaacgccggcccaatggcctacgctcgggccttcctcgaagagaccaatgcaaaaaaataccctgataaccaggtgaagttgctcaaggaaatcttcagacaattcgccgacgcctgcggccaagcattagatgtaaacgaaagactgataaaggaagaccagttggagtaccaagaggagctgcggtctcactacaaagacatgttgtctgaattgagcacagtgatgaatgagcagattacaggaagggacgacttgagcaagcggggcgtggaccagacatgcaccagggtgatttcgaaagccactcccgctctccccaccgtgagtatatcgtcatcagccgaagtgtag

SEQ ID NO: 109212 - DNA, 6543 bp, Artificial Sequence
  derived and/or modified sequence
atgtccttccggggcaaggtgttcaagcgggagcccagcgagttctggaagaagagaagaacagtgagaagagtgaaccaggaggagatccaccgcttcagcagccaggagaagccccggctgctggagcccctggactatgaaacagtgattgaggagctggagaagacctacagaaatgaccccctgcaggacctgctcttcttccccagtgatgacttctctgctgccaccgtgtcctgggacatccgcaccctgtacagcacagtgcctgaagatgctgagcacaaggccgagaacctgctggtgaaggaggcctgcaagttctacagcagccagtggcacgtggtgaactacaagtatgagcagtacagcggggacatccggcagctgcccagggctgagtacaagccagagaagctgcccagccacagctttgaaattgaccatgaagatgctgacaaggatgaggacaccaccagccacagcagcagcaagggcggcggcggggccggcggcaccggggtcttcaagagcggctggctgtacaagggcaacttcaacagcacagtgaacaacacagtgacagtgcgctccttcaagaagcgctacttccagctgacccagctgcctgacaacagctacatcatgaacttctacaaggatgagaagatcagcaaggagcccaagggctgcatcttcctggacagctgcacaggagtggtgcagaacaaccggctgaggaaatatgcctttgagctgaagatgaatgacctgacctactttgtgctggccgctgagacagaaagtgacatggatgagtggatccacaccctgaaccgcatcctgcagatcagccctgagggccccctgcagggccgccgcagcacagagctgacagacctgggcctggacagcctggacaacagcgtgacctgtgagtgcaccccagaggagacagacagcagcgagaacaacctgcatgctgactttgccaagtacctgacagaaacagaagatactgtgaagaccaccaggaacatggagcggctgaacctcttcagcctggaccctgacatcgacaccctgaagctgcagaagaaggacctgctggagcctgagagcgtcatcaagccctttgaggagaaggccgccaagaggatcatgatcatctgcaaggccctgaacagcaacctgcagggctgtgtgacagaaaatgaaaatgaccccatcaccaacatcgagcccttctttgtgtctgtggccctgtatgacctgcgggacagcaggaagatctctgctgacttccacgtggacctgaaccacgccgctgtgcggcagatgctgctgggcgcctctgtggccctggagaatggaaatattgacaccatcaccccccggcagagcgaggagccccacatcaagggcctgcctgaggagtggctgaagttccccaagcaggccgtgttttctgtgagcaacccccacagcgagatcgtgctggtggccaagattgagaaggtgctgatgggcaacatcgccagcggggctgagccctacatcaagaacccagacagcaacaagtatgcccagaagatcctgaagagcaaccggcagttctgcagcaagctgggcaagtacaggatgccctttgcctgggccgtgcgctctgtgttcaaggacaaccagggcaatgtggaccgggacagccgcttcagccccctcttccggcaggagagcagcaagatcagcacagaggacctggtgaagctggtgtctgactaccgccgggctgaccgcatcagcaagatgcagaccatccctggcagcctggacattgctgtggacaacgtgcccctggagcaccccaactgtgtgaccagcagcttcatccctgtgaagcccttcaacatgatggcccagacagagcccaccgtggaggtggaggagtttgtgtatgacagcaccaagtactgccggccctacagagtgtacaagaaccagatctacatctaccccaagcacctgaagtatgacagccagaagtgcttcaacaaggccaggaacatcaccgtgtgcatcgagttcaagaacagtgatgaggagagcgccaagcccctgaagtgcatctacggcaagccaggcggccccctcttcaccagcgctgcctacacagctgtgctgcaccacagccagaacccagacttcagtgatgaggtgaagattgagctgcccacccagctgcacgagaagcaccacatcctcttctccttctaccacgtgacctgtgacatcaatgccaaggccaatgccaagaagaaggaggccctggagacctctgtgggctacgcctggctgcccctgatgaagcatgaccagatcgccagccaggagtacaacatccccatcgccaccagcctgccccccaactacctgtccttccaggacagcgccagcggcaagcacggcggcagtgacatcaagtgggtggatggcggcaagcccctcttcaaggtgtccacctttgtggtgtccacagtgaacacccaggacccccacgtgaatgccttcttccaggagtgccagaagcgggagaaggacatgagccagagccccaccagcaacttcatccgcagctgcaagaacctgctgaatgtggagaagatccacgccatcatgtccttcctgcccatcatcctgaaccagctgttcaaggtgctggtgcagaatgaggaggatgagatcaccaccaccgtgaccagggtgctgacagacatcgtggccaagtgccacgaggagcagctggaccacagcgtgcagagctacatcaagtttgtgttcaagacccgggcctgcaaggagaggacagtgcatgaggagctggccaagaatgtgacaggcctgctgaagagcaatgacagcaccaccgtgaagcacgtgctgaagcacagctggttcttctttgccatcatcctgaagtccatggcccagcacctgattgacaccaacaagatccagctgccccggccccagcgcttccctgagagctaccagaatgagctggacaacctggtgatggtgctgagtgaccacgtgatctggaagtacaaggatgccctggaggagacccggcgggccaaccacagcgtggcccgcttcctgaagcgctgcttcaccttcatggaccggggctacgtgttcaagatggtgaacaactacatctccatgttcagcagcggggacctgaagaccctgtgccagtacaagtttgacttcctgcaggaggtgtgccagcacgagcacttcatccccctgtgcctgcccatccgcagcgccaacatcccagaccccctgaccccatctgagagcacccaggagctgcacgccagtgacatgcctgagtacagcgtgaccaatgagttctgcaggaagcacttcctgattggcatcctgctgcgggaggtgggctttgccctgcaggaggaccaggatgtgcgccacctggccctggccgtgctgaagaacctgatggccaagcacagctttgatgaccgctaccgggagcccaggaagcaggcccagatcgccagcctgtacatgcccctgtatggcatgctgctggacaacatgccccgcatctacctgaaggacctgtaccccttcaccgtgaacaccagcaaccagggcagcagagatgacctgagcaccaatggaggcttccagagccagacagccatcaagcacgccaacagcgtggacaccagcttcagcaaggatgtgctgaacagcattgctgccttcagcagcatcgccatcagcacagtgaaccacgccgacagccgggccagcctggccagcctggacagcaaccccagcaccaatgagaagagcagcgagaagacagacaactgtgagaagatcccccggcccctgagcctcatcggcagcaccctgcgctttgacaagctggaccaggccgagaccaggagcctgctgatgtgcttcctgcacatcatgaagaccatctcctatgagaccctcatcgcctactggcagagggcccccagccctgaggtgtctgacttcttcagcatcctggatgtgtgcctgcagaacttccgctacctgggcaagaggaacatcatcaggaagattgctgctgccttcaagtttgtgcagagcacccagaacaacggcaccctgaagggcagcaaccccagctgccagaccagcggcctgctgagccagtggatgcacagcaccagcagccatgagggccacaagcagcacaggagccagaccctgcccatcatccggggcaagaatgccctgagcaaccccaagctgctgcagatgctggacaacaccatgaccagcaacagcaatgaaattgacatcgtgcaccacgtggacacagaggccaacatcgccacagaggtgtgcctgaccatcctggacctgctgagcctcttcacccagacccaccagaggcagctgcagcagtgtgactgccagaacagcctgatgaagagggtgtttgacacctacatgctgttcttccaggtgaaccagagcgccacagccctgaagcacgtgtttgccagcctgcggctgtttgtgtgcaagttccccagcgccttcttccagggccctgctgacctgtgtggcagcttctgctatgaggtgctgaagtgctgcaaccacaggagccgcagcacccagacagaggccagcgccctgctgtacttcttcatgaggaagaactttgagttcaacaagcagaagagcatcgtgcgcagccacctgcagctgatcaaggctgtgtcccagctgattgctgatgctggcattggaggcagccgcttccagcacagcctggccatcaccaacaactttgccaacggggacaagcagatgaagaacagcaacttccctgctgaggtgaaggacctgaccaagaggatcagaacagtgctgatggccacagcccagatgaaggagcacgagaaggaccctgagatgctggtggacctgcagtacagcctggccaacagctatgccagcaccccagagctgcggaggacctggctggagagcatggccaagatccacgccagaaatggagacctgtctgaggccgccatgtgctacatccacatcgccgccctgattgctgagtacctgaagaggaagggctactggaaggtggagaagatctgcacagccagcctgctgtctgaggacacccacccctgtgacagcaacagcctgctgaccacccccagcggcggctccatgttctccatgggctggccagccttcctgagcatcacccccaacatcaaggaggagggcgccatgaaggaggacagcggcatgcaggacaccccctacaatgaaaacatcctggtggagcagctgtacatgtgtgtggagttcctgtggaagtcagaaagatatgagctgattgctgatgtgaacaagcccatcatcgctgtgtttgagaagcagagggacttcaagaagctgagtgacctgtactatgacatccacaggagctacctgaaggtggccgaggtggtgaacagcgagaagaggctgtttggccgctactacagagtggccttctacggccagggcttctttgaggaggaggagggcaaggagtacatctacaaggagcccaagctgaccggcctgtctgagatcagccagaggctgctgaagctgtatgctgacaagtttggagctgacaacgtgaagatcatccaggacagcaacaaggtgaaccccaaggacctggaccccaagtatgcctacatccaggtgacctacgtgacccccttctttgaggagaaggagattgaggacaggaagacagactttgagatgcaccacaacatcaacagatttgtgtttgagacccccttcaccctgagcggcaagaagcacggcggcgtggccgagcagtgcaagaggaggaccatcctgaccaccagccacctgttcccctacgtgaagaagaggatccaggtgatcagccagagcagcacagagctgaaccccatcgaggtggccattgatgagatgagcaagaaggtgtctgagctgaaccagctgtgcaccatggaggaggtggacatgatccggctgcagctgaagctgcagggctctgtgtctgtgaaggtgaatgccggccccatggcctatgcccgggccttcctggaggagaccaatgccaagaagtacccagacaaccaggtgaagctgctgaaggagatcttccggcagtttgctgatgcctgtggccaggccctggatgtgaatgaaagactcatcaaggaggaccagctggagtaccaggaggagctgcggagccactacaaggacatgctgtctgagctgagcacagtgatgaatgagcagatcaccggcagagatgacctgagcaagaggggcgtggaccagacctgcaccagggtcatcagcaaggccaccccagccctgcccaccgtgtccatcagcagcagcgctgaggtgtag

SEQ ID NO: 109213 - DNA, 6543 bp, Artificial Sequence
  derived and/or modified sequence
atgagcttccggggcaaggtgttcaagcgggagcccagcgagttctggaaaaagcgtcgtacagtccgaagagtgaaccaagaggagatccatcgcttctcttctcaggagaagcctcgactgctcgagccattggattatgagaccgtgatcgaagagcttgaaaagacctatagaaacgacccgctgcaggacctcttgtttttccctagtgacgacttttccgccgccacagtgtcatgggatattcgtacgctgtatagcaccgttcctgaggacgctgaacacaaggccgagaacttgctcgtgaaagaagcctgtaagttctactcatcccagtggcacgtagttaactataagtacgaacaatacagtggggacatcagacagttaccgcgcgccgaatataaacccgagaaactgccatctcactctttcgagatcgaccacgaagatgcagacaaggatgaagacaccacttctcactcctcctccaaaggcggaggtggggccggcggaaccggcgtatttaagtccggatggctgtataaggggaacttcaactctacagtgaataacacagtcactgtgaggtcttttaagaaacgctactttcagttaacacagctccccgataactcatacatcatgaacttctacaaagacgagaaaatatccaaagagcctaagggctgtatattcttggactcctgcacaggagtggtacagaacaaccgcctgaggaagtacgcatttgagctgaagatgaatgacttgacatacttcgtcctcgccgctgaaacagaatccgacatggatgagtggatccacaccctcaatcggattctccagataagtccagagggcccactccagggaaggaggtctaccgaattgacagatctgggcttagactcattggataacagtgtgacctgcgagtgtaccccggaggaaaccgattcatccgagaacaacttacacgcagatttcgctaaatatcttacagaaaccgaggacaccgttaagaccacacgcaatatggaacggttgaatctgttctcccttgatcctgacatcgacacactcaagctacaaaaaaaagatctgcttgagccagaatccgtgatcaagcccttcgaggagaaagcagccaagcggattatgatcatctgcaaagccctgaattcaaacctgcagggatgcgtcaccgaaaacgagaatgaccccatcacaaacatcgagcctttctttgttagcgtcgcactgtatgacctgcgcgacagtagaaagatctccgccgattttcatgtggatttgaatcatgcagccgtgcgacagatgctcctcggggcctctgtcgccctcgaaaatggtaacatcgacaccatcactccacggcaatccgaagaacctcacatcaaggggttgcccgaagagtggttaaaatttcccaagcaagctgtgttttcagtgtccaacccccatagcgagatcgtgctggtcgccaaaatcgaaaaagtgcttatggggaatatcgcatctggcgccgaaccatacatcaagaaccccgactctaacaagtacgcacaaaaaatactcaagtcaaaccggcagttctgctccaaattagggaagtacaggatgcctttcgcctgggccgttcgttccgtttttaaggacaaccagggcaacgtggatcgcgatagcagattttcacccctatttcggcaagaaagcagtaagatttcaaccgaagatctggtgaagctagtgagcgactaccggcgcgctgaccgcattagcaagatgcaaaccattccaggctccttggatatcgccgtcgataacgtgccccttgagcatccaaattgcgttactagcagtttcatccccgtgaagccctttaacatgatggcccaaaccgagcccactgttgaagtggaggaatttgtatatgattctacaaagtactgtcgcccctatagagtctacaaaaatcagatatatatttaccctaaacaccttaagtacgatagccagaagtgttttaataaagcacgcaatataacggtttgtatcgaattcaagaacagtgacgaagagagcgcgaaaccccttaagtgtatctacgggaaacctggcggtccactcttcaccagtgcagcctacaccgctgtgctgcatcattctcagaaccctgacttctctgacgaggtgaaaatcgagttgcccacacaactccacgaaaagcatcacatattgttctccttttaccacgtgacgtgcgacattaatgctaaggccaacgcgaagaaaaaggaggccttagagacgagtgtcggatacgcctggctacccctcatgaagcatgaccagattgccagccaggagtataatatcccaatcgctacatcgttaccccccaactatttgtcatttcaagatagtgctagcggaaaacacggtgggtcagatatcaagtgggtagacggtggcaagcctttgtttaaagtgagcacctttgtagtgtcgaccgtaaatactcaggaccctcacgttaacgccttcttccaagagtgccagaaacgcgagaaggacatgtctcagtcccccaccagcaattttatcaggtcttgtaagaatttattgaatgtcgagaagatccacgccattatgtctttcctaccaattatcctgaaccagctatttaaagttctcgttcagaacgaggaggacgagatcaccactacggttactcgcgtcctgaccgatatcgtggccaaatgccacgaagaacagttggaccactctgtccagtcttacataaaattcgtgtttaagacccgggcatgcaaggaaagaaccgtgcacgaagaactcgcaaaaaatgttacaggactgttgaagtctaatgactcaacaaccgtgaaacatgtactgaagcattcatggttcttttttgccatcattttgaagtccatggctcagcatctcatcgataccaataagatacagctacccagaccccagaggttcccagaaagttatcagaacgagctcgacaacctggtgatggtgctgtcagaccacgtgatctggaaatacaaggacgcccttgaggaaacaaggcgcgccaatcactccgtggcccgatttttaaagcgttgcttcacgttcatggacaggggctacgttttcaagatggtaaacaattatatttcaatgttttcgagcggggatttgaaaaccttatgtcagtacaaattcgacttcctccaagaagtgtgccagcatgagcactttatcccactgtgcctgcccatccgatcagccaatattccagaccccctcacaccatcggagagcacccaggagcttcacgcctccgacatgcccgagtattccgtcacgaacgaattttgcaggaaacactttctaatcggaatcctgctgcgagaagtgggctttgccttgcaagaagatcaggacgttcgccatctggccctagctgtgcttaaaaatcttatggctaagcatagttttgacgacagatatcgggagccaaggaagcaggcgcagattgcctctctctacatgccattgtatggcatgctgctggataacatgccacgcatctacctgaaagatttgtatccgttcacagtaaatacgtcgaaccagggttctcgcgatgatttaagcactaatggcggtttccagtcacagaccgcaatcaagcacgctaattcagtcgacacctctttcagtaaagacgttttaaattccatagccgcatttagcagcatagcgatatctactgtgaatcatgctgactcgcgagctagcctggcaagtttggattccaatcccagcaccaacgagaagtctagcgaaaaaaccgataattgtgagaagattcctaggccactgtccctgatcgggagcaccctcagattcgataagcttgatcaggcagaaactcgttccctacttatgtgttttctgcacattatgaaaacgatatcatacgaaacacttattgcatattggcaacgagcccccagtccggaggtgtctgacttcttctccatcctggacgtgtgtcttcagaactttcggtatttagggaagaggaatatcatccggaagatcgccgctgcatttaagttcgtgcagagcacccaaaataacggaacgctgaaaggttcaaacccctcatgccagacatcagggctgttgagtcagtggatgcactctacttcttctcacgaaggccataagcaacatcgttcccagacactgccaatcattagaggcaaaaatgcgctgagcaatcccaaacttctgcagatgctggataacaccatgacctctaattccaacgagatagatatcgttcaccacgtggatacagaagcaaacatagctacagaagtgtgtctgacgatcttggatctgctgtccctgttcacgcagacccaccagaggcagttgcagcagtgtgattgccagaatagtttaatgaagcgagttttcgacacctacatgctcttttttcaggtgaatcaaagcgctaccgcgctaaagcatgtcttcgctagcttaaggcttttcgtatgtaaatttccatccgcattttttcaaggtcccgctgacctctgcggcagtttctgctacgaggtgctgaagtgttgcaaccatcggagccggtctacacagaccgaagcctctgctctgctgtacttctttatgcgcaagaactttgaatttaataaacagaagtccattgtgaggtctcacctgcagctgataaaagccgtctcccagctaatcgcagatgctggaattggaggtagtagatttcagcacagcctagccataacgaacaatttcgcaaatggcgataaacagatgaagaattccaacttccccgccgaggttaaagacttaacgaaacgcatccggacagttctaatggctaccgctcaaatgaaagaacatgaaaaagatccggaaatgctcgttgatctccagtattcgctggctaatagctacgcctctacgcctgagctgagaaggacatggctggagagcatggctaagatccatgcccgcaatggcgaccttagcgaagcggccatgtgttacattcatatcgctgccctcatcgccgaatacctaaagcgcaaaggttattggaaggttgagaaaatctgtactgccagtctactcagcgaggatactcacccctgtgactctaattctctgttgacaacaccaagcgggggaagcatgttcagtatgggttggccagccttcctcagcatcacacctaacattaaggaggagggagcaatgaaggaggattccgggatgcaggacacaccatataatgagaatattctcgtggaacaactgtacatgtgtgttgagttcctttggaagtccgagagatacgagttgattgccgacgttaacaaacccattatcgccgtctttgagaagcagcgagattttaaaaaactcagtgatctgtattatgatatacatcgatcgtacctgaaagtggccgaggtggtaaatagtgagaaacggttgtttggtcggtactatcgggtggctttttatggacaagggttcttcgaggaggaggagggtaaagaatatatctacaaggaacctaagctgacaggcctgagtgagatctcacaacgacttctgaaactgtacgcggacaaatttggcgctgataacgttaagatcattcaggattccaacaaggtcaatccaaaggacttggaccccaagtacgcatacatccaggtgacttacgtgacgccatttttcgaagaaaaggaaattgaggatcgcaaaaccgatttcgagatgcaccacaatatcaaccggttcgtgtttgagaccccattcaccctgagcggtaagaagcacggcggagtggctgaacaatgtaagcgccgaacaattttaacgaccagccatctgtttccatatgtcaagaagaggatccaggttatatcacaatcgtcgaccgaacttaacccaatcgaggtcgcaatcgacgaaatgtcaaaaaaggtcagcgagttaaaccagctgtgcactatggaggaagtggacatgattaggttacagctgaagctgcaaggctccgtaagtgtaaaggtgaatgcaggtccaatggcctacgcccgagccttcctcgaagagacaaatgcaaagaaatatccagataaccaggtgaagctccttaaagaaatctttcggcagttcgccgatgcctgcggacaggccctggatgtgaacgaaagactgatcaaggaggatcagctggagtatcaggaagagctgaggtcacattataaggacatgctgtccgaactctctaccgtcatgaacgagcagataaccgggcgggacgatctctccaagcggggggttgaccaaacctgcacacgtgtcatctccaaagctacccctgctctacctacagtcagcatttcttcctccgctgaggtgtag

SEQ ID NO: 109214 - DNA, 6542 bp, Artificial Sequence
  derived and/or modified sequence
atgtcttttaggggcaaggtgttcaaaagagaaccttccgagttctggaagaagcgtagaaccgtcaggcgggtgaaccaggaggaaattcaccgcttctctagtcaggagaaacctcgcttgcttgaaccactggactatgaaaccgtgatcgaggagctggaaaaaacctacaggaacgacccactgcaggacctcctttttttcccttcagatgatttttctgccgcaacggtctcctgggatatccgcacactctactcaactgtgccggaagacgccgagcataaggctgagaatcttctagtgaaagaggcctgtaaattttacagctctcaatggcacgttgtaaattacaagtacgaacaatactcaggcgatatccgccagttgccaagggcagaatataaaccagagaagttaccttctcatagttttgaaatagatcacgaagatgccgacaaggatgaagacaccacaagccactctagttccaagggcggtggcggagctggcggaactggagtgttcaagtctgggtggctgtataagggcaatttcaatagcaccgtgaacaacactgtcactgtccggtcatttaaaaagcgctattttcaactcacccaacttccagacaattcctatattatgaacttttataaggacgagaagatctcaaaggaacccaaaggatgtatatttcttgactcctgtaccggagtggtgcagaataatcggcttcgaaagtacgcatttgagttgaaaatgaatgatttgacgtattttgtcctggccgctgagaccgagtcggacatggatgaatggatacacacactcaataggattcttcaaatcagcccagaggggcctctgcaggggagacgaagcacagaactaacagacctcggactcgactccttggataacagtgtgacttgcgagtgcacaccggaggagacagacagctctgagaacaaccttcacgcagactttgctaagtacctgactgagactgaagacacagtcaagacaactagaaatatggagcgcctcaatttattttctctcgaccccgacatcgatacgctgaagctccagaaaaaagacttactggaaccggagtccgtgatcaaaccttttgaggagaaggcagctaaacggatcatgatcatctgtaaggcgctgaactccaatttacagggatgcgtaactgaaaacgagaacgatcccataacaaatatcgagccatttttcgtctccgttgcactgtacgatctgcgtgactctaggaagattagcgcagatttccacgtggatctcaatcacgccgcagttcgacagatgttgttgggcgcttctgttgcgttagaaaacggcaacatagatacaatcactccacggcagtctgaggagccacacattaagggactgcccgaggaatggctgaaatttcccaagcaagccgtcttcagtgtgtcaaatccccactcggagattgtcctcgttgctaaaatcgaaaaggttctaatgggcaatattgcgtcgggcgcagagccctatattaagaatcccgattccaacaagtatgcccaaaagatcctcaaatcaaaccggcaattctgctccaagctgggcaaatatagaatgccatttgcctgggccgtgcgctctgtgtttaaagataaccagggcaacgtagacagagatagccgcttcagtccactgtttcgccaggaatcaagcaagatttctacagaagatctcgtgaaattggtgtcagactacaggcgcgctgaccggattagcaagatgcagacaattcctgggagcctggatatagccgtggataacgttcccctggagcacccaaactgcgtgacctctagctttataccagtaaagccatttaacatgatggcccagacggaaccaacagtggaggtggaggagttcgtctacgacagcacaaaatattgccgtccatatcgggtatataagaaccaaatttatatctacccgaagcacctgaaatatgattcacagaaatgttttaataaagccaggaacattacggtgtgtatcgaattcaaaaactccgacgaagagagcgctaagcctctgaagtgtatctatggcaagccgggtggccctttgtttaccagcgctgcatatactgccgtactccatcacagccagaatcctgacttctcagacgaagtcaagatcgagcttccgactcaacttcatgagaaacatcatatcctgttttcattctaccatgtgacctgtgatatcaatgcaaaggccaatgccaaaaaaaaagaagccctggagactagcgtcggctacgcttggctacccctgatgaagcatgaccaaatagcttctcaagagtacaatattccaatcgccacctctctgccaccaaactatttgtctttccaggatagtgcaagtggcaagcacggtggttccgacataaagtgggttgatggcggaaagcctctgttcaaagtcagtacctttgttgtcagcactgtaaatactcaggatccgcacgtgaatgccttttttcaagaatgccagaagagagaaaaagatatgtcccaaagtccaactagcaattttatccgctcttgcaagaacctgctcaacgtcgaaaaaatacacgcaataatgagcttcttgccaatcatactgaaccagctgttcaaggtgctggtgcagaatgaggaagacgagatcaccaccacggtcactcgtgtgttaaccgatatagttgcgaagtgtcacgaagaacagctagaccacagcgtgcagagttatattaaattcgtgttcaaaaccagagcctgcaaggaacgaaccgtgcacgaagagttggctaagaatgtcaccgggctcctgaagtccaacgattccactactgtgaagcacgtgctgaagcacagctggtttttcttcgctatcattctcaagtctatggctcagcatctgatagatacgaataagatccagttgcctcggccacaaaggttccccgaatcttaccagaacgagttggacaatctggtgatggtgctgtctgatcatgtgatttggaagtacaaggatgctttggaggagactaggcgggcaaaccactccgtagcaagatttctgaagcggtgcttcactttcatggatcgcggatacgtcttcaagatggtgaacaactacatttcaatgttttcatccggcgacctgaaaacactttgccagtacaaattcgatttcctccaggaagtgtgtcaacacgaacactttatcccgttatgtctccccatccggtcagccaatattcccgatcctcttacccctagtgagtccacacaggaactacacgcttcagacatgccagaatatagcgtgactaatgagttttgccggaaacacttcttaattgggatccttcttcgcgaggtcggtttcgcactacaagaggaccaggacgtgcgacacttggctctggccgtgctgaaaaatctcatggctaagcacagcttcgatgacaggtatagagaacctcggaagcaggcccagatagcaagcctgtatatgcccctgtatggtatgctgttggacaatatgcctcgcatctacctgaaagatctctacccattcaccgtgaacacgtcaaatcaaggttctcgcgatgacctgagtacgaacggaggtttccagtctcagaccgccatcaaacacgctaactcagtcgacacaagtttttctaaggatgtgttgaatagtattgccgctttcagtagtatcgcgatttcaacagtgaaccacgcagatagcagagcttcacttgctagtcttgattccaatcccagtactaatgagaagagcagcgaaaagacggataattgtgagaagattcccagaccattatccctgattggttccacgctgagattcgataaacttgatcaggcagaaacccgctctctgctgatgtgtttccttcacattatgaagaccatttcttatgagactctgatcgcttattggcaaagggccccttccccagaggtctctgactttttttctatactggacgtctgtttgcaaaacttccgctacctcggtaaaaggaatattattcgaaagatcgctgcagcatttaagtttgtccagagcactcaaaataacggcacactgaaaggctctaacccttcttgccagacgtctggtctgctctcacagtggatgcactcaacaagctcacatgaggggcacaaacaacaccggagtcagacgctgcccattatcagaggcaagaacgctttatcgaacccaaaattactgcagatgctcgacaacactatgacctcaaactccaatgaaattgacattgtgcaccatgtagatactgaggcaaacatcgccacagaagtgtgtctcaccatcttggatcttctcagcctattcacacaaacccaccagcgtcagcttcaacagtgtgactgtcaaaactccttgatgaagcgcgtgttcgatacgtatatgctgttttttcaagtgaaccagagcgctactgccctgaaacatgtgttcgcctcactgcgattattcgtctgcaagttcccatctgccttctttcaaggaccagcggatttgtgcggtagcttttgctacgaagtgctcaagtgctgcaaccaccgcagtcggtcgacccagaccgaggcaagtgctctcttatacttctttatgaggaaaaactttgagttcaataagcagaagagcatcgtgcgttcccacctgcaactgattaaggccgtgtcacagctcattgccgatgctggaatcgggggtagcagattccagcacagcctggccatcaccaacaacttcgctaatggcgacaaacagatgaagaactcgaattttcccgctgaagtgaaggacctgactaaacggatacgcaccgtcctgatggctaccgcccagatgaaagagcacgaaaaggacccagaaatgctggtggacctgcagtacagcctggcaaatagctatgcttctactccagagctgcggaggacatggctggaaagtatggcaaaaatccatgcccgtaatggcgacctgagcgaggccgctatgtgttacatccacatcgcggcactgatcgcggagtacctgaagaggaagggatactggaaagttgagaaaatttgtactgcttccctcttaagcgaggacactcatccgtgtgacagcaatagccttctgactacaccgagtggaggatccatgttctcgatgggctggcctgcctttctttctatcacccccaacatcaaggaggagggggcaatgaaagaggactcaggtatgcaagatactccctataacgagaacattttagtggagcaattatacatgtgcgtggagtttctttggaagtccgaacgctacgagttgattgccgatgtgaataagcctattatagcagttttcgagaaacagcgagatttcaaaaagctcagcgatctgtactacgatattcatagaagttacctcaaagtggccgaagtggtcaattctgagaaaaggctctttggacggtactaccgcgtcgcattttacggccaggggttcttcgaagaagaagagggaaaggaatacatctataaagagcccaaactcaccgggctctctgagatctcccaacgacttcttaaattgtatgcagataagtttggggctgacaatgtgaagataattcaggatagtaataaggtcaatcccaaggatcttgacccgaagtatgcctacatacaggtgacatacgtgacaccattcttcgaggaaaaagaaattgaagaccgcaagactgacttcgagatgcatcataatatcaaccggtttgtcttcgaaactccttttacgctcagcggaaagaaacatgggggagtagcagagcagtgcaaaaggaggaccatcctcactacatctcacctttttccttacgtgaaaaaacgcattcaggtgatttcgcagtcctcaacggagctgaatcctattgaggtggcgattgacgagatgagtaaaaaggtttccgaactgaatcagctctgcactatggaagaggttgacatgatcagactgcagcttaagctgcaaggcagtgtctcagttaaggtaaatgcagggcctatggcatacgcaagagccttcttggaagaaaccaatgccaaaaaatacccagacaatcaggtgaagctgcttaaggaaatcttccgtcaatttgcagacgcttgcggccaggcgctggacgtgaacgaacggctaatcaaggaggaccagctggagtatcaggaagagctgcgctcgcactacaaggacatgctgtccgagctgtcgaccgttatgaatgaacagattacaggccgtgacgatttatccaagcggggagtagaccagacatgtaccagagtgatcagcaaagccacgcccgcactgcctacggtgtctatttcgtcctctgccgaagtgta

SEQ ID NO: 109215 - DNA, 6543 bp, Artificial Sequence
  derived and/or modified sequence
atgagcttcagaggcaaggtgttcaagagagagcccagcgagttctggaagaagagaagaaccgtgagaagagtgaaccaggaggagatccacagattcagcagccaggagaagcccagactgctggagcccctggactacgagaccgtgatcgaggagctggagaagacctacagaaacgaccccctgcaggacctgctgttcttccccagcgacgacttcagcgccgccaccgtgagctgggacatcagaaccctgtacagcaccgtgcccgaggacgccgagcacaaggccgagaacctgctggtgaaggaggcctgcaagttctacagcagccagtggcacgtggtgaactacaagtacgagcagtacagcggcgacatcagacagctgcccagagccgagtacaagcccgagaagctgcccagccacagcttcgagatcgaccacgaggacgccgacaaggacgaggacaccaccagccacagcagcagcaagggcggcggcggcgccggcggcaccggcgtgttcaagagcggctggctgtacaagggcaacttcaacagcaccgtgaacaacaccgtgaccgtgagaagcttcaagaagagatacttccagctgacccagctgcccgacaacagctacatcatgaacttctacaaggacgagaagatcagcaaggagcccaagggctgcatcttcctggacagctgcaccggcgtggtgcagaacaacagactgagaaagtacgccttcgagctgaagatgaacgacctgacctacttcgtgctggccgccgagaccgagagcgacatggacgagtggatccacaccctgaacagaatcctgcagatcagccccgagggccccctgcagggcagaagaagcaccgagctgaccgacctgggcctggacagcctggacaacagcgtgacctgcgagtgcacccccgaggagaccgacagcagcgagaacaacctgcacgccgacttcgccaagtacctgaccgagaccgaggacaccgtgaagaccaccagaaacatggagagactgaacctgttcagcctggaccccgacatcgacaccctgaagctgcagaagaaggacctgctggagcccgagagcgtgatcaagcccttcgaggagaaggccgccaagagaatcatgatcatctgcaaggccctgaacagcaacctgcagggctgcgtgaccgagaacgagaacgaccccatcaccaacatcgagcccttcttcgtgagcgtggccctgtacgacctgagagacagcagaaagatcagcgccgacttccacgtggacctgaaccacgccgccgtgagacagatgctgctgggcgccagcgtggccctggagaacggcaacatcgacaccatcacccccagacagagcgaggagccccacatcaagggcctgcccgaggagtggctgaagttccccaagcaggccgtgttcagcgtgagcaacccccacagcgagatcgtgctggtggccaagatcgagaaggtgctgatgggcaacatcgccagcggcgccgagccctacatcaagaaccccgacagcaacaagtacgcccagaagatcctgaagagcaacagacagttctgcagcaagctgggcaagtacagaatgcccttcgcctgggccgtgagaagcgtgttcaaggacaaccagggcaacgtggacagagacagcagattcagccccctgttcagacaggagagcagcaagatcagcaccgaggacctggtgaagctggtgagcgactacagaagagccgacagaatcagcaagatgcagaccatccccggcagcctggacatcgccgtggacaacgtgcccctggagcaccccaactgcgtgaccagcagcttcatccccgtgaagcccttcaacatgatggcccagaccgagcccaccgtggaggtggaggagttcgtgtacgacagcaccaagtactgcagaccctacagagtgtacaagaaccagatctacatctaccccaagcacctgaagtacgacagccagaagtgcttcaacaaggccagaaacatcaccgtgtgcatcgagttcaagaacagcgacgaggagagcgccaagcccctgaagtgcatctacggcaagcccggcggccccctgttcaccagcgccgcctacaccgccgtgctgcaccacagccagaaccccgacttcagcgacgaggtgaagatcgagctgcccacccagctgcacgagaagcaccacatcctgttcagcttctaccacgtgacctgcgacatcaacgccaaggccaacgccaagaagaaggaggccctggagaccagcgtgggctacgcctggctgcccctgatgaagcacgaccagatcgccagccaggagtacaacatccccatcgccaccagcctgccccccaactacctgagcttccaggacagcgccagcggcaagcacggcggcagcgacatcaagtgggtggacggcggcaagcccctgttcaaggtgagcaccttcgtggtgagcaccgtgaacacccaggacccccacgtgaacgccttcttccaggagtgccagaagagagagaaggacatgagccagagccccaccagcaacttcatcagaagctgcaagaacctgctgaacgtggagaagatccacgccatcatgagcttcctgcccatcatcctgaaccagctgttcaaggtgctggtgcagaacgaggaggacgagatcaccaccaccgtgaccagagtgctgaccgacatcgtggccaagtgccacgaggagcagctggaccacagcgtgcagagctacatcaagttcgtgttcaagaccagagcctgcaaggagagaaccgtgcacgaggagctggccaagaacgtgaccggcctgctgaagagcaacgacagcaccaccgtgaagcacgtgctgaagcacagctggttcttcttcgccatcatcctgaagagcatggcccagcacctgatcgacaccaacaagatccagctgcccagaccccagagattccccgagagctaccagaacgagctggacaacctggtgatggtgctgagcgaccacgtgatctggaagtacaaggacgccctggaggagaccagaagagccaaccacagcgtggccagattcctgaagagatgcttcaccttcatggacagaggctacgtgttcaagatggtgaacaactacatcagcatgttcagcagcggcgacctgaagaccctgtgccagtacaagttcgacttcctgcaggaggtgtgccagcacgagcacttcatccccctgtgcctgcccatcagaagcgccaacatccccgaccccctgacccccagcgagagcacccaggagctgcacgccagcgacatgcccgagtacagcgtgaccaacgagttctgcagaaagcacttcctgatcggcatcctgctgagagaggtgggcttcgccctgcaggaggaccaggacgtgagacacctggccctggccgtgctgaagaacctgatggccaagcacagcttcgacgacagatacagagagcccagaaagcaggcccagatcgccagcctgtacatgcccctgtacggcatgctgctggacaacatgcccagaatctacctgaaggacctgtaccccttcaccgtgaacaccagcaaccagggcagcagagacgacctgagcaccaacggcggcttccagagccagaccgccatcaagcacgccaacagcgtggacaccagcttcagcaaggacgtgctgaacagcatcgccgccttcagcagcatcgccatcagcaccgtgaaccacgccgacagcagagccagcctggccagcctggacagcaaccccagcaccaacgagaagagcagcgagaagaccgacaactgcgagaagatccccagacccctgagcctgatcggcagcaccctgagattcgacaagctggaccaggccgagaccagaagcctgctgatgtgcttcctgcacatcatgaagaccatcagctacgagaccctgatcgcctactggcagagagcccccagccccgaggtgagcgacttcttcagcatcctggacgtgtgcctgcagaacttcagatacctgggcaagagaaacatcatcagaaagatcgccgccgccttcaagttcgtgcagagcacccagaacaacggcaccctgaagggcagcaaccccagctgccagaccagcggcctgctgagccagtggatgcacagcaccagcagccacgagggccacaagcagcacagaagccagaccctgcccatcatcagaggcaagaacgccctgagcaaccccaagctgctgcagatgctggacaacaccatgaccagcaacagcaacgagatcgacatcgtgcaccacgtggacaccgaggccaacatcgccaccgaggtgtgcctgaccatcctggacctgctgagcctgttcacccagacccaccagagacagctgcagcagtgcgactgccagaacagcctgatgaagagagtgttcgacacctacatgctgttcttccaggtgaaccagagcgccaccgccctgaagcacgtgttcgccagcctgagactgttcgtgtgcaagttccccagcgccttcttccagggccccgccgacctgtgcggcagcttctgctacgaggtgctgaagtgctgcaaccacagaagcagaagcacccagaccgaggccagcgccctgctgtacttcttcatgagaaagaacttcgagttcaacaagcagaagagcatcgtgagaagccacctgcagctgatcaaggccgtgagccagctgatcgccgacgccggcatcggcggcagcagattccagcacagcctggccatcaccaacaacttcgccaacggcgacaagcagatgaagaacagcaacttccccgccgaggtgaaggacctgaccaagagaatcagaaccgtgctgatggccaccgcccagatgaaggagcacgagaaggaccccgagatgctggtggacctgcagtacagcctggccaacagctacgccagcacccccgagctgagaagaacctggctggagagcatggccaagatccacgccagaaacggcgacctgagcgaggccgccatgtgctacatccacatcgccgccctgatcgccgagtacctgaagagaaagggctactggaaggtggagaagatctgcaccgccagcctgctgagcgaggacacccacccctgcgacagcaacagcctgctgaccacccccagcggcggcagcatgttcagcatgggctggcccgccttcctgagcatcacccccaacatcaaggaggagggcgccatgaaggaggacagcggcatgcaggacaccccctacaacgagaacatcctggtggagcagctgtacatgtgcgtggagttcctgtggaagagcgagagatacgagctgatcgccgacgtgaacaagcccatcatcgccgtgttcgagaagcagagagacttcaagaagctgagcgacctgtactacgacatccacagaagctacctgaaggtggccgaggtggtgaacagcgagaagagactgttcggcagatactacagagtggccttctacggccagggcttcttcgaggaggaggagggcaaggagtacatctacaaggagcccaagctgaccggcctgagcgagatcagccagagactgctgaagctgtacgccgacaagttcggcgccgacaacgtgaagatcatccaggacagcaacaaggtgaaccccaaggacctggaccccaagtacgcctacatccaggtgacctacgtgacccccttcttcgaggagaaggagatcgaggacagaaagaccgacttcgagatgcaccacaacatcaacagattcgtgttcgagacccccttcaccctgagcggcaagaagcacggcggcgtggccgagcagtgcaagagaagaaccatcctgaccaccagccacctgttcccctacgtgaagaagagaatccaggtgatcagccagagcagcaccgagctgaaccccatcgaggtggccatcgacgagatgagcaagaaggtgagcgagctgaaccagctgtgcaccatggaggaggtggacatgatcagactgcagctgaagctgcagggcagcgtgagcgtgaaggtgaacgccggccccatggcctacgccagagccttcctggaggagaccaacgccaagaagtaccccgacaaccaggtgaagctgctgaaggagatcttcagacagttcgccgacgcctgcggccaggccctggacgtgaacgagagactgatcaaggaggaccagctggagtaccaggaggagctgagaagccactacaaggacatgctgagcgagctgagcaccgtgatgaacgagcagatcaccggcagagacgacctgagcaagagaggcgtggaccagacctgcaccagagtgatcagcaaggccacccccgccctgcccaccgtgagcatcagcagcagcgccgaggtgtag

SEQ ID NO: 109216 - DNA, 7288 bp, Artificial Sequence
  derived and/or modified sequence
atttccctttttaccaagaagaaagatttgttcagcctggtgacgcttcagaagagaagagtttaacgacattgatattttgaaatattttgtgactcaaattatagcaatacgatgagttttcgagggaaggtttttaaacgggagcccagtgaattttggaagaagagacgaactgtgaggagagtaaaccaagaagaaatccacagatttagttctcaagaaaagcctaggcttctcgagcctttggattatgagactgtcattgaagaacttgaaaagacctaccggaatgatcctcttcaagatctcttgttcttccccagtgatgacttttcagcagccacagtttcctgggatatccgcacgttgtactcaacagtacctgaagatgcagagcacaaggcagaaaatttactggttaaggaggcttgtaaattttatagttcccagtggcatgtggtaaactacaaatatgaacaatattctggagacattcgacagctaccccgagcagaatacaaaccagagaagcttccttcacattcctttgagattgaccatgaagatgctgataaggatgaagataccacttcccactcgtcttccaaggggggtggaggagcgggaggaactggtgttttcaagtccggctggctctacaaggggaattttaacagcaccgtgaacaacaccgttactgttcggtcattcaaaaagcgctacttccagctgactcagttaccagataactcctacattatgaacttttacaaagatgagaaaatatccaaagaacccaaaggatgcatctttttggattcctgtacaggagtggtgcagaataacagactaagaaaatatgcctttgaattgaaaatgaatgatctgacctattttgtgctggcagctgaaacagagtcagatatggatgaatggatccacaccctcaaccgcattctgcaaatcagtcctgaggggcccctccaagggaggaggagcacagagctcactgatctgggtctggattcgctggataattctgtaacttgtgaatgcacgccagaggaaacagattcttcagagaacaacctacacgcagactttgcaaagtacctcacagaaacagaagatactgtaaaaacaactcgaaacatggagaggctaaatctgttctctctagatccagacatagataccttgaaacttcaaaaaaaagatctcttggaacctgagtctgtgatcaaaccatttgaagaaaaagctgccaagagaatcatgatcatctgtaaagccctcaactcaaatcttcagggatgtgttacggagaatgaaaatgatccgataacgaatattgagcctttttttgtgagtgtggcactttatgacctcagagacagcaggaagatttctgctgattttcatgtggatctaaaccatgctgctgtcagacagatgctcttgggggcttctgtggctttggaaaatggcaacatcgacaccatcactccaagacaatcagaagaacctcacatcaagggacttccagaggaatggctaaaatttccaaagcaggctgtattttctgtaagcaatccacattctgaaattgttttggtggccaaaatcgaaaaagtcttgatgggaaacattgcaagtggtgccgaaccttatattaagaacccagactccaacaagtatgcacaaaagatactaaaatccaacagacaattctgcagcaaattgggaaaataccgtatgccttttgcttgggcagtaagatcagtatttaaggacaaccagggaaatgtggacagagactcaagattttcaccattgtttagacaagaaagtagcaagatttcaactgaggacctagttaaactagtatcagattatagaagggccgacagaataagcaaaatgcagaccattcctggaagcctggatattgctgttgacaacgttcccttggagcatccaaattgtgtaacatcgtcctttatccctgtcaagcctttcaacatgatggctcaaacagaacccacagtggaggtggaagaatttgtttacgattcaacaaagtattgtcggccttacagagtatataaaaatcaaatttatatttaccccaaacacctcaagtatgatagccagaaatgcttcaacaaggcacggaatataactgtgtgcattgaattcaaaaattcagatgaagaaagtgccaagcccctgaagtgtatttatggaaaacctggagggcccctcttcacctcagccgcctacacagcagttctgcaccactctcagaatccggatttctcagatgaggtgaaaattgagctaccaacacaactccatgagaaacaccatattttgttttctttttatcacgtcacctgtgacatcaatgcaaaagctaatgccaaaaagaaggaggctctggaaacgtcagttggatatgcttggcttcctctgatgaaacacgatcagatagcttctcaagagtacaacatcccaatagcaacaagtctgcctcctaattatttaagctttcaagattctgcaagtggaaagcatggtgggagtgacattaaatgggttgatggtggcaaaccacttttcaaagtgtcgacatttgttgtatcaacagtaaatactcaggatccacatgtgaatgcatttttccaagagtgccaaaaaagagagaaagatatgtctcagtcacctacctcaaatttcatccgctcttgtaagaacttattgaatgtggaaaagattcatgcaatcatgagttttctgcctataattttgaatcagctcttcaaagttctggtacagaatgaggaagatgaaataactacaactgtcaccagggttctgaccgacattgtggccaagtgccatgaggagcagctggatcattctgtccagtcatatattaagttcgtgttcaagaccagggcatgcaaggagaggactgtacatgaggaactggctaaaaatgtgactggtcttttgaaatcaaatgactcaacaacagtaaagcatgtcctaaagcattcctggttcttctttgcaattatcctaaaatcgatggcacagcacttgattgacacaaataaaatccagcttccccggcctcagagatttcctgaatcttaccaaaatgaattggacaatcttgtcatggtcctatccgaccatgtgatttggaaatacaaggatgcacttgaagaaacaagaagggcaaaccacagcgttgccagatttctcaagcgctgctttacatttatggaccgagggtatgtgtttaagatggtcaacaattacatcagcatgttctcctccggtgaccttaagaccttgtgccagtataaatttgattttcttcaagaagtatgtcaacatgaacactttatccctttgtgtctgcccataagatcagcaaacattccagatcctttgacaccttcagaatcgactcaagagttacatgcatcagatatgcctgaatattcagtcacaaatgaattttgtcgcaaacacttcttaatcggaattctgctccgagaagttggctttgccctgcaggaagaccaagatgtcagacacttagctttagctgtcctaaaaaatctaatggctaagcattcatttgatgatcgatacagagagccaagaaagcaggcccagatagcaagtttatacatgcccctgtacggcatgctcctggacaatatgccaaggatttatctgaaggacctgtatccttttactgtcaatacatctaatcaggggtctagagatgatctaagcaccaatggaggatttcaaagccagacagctatcaaacatgcaaactctgtggatacatcattttctaaagatgttttaaattccatagcagcattttcatcaatagctatttctacagtaaaccatgctgactccagagcatctttagcaagtcttgactccaatccaagtaccaatgagaagagcagtgagaagacggacaactgtgaaaagatcccaagacccttgtctttgattggctcaactcttcgatttgacaagttagatcaagcagaaaccaggagtctcctgatgtgttttcttcacattatgaaaacgatttcgtacgagactctgattgcctactggcagagagctcccagcccagaggtgtccgacttcttcagcatcttggacgtttgtcttcaaaatttcagatacctaggaaaacgcaacataataagaaaaattgctgctgcatttaaatttgtgcagtccacccagaacaatggaactctcaaaggatccaatccttcctgccagacatcaggtctcttgtcacaatggatgcactccacttccagtcatgaaggccataagcagcacagatcacaaactttacctataattcgaggcaaaaatgcactttctaaccccaaactcttacagatgttagacaataccatgaccagcaactccaatgaaatagacatcgtgcatcatgtagacactgaggccaatatagctacggaggtttgcctcactattctggacctgttatccctcttcacacagactcatcagagacaactccaacaatgtgactgtcaaaattcattgatgaaaagggtctttgatacctacatgctctttttccaagtcaatcagtcagccacagcgctgaagcatgtgtttgcctccttgagactgtttgtatgcaagtttccttcagcgttctttcaagggcctgctgacctctgtggatcattctgttacgaagtcctaaaatgctgtaaccacaggtcacggtcaactcagacagaagcctcagcccttctgtactttttcatgaggaagaattttgaatttaacaagcagaagtcaattgtccggtcccacttacaactcatcaaagctgtgagccagttaatagccgatgctgggattggaggctctcggtttcaacattcgcttgcaattaccaataatttcgccaatggagataagcaaatgaaaaacagcaatttcccagcagaggtgaaggacctgactaagcgtataaggactgttttgatggccacagctcagatgaaggagcacgagaaggaccccgagatgctggtggatctccagtacagcctggcaaactcctacgcaagcactcctgaactacgcaggacctggctggaaagtatggccaagattcatgccagaaacggagatttatctgaggctgccatgtgttacatccatattgctgctctcattgcagagtatctgaaaagaaagggttactggaaagtggaaaagatttgcacagcatccctgctctcggaggatacccacccctgtgatagcaactcattactaacaactcccagtggaggaagcatgttctctatgggatggccagcttttttgagcattacaccaaacattaaggaagaaggagcgatgaaagaggattctggaatgcaagatacaccatacaatgagaatatcctggtggagcagctatacatgtgtgtggagtttctctggaagtctgagcgatatgaactcattgctgatgtcaacaagcccatcattgctgtctttgagaaacaacgagacttcaaaaaattgtcagatctctactacgacattcatcggtcatatctgaaagtggcagaggtggtgaattcggagaagcggctgtttggtcgctactatcgtgtggcattttatgggcagggcttttttgaagaagaagaaggtaaagagtatatttataaagagcctaagctgacaggtctgtccgagatttcccaaagattactcaagctctatgcagataaatttggagcagacaatgtgaagataatccaggattccaacaaggtaaaccccaaggatttggaccccaaatatgcctacatccaggtgacctatgtgacgccgttctttgaggaaaaggaaatcgaagaccggaagacagatttcgaaatgcaccacaacatcaaccgctttgtcttcgagacacccttcacgctgtcgggcaagaagcacggtggggtggcggagcagtgcaagcggcggacgatcctgacaacgagtcacctgttcccctacgtgaagaagagaatacaagtaattagccaatcgagcacagaactgaatccaattgaagtggcaattgacgagatgtccaagaaggtttctgagcttaatcagctttgcacaatggaagaagtggacatgatcagactgcagctcaaactgcaaggaagtgtcagcgtgaaggttaatgctgggccaatggcctatgcacgagcttttcttgaagaaaccaatgcaaagaagtaccctgacaaccaagtaaagcttttgaaggagatcttcaggcaatttgcagatgcatgtgggcaggcccttgacgtgaatgagcgcctcatcaaagaggaccagctggagtaccaggaagaactgaggtcccactacaaggacatgctcagcgaactctccacagtcatgaatgagcagattacgggcagggacgacctgtcaaagcgcggagtggaccaaacctgcactcgagtaattagcaaagcaactccggccctacccacggtctccatctcatctagtgctgaagtctgagggctctgcagcatcagacccacctctaagagaactttctgaatttgcagctaatctcggggaagagaaagataggtttaatttatttgaagttttcatggtgttaatatttttgtttacctcgctagcttcagaattttgccaacctctgaatttgcacattttgtataatttttttttctttgagcagtgttgatcaagccaggttgaatatttgccatgaaattccagtgaatgtgtagctcaaatgcaaaccctaagtttgctgtcagttattgtatggtcagtaccccagtcctagtacacatattttaaaggttaaagtgaatgtttttgtaacatttaagcatatttcagatgtaaataaaagattgtaaaatatacggtttttaccaaatttaaaagatcctttttagttaatactatgacagtactaaaaatatatgaataacatttcagataccattatattaaaatatttgtgtatgtgtacaaaagcgttgataaatactaatctttaaagtttgtggagttcctttatttgtaatatatgtgctcttaaaagcaatgggatgtgaaattatgaaagtattttattgttcatagaaataaaaaacacagttactttgca

SEQ ID NO: 109217 - DNA, 720 bp, Artificial Sequence
  derived and/or modified sequence
atgcccgagagcgcctggaagttcctgttctacctgggcagctggagctacagcgcctacctgctgttcggcaccgactaccccttcttccacgacccccccagcgtgttctacgactggacccccggcatggccgtgcccagagacatcgccgccgcctacctgctgcagggcagcttctacggccacagcatctacgccaccctgtacatggacacctggagaaaggacagcgtggtgatgctgctgcaccacgtggtgaccctgatcctgatcgtgagcagctacgccttcagataccacaacgtgggcatcctggtgctgttcctgcacgacatcagcgacgtgcagctggagttcaccaagctgaacatctacttcaagagcagaggcggcagctaccacagactgcacgccctggccgccgacctgggctgcctgagcttcggcttcagctggttctggttcagactgtactggttccccctgaaggtgctgtacgccaccagccactgcagcctgagaaccgtgcccgacatccccttctacttcttcttcaacgccctgctgctgctgctgaccctgatgaacctgtactggttcctgtacatcgtggccttcgccgccaaggtgctgaccggccaggtgcacgagctgaaggacctgagagagtacgacaccgccgaggcccagagcctgaagcccagcaaggccgagtag

SEQ ID NO: 109218 - DNA, 720 bp, Artificial Sequence
  derived and/or modified sequence
atgccggaatcagcctggaagtttctgttctatttgggctcctggtcttacagtgcttacttactgttcggcacagattatccgttttttcacgaccccccatctgttttctacgactggacaccgggaatggctgtgcccagagacattgccgccgcctacctcttacaagggagcttctatggccacagcatatacgcaactctgtatatggatacatggagaaaagacagtgtggtgatgttactgcatcacgtggtgactctgattttgatcgtgtctagctatgcttttcgataccataatgtcggtatcctggttctatttctgcacgacattagtgacgtccaactagagtttacgaaactaaacatctacttcaaatccagggggggaagttaccaccgcctgcatgccctggcggccgacctcggttgcttgtcatttggattctcctggttctggttccggctatactggttccccctgaaggtcttatacgctacctcccattgctctctgaggaccgtgcctgacatccccttttacttcttctttaatgccctcctcctgttattaacactgatgaacttgtactggtttctgtacatcgtggcctttgccgccaaagtacttacaggccaggtgcatgaattgaaagacctgagagagtacgataccgccgaagcgcagtctctgaaaccttctaaggcggagtag

SEQ ID NO: 109219 - DNA, 720 bp, Artificial Sequence
  derived and/or modified sequence
atgcctgagagcgcctggaagttcctgttctacctgggctcctggagctacagcgcctacctgctgtttggaacagactaccccttcttccatgaccccccatctgtgttctatgactggaccccaggcatggctgtgccccgggacattgctgctgcctacctgctgcagggcagcttctacggccacagcatctatgccaccctgtacatggacacctggaggaaggacagcgtggtgatgctgctgcaccacgtggtgaccctcatcctgattgtgtcctcctatgccttccgctaccacaacgtgggcatcctggtgctcttcctgcatgacatcagtgatgtgcagctggagttcaccaagctgaacatctacttcaagagcagaggaggcagctaccaccggctgcacgccctggccgctgacctgggctgcctgagctttggcttctcctggttctggttccggctgtactggttccccctgaaggtgctgtatgccaccagccactgcagcctgaggacagtgcctgacatccccttctacttcttcttcaatgccctgctgctgctgctgaccctgatgaacctgtactggttcctgtacatcgtggcctttgctgccaaggtgctgaccggccaggtgcatgagctgaaggacctgcgggagtatgacacagctgaggcccagagcctgaagcccagcaaggccgagtag

SEQ ID NO: 109220 - DNA, 720 bp, Artificial Sequence
  derived and/or modified sequence
atgcccgagagcgcctggaagttcctgttctacctgggcagctggtcctatagcgcttatctactttttgggacagactatccattctttcacgaccctccatcagttttttacgattggacccctgggatggcggtgccaagagacatcgcagctgcttatcttcttcagggaagcttctatggtcacagtatttacgcgaccctgtatatggatacctggcgaaaggatagcgtggtgatgctcctgcaccatgtcgtgaccctcattctcatcgtgtccagctatgcatttaggtaccacaacgtgggcatactggtactgttcctgcatgacataagcgacgtgcagctggaattcaccaagctgaacatctatttcaagagtcggggggggtcctatcaccgcttacatgccctggccgcagacctgggctgtctaagtttcgggttcagttggttttggttcaggttatactggtttccgcttaaagttctctacgctactagtcattgttcactccgaactgtgccggatattccattctatttcttttttaacgcattgctgttgcttctgaccttaatgaatctttactggttcctatacatcgtcgccttcgcggctaaagtgctgactggccaggtgcatgagctgaaagatctccgcgagtacgatacagcagaagcccagtccttaaaaccttccaaggccgagtag

SEQ ID NO: 109221 - DNA, 720 bp, Artificial Sequence
  derived and/or modified sequence
atgccagagtctgcttggaagttcctattctacctgggaagctggagttactcggcctaccttctcttcggcaccgattacccattttttcacgatccgccttctgtcttttatgattggacccctggaatggcagtgcctcgcgacattgccgctgcttatctcctgcaaggatctttttatggacactctatttatgcaactttgtatatggacacctggagaaaagactcagttgttatgttactccaccacgtcgtcacactgatccttatcgtcagtagctatgctttccgttaccataatgttggcattctggttttgttcctgcacgatatctctgacgtgcagctcgagtttacaaagctgaacatctatttcaagtcccgcggaggaagctatcacaggctgcacgcattggccgcagatttaggatgtctgtccttcggcttctcatggttctggtttaggctgtattggttccctctgaaagtactgtatgctacgagccactgctctctgagaacagtgcccgatattcccttttactttttttttaatgccctgttactgctgttgacgctgatgaatctttactggtttctttatatcgttgcatttgctgccaaagttctgaccggtcaggtacatgagttaaaggacctgagggagtacgacaccgccgaagcccagagcctcaagccttctaaagcagaatag

SEQ ID NO: 109222 - DNA, 2775 bp, Artificial Sequence
  derived and/or modified sequence
gtgacagaagtagtaggaagtgagctgttcagaggcaggagggtctattctttgccaaaggggggaccagaattcccccatgcgagctgtttgaggactgggatgccgagaacgcgagcgatccgagcagggtttgtctgggcaccgtcggggtaggatccggaacgcattcggaaggctttttgcaagcatttacttggaaggagaacttgggatctttctgggaaccccccgccccggctggattggccgagcaagcctggaaaatgcaattgaaacacagagcaccagctctgaggaactcgtcccaagccccccatctccacttcctccccctcgagtgtacaaaccctgcttcgtctgccaggacaaatcatcagggtaccactatggggtcagcgcctgtgagggatgtaagggctttttccgcagaagtattcagaagaatatgatttacacttgtcaccgagataagaactgtgttattaataaagtcaccaggaatcgatgccaatactgtcgactccagaagtgctttgaagtgggaatgtccaaagaatctgtcaggaatgacaggaacaagaaaaagaaggagacttcgaagcaagaatgcacagagagctatgaaatgacagctgagttggacgatctcacagagaagatccgaaaagctcaccaggaaactttcccttcactctgccagctgggtaaatacaccacgaattccagtgctgaccatcgagtccgactggacctgggcctctgggacaaattcagtgaactggccaccaagtgcattattaagatcgtggagtttgctaaacgtctgcctggtttcactggcttgaccatcgcagaccaaattaccctgctgaaggccgcctgcctggacatcctgattcttagaatttgcaccaggtataccccagaacaagacaccatgactttctcagacggccttaccctaaatcgaactcagatgcacaatgctggatttggtcctctgactgaccttgtgttcacctttgccaaccagctcctgcctttggaaatggatgacacagaaacaggccttctcagtgccatctgcttaatctgtggagaccgccaggaccttgaggaaccgacaaaagtagataagctacaagaaccattgctggaagcactaaaaatttatatcagaaaaagacgacccagcaagcctcacatgtttccaaagatcttaatgaaaatcacagatctccgtagcatcagtgctaaaggtgcagagcgtgtaattaccttgaaaatggaaattcctggatcaatgccacctctcattcaagaaatgctggagaattctgaaggacatgaacccttgaccccaagttcaagtgggaacacagcagagcacagtcctagcatctcacccagctcagtggaaaacagtggggtcagtcagtcaccactcgtgcaataagacattttctagctacttcaaacattccccagtaccttcagttccaggatttaaaatgcaagaaaaaacatttttactgctgcttagtttttggactgaaaagatattaaaactcaagaaggaccaagaagttttcatatgtatcaatatatatactcctcactgtgtaacttacctagaaatacaaacttttccaattttaaaaaatcagccatttcatgcaaccagaaactagttaaaagcttctattttcctctttgaacactcaagattgcatggcaaagacccagtcaaaatgatttacccctggttaagtttctgaagactttgtacatacagaagtatggctctgttctttctatactgtatgtttggtgctttccttttgtcttgcatactcaaaataaccatgacaccaaggttatgaaatagactactgtacacgtctacctaggttcaaaaagataactgtcttgctttcatggaatagtcaagacatcaaggtaaggaaacaggactattgacaggactattgtacagtatgacaagataaggctgaagatattctactttagttagtatggaagcttgtctttgctctttctgatgctctcaaactgcatcttttatttcatgttgcccagtaaaagtatacaaattccctgcactagcagaagagaattctgtatcagtgtaactgccagttcagttaatcaaatgtcatttgttcaattgttaatgtcactttaaattaaaagtggtttattacttgtttaatgacataactacacagttagttaaaaaaaatttttttacagtaatgatagcctccaaggcagaaacacttttcagtgttaagtttttgtttacttgttcacaagccattagggaaatttcatgggataattagcaggctggtctaccacctggaccatgtaactctagtgtccttcctgattcatgcctgatattgggatttttttttccagccttcttgatgccaaggggctaattaatattaacaactcccaaagaaacaggcatagaatctgcctcctttgaccttgttcaatcactatgaagcagagtgaaagctgtggtagagtggttaacagatacaagtgtcagtttcttagttctcatttaagcactagtggaattttttttttttgatatattagcaagtctgtgatgtactttcactggctctgtttgtacattgagattgtttgtttaacaatgctttctatgttcatatactgtttacctttttccatggagtctcctggcaaagaataaaatatatttattttaaa

SEQ ID NO: 109223 - DNA, 2590 bp, Artificial Sequence
  derived and/or modified sequence
agacaaacccaaaacatttatgtgcatagaaaaaaattctggaaggtcgtacacagtgaatttctctgagtgaaaagattgtggcaattgaaacacagagcaccagctctgaggaactcgtcccaagccccccatctccacttcctccccctcgagtgtacaaaccctgcttcgtctgccaggacaaatcatcagggtaccactatggggtcagcgcctgtgagggatgtaagggctttttccgcagaagtattcagaagaatatgatttacacttgtcaccgagataagaactgtgttattaataaagtcaccaggaatcgatgccaatactgtcgactccagaagtgctttgaagtgggaatgtccaaagaatctgtcaggaatgacaggaacaagaaaaagaaggagacttcgaagcaagaatgcacagagagctatgaaatgacagctgagttggacgatctcacagagaagatccgaaaagctcaccaggaaactttcccttcactctgccagctgggtaaatacaccacgaattccagtgctgaccatcgagtccgactggacctgggcctctgggacaaattcagtgaactggccaccaagtgcattattaagatcgtggagtttgctaaacgtctgcctggtttcactggcttgaccatcgcagaccaaattaccctgctgaaggccgcctgcctggacatcctgattcttagaatttgcaccaggtataccccagaacaagacaccatgactttctcagacggccttaccctaaatcgaactcagatgcacaatgctggatttggtcctctgactgaccttgtgttcacctttgccaaccagctcctgcctttggaaatggatgacacagaaacaggccttctcagtgccatctgcttaatctgtggagaccgccaggaccttgaggaaccgacaaaagtagataagctacaagaaccattgctggaagcactaaaaatttatatcagaaaaagacgacccagcaagcctcacatgtttccaaagatcttaatgaaaatcacagatctccgtagcatcagtgctaaaggtgcagagcgtgtaattaccttgaaaatggaaattcctggatcaatgccacctctcattcaagaaatgctggagaattctgaaggacatgaacccttgaccccaagttcaagtgggaacacagcagagcacagtcctagcatctcacccagctcagtggaaaacagtggggtcagtcagtcaccactcgtgcaataagacattttctagctacttcaaacattccccagtaccttcagttccaggatttaaaatgcaagaaaaaacatttttactgctgcttagtttttggactgaaaagatattaaaactcaagaaggaccaagaagttttcatatgtatcaatatatatactcctcactgtgtaacttacctagaaatacaaacttttccaattttaaaaaatcagccatttcatgcaaccagaaactagttaaaagcttctattttcctctttgaacactcaagattgcatggcaaagacccagtcaaaatgatttacccctggttaagtttctgaagactttgtacatacagaagtatggctctgttctttctatactgtatgtttggtgctttccttttgtcttgcatactcaaaataaccatgacaccaaggttatgaaatagactactgtacacgtctacctaggttcaaaaagataactgtcttgctttcatggaatagtcaagacatcaaggtaaggaaacaggactattgacaggactattgtacagtatgacaagataaggctgaagatattctactttagttagtatggaagcttgtctttgctctttctgatgctctcaaactgcatcttttatttcatgttgcccagtaaaagtatacaaattccctgcactagcagaagagaattctgtatcagtgtaactgccagttcagttaatcaaatgtcatttgttcaattgttaatgtcactttaaattaaaagtggtttattacttgtttaatgacataactacacagttagttaaaaaaaatttttttacagtaatgatagcctccaaggcagaaacacttttcagtgttaagtttttgtttacttgttcacaagccattagggaaatttcatgggataattagcaggctggtctaccacctggaccatgtaactctagtgtccttcctgattcatgcctgatattgggatttttttttccagccttcttgatgccaaggggctaattaatattaacaactcccaaagaaacaggcatagaatctgcctcctttgaccttgttcaatcactatgaagcagagtgaaagctgtggtagagtggttaacagatacaagtgtcagtttcttagttctcatttaagcactagtggaattttttttttttgatatattagcaagtctgtgatgtactttcactggctctgtttgtacattgagattgtttgtttaacaatgctttctatgttcatatactgtttacctttttccatggagtctcctggcaaagaataaaatatatttattttaaa

SEQ ID NO: 109224 - protein, 336 aa, Artificial Sequence
  derived and/or modified sequence
MIYTCHRDKNCVINKVTRNRCQYCRLQKCFEVGMSKESVRNDRNKKKKETSKQECTESYEMTAELDDLTEKIRKAHQETFPSLCQLGKYTTNSSADHRVRLDLGLWDKFSELATKCIIKIVEFAKRLPGFTGLTIADQITLLKAACLDILILRICTRYTPEQDTMTFSDGLTLNRTQMHNAGFGPLTDLVFTFANQLLPLEMDDTETGLLSAICLICGDRQDLEEPTKVDKLQEPLLEALKIYIRKRRPSKPHMFPKILMKITDLRSISAKGAERVITLKMEIPGSMPPLIQEMLENSEGHEPLTPSSSGNTAEHSPSISPSSVENSGVSQSPLVQ

SEQ ID NO: 109225 - DNA, 1011 bp, Artificial Sequence
  derived and/or modified sequence
atgatctacacctgccacagagacaagaactgcgtgatcaacaaggtgaccagaaacagatgccagtactgcagactgcagaagtgcttcgaggtgggcatgagcaaggagagcgtgagaaacgacagaaacaagaagaagaaggagaccagcaagcaggagtgcaccgagagctacgagatgaccgccgagctggacgacctgaccgagaagatcagaaaggcccaccaggagaccttccccagcctgtgccagctgggcaagtacaccaccaacagcagcgccgaccacagagtgagactggacctgggcctgtgggacaagttcagcgagctggccaccaagtgcatcatcaagatcgtggagttcgccaagagactgcccggcttcaccggcctgaccatcgccgaccagatcaccctgctgaaggccgcctgcctggacatcctgatcctgagaatctgcaccagatacacccccgagcaggacaccatgaccttcagcgacggcctgaccctgaacagaacccagatgcacaacgccggcttcggccccctgaccgacctggtgttcaccttcgccaaccagctgctgcccctggagatggacgacaccgagaccggcctgctgagcgccatctgcctgatctgcggcgacagacaggacctggaggagcccaccaaggtggacaagctgcaggagcccctgctggaggccctgaagatctacatcagaaagagaagacccagcaagccccacatgttccccaagatcctgatgaagatcaccgacctgagaagcatcagcgccaagggcgccgagagagtgatcaccctgaagatggagatccccggcagcatgccccccctgatccaggagatgctggagaacagcgagggccacgagcccctgacccccagcagcagcggcaacaccgccgagcacagccccagcatcagccccagcagcgtggagaacagcggcgtgagccagagccccctggtgcagtag

SEQ ID NO: 109226 - DNA, 1011 bp, Artificial Sequence
  derived and/or modified sequence
atgatctacacctgccatagggataagaattgtgtaataaacaaagtaacacgcaaccgctgccaatattgccgactgcagaagtgcttcgaggttggtatgtcaaaggagtccgtgagaaatgaccgcaacaagaaaaagaaggagacgtccaaacaggagtgcacggaaagctacgaaatgaccgctgagctcgacgatttgacggaaaaaatccgtaaggctcatcaggaaacctttccctctttgtgccagttgggcaagtacactaccaattccagcgcagaccatcgggtacgacttgatttaggcctttgggacaagttttccgaactcgcaactaaatgtattattaagattgtggagttcgcaaagcgacttccaggattcaccggcctgacaatcgctgaccagattacactgctaaaagcagcatgcctggatatcctcatattgaggatctgcactaggtacacacctgagcaggacacaatgactttctccgatggtcttaccttgaacagaacgcagatgcataacgctggattcgggccactgacagacttggtttttaccttcgccaaccagttactgcctttggaaatggacgatacagagactgggctgctatccgcgatttgcctgatctgcggcgatagacaggatctggaggagcccactaaagtggacaagctgcaagaaccattgctcgaggccctaaaaatctacatcaggaagcgacgcccaagtaagccccacatgtttcccaaaatccttatgaaaataaccgacctcagatccatcagtgcgaaaggagcagagcgggtcatcactttaaagatggagatacctgggagcatgccccctcttatacaagaaatgttggagaacagcgagggccatgaacctcttaccccctctagttccggtaacacagccgagcacagccccagtatttccccctcttctgtcgagaactctggagtgagccaatcacctctggttcagtag

SEQ ID NO: 109227 - DNA, 1011 bp, Artificial Sequence
  derived and/or modified sequence
atgatttatacatgccatcgggacaaaaattgtgtcattaacaaagtgactagaaatagatgccagtactgccgtctacagaagtgctttgaggtgggcatgtcaaaggagtccgtgcgcaacgatcgaaacaagaagaaaaaggagaccagcaaacaagaatgcacggagtcttatgagatgactgccgaactcgacgacctcacagaaaaaattcgtaaggcccaccaggagacctttccctctttatgccagctcggcaagtacacaaccaacagcagcgccgatcacagggtgaggttagatctcggcctgtgggataagttttcggaactcgctaccaaatgtatcatcaagatcgtcgaattcgcgaaaagattgcccggcttcacggggctgaccatagctgatcaaatcactcttctgaaggccgcttgcttagacatcctgattctgcgcatttgcacgcgctatacacctgagcaggacactatgacgtttagtgatggcttgacactgaatcgaacacaaatgcacaatgctgggtttggccccctgacagatctggttttcacatttgcgaaccagctcctcccccttgaaatggacgatacagaaacggggctcctgtcagccatttgtctaatatgcggtgatcgccaggacttggaagaaccgactaaggtagacaagttacaggaacccctgttagaggcgcttaagatctatatacgcaagcgcagacctagtaaaccacacatgtttccgaaaattttaatgaagatcaccgacctacggtccattagcgctaaaggggccgagagggtgatcacactgaagatggagattccagggagtatgccaccactgatacaggaaatgctcgaaaacagtgaagggcacgagccgctgacacccagttcttccggaaatacagctgaacactctccgtctatcagtcccagttctgtggagaactctggcgtaagccaatcccctctggttcagtag

SEQ ID NO: 109228 - DNA, 1011 bp, Artificial Sequence
  derived and/or modified sequence
atgatctacacctgccaccgggacaagaactgtgtgatcaacaaggtgaccaggaaccgctgccagtactgccgcctgcagaagtgctttgaggtgggcatgagcaaggagagcgtgagaaatgacaggaacaagaagaagaaggagaccagcaagcaggagtgcacagagagctatgagatgacagctgagctggatgacctgacagagaagatcaggaaggcccaccaggagaccttccccagcctgtgccagctgggcaagtacaccaccaacagcagcgctgaccaccgggtgcggctggacctgggcctgtgggacaagttcagcgagctggccaccaagtgcatcatcaagatcgtggagtttgccaagaggctgcccggcttcaccggcctgaccatcgctgaccagatcaccctgctgaaggccgcctgcctggacatcctgatcctgcgcatctgcacccgctacaccccagagcaggacaccatgaccttcagtgatggcctgaccctgaacagaacccagatgcacaatgccggcttcggccccctgacagacctggtgttcacctttgccaaccagctgctgcccctggagatggatgacacagaaacaggcctgctgagcgccatctgcctgatctgtggggaccggcaggacctggaggagcccaccaaggtggacaagctgcaggagcccctgctggaggccctgaagatctacatcaggaagagaagacccagcaagccccacatgttccccaagatcctgatgaagatcacagacctgcggagcatcagcgccaagggagctgagagggtcatcaccctgaagatggagatccctggctccatgccacccctcatccaggagatgctggagaacagcgagggccacgagcccctgacccccagcagcagcggcaacacagctgagcacagccccagcatcagccccagctctgtggagaacagcggcgtgtcccagagccccctggtgcagtag

SEQ ID NO: 109229 - DNA, 1011 bp, Artificial Sequence
  derived and/or modified sequence
atgatctacacctgccaccgggacaagaactgcgtgatcaacaaggtgacccgaaatcggtgccaatactgtcgcctccaaaagtgtttcgaggttggcatgtctaaggaaagcgttcggaatgaccgcaacaaaaaaaagaaagagacatccaaacaggagtgtaccgagtcctatgaaatgaccgcggaattggacgatctgaccgagaaaatccgcaaggcacatcaggagactttcccttccctgtgtcagttgggcaaatacacaacgaacagtagtgctgatcatcgagtgcgtctggacctcggcctctgggacaagttttccgagctggcaacaaaatgcataataaagatcgtcgaattcgccaaacgtctgcccgggttcactggcctcacaattgcagatcaaattactctgctcaaggctgcgtgtttggacatcctgatccttagaatttgtacgaggtacaccccagaacaggataccatgacgttctccgatggacttacgctgaaccgcactcaaatgcataatgccggcttcggccccctgaccgacttggtgttcacattcgccaaccagctgttaccgttggaaatggatgacaccgagaccgggttactaagtgcaatttgtcttatatgcggagaccgccaggatctggaagagccaactaaggtcgataagctgcaggagcctctcctggaggcattgaagatctatattcgcaagcggcggccaagtaagccccacatgttccctaagatattgatgaagattaccgacctgaggagcattagcgccaagggggccgagcgggtgatcaccctgaaaatggaaataccaggatctatgccccccttaatacaggaaatgctggagaattccgaaggacacgagccacttactccgtctagctctggcaacaccgcagagcactcccccagcatttccccctctagcgtggaaaatagtggcgtgagtcagtcaccattggtgcagtag

SEQ ID NO: 109230 - DNA, 1011 bp, Artificial Sequence
  derived and/or modified sequence
atgatctacacctgccaccgggacaagaactgcgtgatcaacaaggtaacaagaaacaggtgccagtattgtcgcctccaaaaatgcttcgaggttggcatgtccaaagagtccgtcagaaacgatcgaaacaaaaaaaaaaaagaaaccagcaaacaggaatgcaccgaaagctacgagatgacggccgaattggatgatctgactgaaaagattagaaaagcccatcaggagacctttccgtctctgtgtcagttaggtaagtacaccacaaactccagtgctgatcaccgcgtgcgcctggaccttggattatgggacaaattttcagagctggcaactaagtgtattatcaagatcgttgaattcgccaagagactacccggattcactggactcactatcgccgaccagattaccctgctgaaagctgcttgtctcgacattctgattctgagaatctgcactcggtatacaccagaacaagacactatgacattctcggacgggctgacattgaatagaactcaaatgcacaatgctggctttggccccctgactgacctggtgtttacgtttgccaaccagctcctgccactggaaatggacgacacagagactggtctcttgtccgccatatgcctaatttgtggtgatcgtcaggacctggaagaacctacaaaggtagataagctccaagaacctctcctggaagctttaaaaatctacatcagaaaaagacgtccgagcaaaccacatatgtttccaaaaatactaatgaaaatcaccgatctgcgatccatttccgcaaagggcgccgaaagggtcataacattaaagatggagatcccgggctccatgccgcccttgattcaggagatgctcgaaaatagtgagggccatgagccactcaccccctcatcctcagggaataccgccgaacatagcccaagcatttcaccttcctctgtggagaatagtggcgtctcgcagtctccgctggtgcagtag

SEQ ID NO: 109231 - DNA, 1011 bp, Artificial Sequence
  derived and/or modified sequence
atgatctatacttgccatagagataagaattgtgtgattaataaggttacacgcaatcggtgccaatattgcagactgcaaaagtgcttcgaagtgggaatgtcaaaggagagtgtccggaacgaccggaacaagaagaagaaggaaactagcaagcaggagtgtactgagtcatacgagatgaccgcggagctggatgacttgaccgagaagatccggaaggcccaccaggaaacattcccaagcctgtgtcagctcggtaaatatactaccaactcctccgctgatcaccgggtgcgcctggatctaggtctgtgggataaattctccgagctagctactaaatgtattattaaaattgtggagttcgccaaacgccttccaggctttacagggttaaccatcgccgatcaaatcacgctgctgaaagctgcttgcttggacatcctaatcctgaggatttgtactaggtacacccccgaacaggatactatgacctttagcgacggcctcaccctgaaccgtacccagatgcataatgccggattcggtcccctcacggatctagtttttacgtttgcaaaccaactgctgccactcgagatggatgacacagagactggcctcctgtcggcgatctgcctgatctgtggcgacagacaggatctggaagaaccgaccaaagtcgacaaactccaggagcctctgctcgaagctctcaagatctacatcagaaagagacgcccttcaaagccacacatgtttccaaagatcttaatgaaaattaccgacttgcggagcatcagtgctaaaggtgctgaacgtgttatcactctgaaaatggagataccaggctcgatgcccccactaattcaggaaatgcttgaaaacagcgaaggtcacgaacctttgactcctagctcttcagggaacacagccgagcacagcccgtccatatccccaagctctgtcgaaaactctggtgtgtcccagtccccgctggtgcaatag

SEQ ID NO: 109232 - DNA, 1011 bp, Artificial Sequence
  derived and/or modified sequence
atgatctatacttgtcatagagataagaactgtgttatcaacaaggtgacccggaatcgatgccagtactgcaggttgcagaaatgtttcgaagtaggaatgagcaaagagtcagtaaggaacgacagaaacaaaaaaaagaaggagacgtcgaagcaggaatgcacagagagttacgagatgacagcagagcttgacgatctcactgagaagatcagaaaggctcatcaggagaccttcccatccctttgccagctggggaagtacaccactaactccagcgctgatcaccgggtacggctggaccttggcctgtgggataaatttagcgagctggctactaagtgcattatcaagattgtcgagttcgccaaacgtctgcctgggttcactgggctcaccatcgccgaccagataacactgttaaaggccgcttgtctcgacatactgattttaagaatctgtacccgctacacgcccgagcaggacacaatgacttttagtgacggattgacactcaacagaactcagatgcataatgccggatttggacctttaactgatcttgtctttacgtttgcgaaccagctgcttccgctggagatggacgataccgaaactggcctactcagcgccatatgcctgatatgcggagatcgtcaggacctggaggaaccgacaaaggtagacaagctgcaggagccattacttgaggccctgaagatctacatcaggaagcggaggccgagtaaacctcatatgttccccaagattctcatgaagatcacagatttgcgctccatctctgcaaagggagcagagcgggtaattacactgaaaatggagattccagggagcatgccaccactaatccaggaaatgctcgaaaattctgaagggcacgaaccactcacccctagttctagcggcaacacagctgaacactcccctagcattagccccagcagtgtcgagaactcaggagtgtcccagtctcccctggtccagtag

SEQ ID NO: 109233 - protein, 243 aa, Artificial Sequence
  derived and/or modified sequence
MGYKYITIGTRGPKVQLCDLKSGSCSHILQGHRQEILAVSWSPRYDYILATASADSRVKLWDVRRASGCLITLDQHNGKKSQAVESANTAHNGKVNGLCFTSDGLHLLTVGTDNRMRLWNSSNGENTLVNYGKVCNNSKKGLKFTVSCGCSSEFVFVPYGSTIAVYTVYSGEQITMLKGHYKTVDCCVFQSNFQELYSGSRDCNILAWVPSLYEPVPDDDETTTKSQLNPAFEDAWSSSDEEG

SEQ ID NO: 109234 - DNA, 732 bp, Artificial Sequence
  derived and/or modified sequence
atgggctacaagtacatcaccatcggcaccagaggccccaaggtgcagctgtgcgacctgaagagcggcagctgcagccacatcctgcagggccacagacaggagatcctggccgtgagctggagccccagatacgactacatcctggccaccgccagcgccgacagcagagtgaagctgtgggacgtgagaagagccagcggctgcctgatcaccctggaccagcacaacggcaagaagagccaggccgtggagagcgccaacaccgcccacaacggcaaggtgaacggcctgtgcttcaccagcgacggcctgcacctgctgaccgtgggcaccgacaacagaatgagactgtggaacagcagcaacggcgagaacaccctggtgaactacggcaaggtgtgcaacaacagcaagaagggcctgaagttcaccgtgagctgcggctgcagcagcgagttcgtgttcgtgccctacggcagcaccatcgccgtgtacaccgtgtacagcggcgagcagatcaccatgctgaagggccactacaagaccgtggactgctgcgtgttccagagcaacttccaggagctgtacagcggcagcagagactgcaacatcctggcctgggtgcccagcctgtacgagcccgtgcccgacgacgacgagaccaccaccaagagccagctgaaccccgccttcgaggacgcctggagcagcagcgacgaggagggctag

SEQ ID NO: 109235 - DNA, 732 bp, Artificial Sequence
  derived and/or modified sequence
atgggctataagtatatcactattggcacacgtggtcctaaagtgcagctttgcgaccttaaatccggctcctgttcacatattctgcaggggcacagacaggagatccttgcagtgagttggtctccgcggtatgactacatcctagccactgccagcgcagacagccgcgtgaaactctgggacgtccgccgggccagtggctgtctcatcacgctagaccaacacaacggtaagaagtcacaggccgttgagagtgccaacaccgctcacaatgggaaagttaacggcttatgctttacgagcgatgggttgcacctgctgaccgtcggcacagacaatcgcatgaggctctggaactcaagtaacggtgagaacactttagtgaattacggtaaggtctgtaataactccaaaaagggcctgaagttcactgtctcttgtgggtgttccagtgagtttgtgttcgtcccatacggctccacaatcgcggtgtacactgtgtattcgggggagcagatcacaatgctgaagggacactacaaaacagtcgactgctgtgtgtttcagtcaaacttccaggagctctacagtgggagccgagattgcaatattctggcctgggtgccttctctttacgagcctgtccccgacgacgatgaaacaacgacaaaatcccagctgaatccagcatttgaagacgcctggagctccagtgacgaagaggggtag

SEQ ID NO: 109236 - DNA, 732 bp, Artificial Sequence
  derived and/or modified sequence
atgggctacaagtacatcaccatcggcacccggggccccaaggtgcagctgtgtgacctgaagagcggcagctgcagccacatcctgcagggccaccggcaggagatcctggccgtgtcctggagccccaggtatgactacatcctggccacagccagcgctgacagccgggtgaagctgtgggatgtgcggcgggccagcggctgcctgatcaccctggaccagcacaacgggaagaagagccaggccgtggagagcgccaacacagcccacaacgggaaggtgaatggcctgtgcttcaccagtgatggcctgcacctgctgactgtgggcacagacaacaggatgaggctgtggaacagcagcaatggagagaacaccctggtgaactacggcaaggtgtgcaacaacagcaagaagggcctgaagttcaccgtgtcctgtggctgcagcagcgagtttgtgtttgtgccctacggcagcaccatcgctgtgtacacagtgtacagcggggagcagatcaccatgctgaagggccactacaagacagtggactgctgcgtgttccagagcaacttccaggagctgtacagcggcagccgggactgcaacatcctggcctgggtgcccagcctgtatgagcctgtgcctgatgatgatgagaccaccaccaagagccagctgaacccagcctttgaagatgcctggagcagcagtgatgaggagggctag

SEQ ID NO: 109237 - DNA, 732 bp, Artificial Sequence
  derived and/or modified sequence
atgggctacaagtacatcaccatcggcacccggggccccaaggtgcagctgtgcgatctcaaaagcggaagctgttcccacatattgcaaggccaccgtcaggaaattctggcggtgagttggtcaccgcgttatgactatatcctggcaactgcgagcgcggacagtcgggttaagctatgggacgtgcggcgggcatccggatgcctcatcacccttgatcagcacaacgggaaaaagtcacaagccgtagagagtgccaatacggcccacaacggcaaagttaatgggctgtgtttcacttccgacgggctccatctgttgactgtcggcactgacaacagaatgcgtctatggaactcttccaatggtgagaatacccttgttaactacgggaaagtgtgtaataatagtaagaaaggtttaaagtttacagtaagttgtggctgctccagcgagtttgtgtttgtaccctacggcagtacaatcgccgtgtacaccgtgtatagtggggagcagattacaatgctgaagggacattataagaccgtcgactgttgcgtgttccagtctaattttcaggagctgtactcgggatcacgggattgtaacatccttgcatgggtgccaagcctttacgagcccgttcctgacgatgacgaaaccaccaccaaatctcagctcaacccagcctttgaggatgcctggtcaagtagcgacgaagaaggatag

SEQ ID NO: 109238 - DNA, 732 bp, Artificial Sequence
  derived and/or modified sequence
atgggctacaagtacatcaccatcggtaccagaggccctaaggtacaactgtgcgacctcaaatccggctcctgtagccatatactgcagggacatagacaagagatcctggcagtatcttggagccccaggtacgattacatcctggcgactgcaagcgctgatagcagagtcaaactctgggatgtccgtcgcgcatctgggtgcctcatcactcttgatcagcacaatggtaaaaagagccaggctgtggagtcagcaaacaccgcccataatggcaaggttaacgggttatgttttacaagtgacggattgcacctcctgacggtcggcaccgataatcgcatgcgactgtggaacagctccaacggtgagaacacactcgtaaattacggcaaagtctgtaacaatagcaagaaggggctgaagtttacagtgtcttgtggatgcagctctgagtttgttttcgtcccatacggaagcactatcgctgtctacacggtttatagtggtgagcagatcacaatgttgaaaggccactacaaaacagtggactgttgcgtttttcagagcaattttcaggagctttactccggctcccgtgattgcaacattctcgcttgggtgccgtctctatacgagcctgttcctgacgacgacgaaacaacaacgaagtcccagttgaacccagccttcgaagatgcctggtcaagttccgacgaggagggctag

SEQ ID NO: 109239 - protein, 1266 aa, Artificial Sequence
  derived and/or modified sequence
MSSECDGGSKAVMNGLAPGSNGQDKATADPLRARSISAVKIIPVKTVKNASGLVLPTDMDLTKICTGKGAVTLRASSSYRETPSSSPASPQETRQHESKPGLEPEPSSADEWRLSSSADANGNAQPSSLAAKGYRSVHPNLPSDKSQDATSSSAAQPEVIVVPLYLVNTDRGQEGTARPPTPLGPLGCVPTIPATASAASPLTFPTLDDFIPPHLQRWPHHSQPARASGSFAPISQTPPSFSPPPPLVPPAPEDLRRVSEPDLTGAVSSTDSSPLLNEVSSSLIGTDSQAFPSVSKPSSAYPSTTIVNPTIVLLQHNREQQKRLSSLSDPVSERRVGEQDSAPTQEKPTSPGKAIEKRAKDDSRRVVKSTQDLSDVSMDEVGIPLRNTERSKDWYKTMFKQIHKLNRDDDSDLYSPRYSFSEDTKSPLSVPRSKSEMSYIDGEKVVKRSATLPLPARSSSLKSSSERNDWEPPDKKVDTRKYRAEPKSIYEYQPGKSSVLTNEKMSRDISPEEIDLKNEPWYKFFSELEFGKPPPKKIWDYTPGDCSILPREDRKTNLDKDLSLCQTELEADLEKMETLNKAPSANVPQSSAISPTPEISSETPGYIYSSNFHAVKRESDGAPGDLTSLENERQIYKSVLEGGDIPLQGLSGLKRPSSSASTKDSESPRHFIPADYLESTEEFIRRRHDDKEKLLADQRRLKREQEEADIAARRHTGVIPTHHQFITNERFGDLLNIDDTAKRKSGSEMRPARAKFDFKAQTLKELPLQKGDIVYIYKQIDQNWYEGEHHGRVGIFPRTYIELLPPAEKAQPKKLTPVQVLEYGEAIAKFNFNGDTQVEMSFRKGERITLLRQVDENWYEGRIPGTSRQGIFPITYVDVIKRPLVKNPVDYMDLPFSSSPSRSATASPQFSSHSKLITPAPSSLPHSRRALSPEMHAVTSEWISLTVGVPGRRSLALTPPLPPLPEASIYNTDHLALSPRASPSLSLSLPHLSWSDRPTPRSVASPLALPSPHKTYSLAPTSQASLHMNGDGGVHTPSSGIHQDSFLQLPLGSSDSVISQLSDAFSSQSKRQPWREESGQYERKAERGAGERGPGGPKISKKSCLKPSDVVRCLSTEQRLSDLNTPEESRPGKPLGSAFPGSEAEQTERHRGGEQAGRKAARRGGSQLSHHSLRAGPDLTESEKSYVQPQAQQRRVTPDRSQTSQDLFSYQALYSYIPQNDDELELRDGDIVDVMEKCDDGWFVGTSRRTKQFGTFPGNYVKPLYL

SEQ ID NO: 109240 - DNA, 3801 bp, Artificial Sequence
  derived and/or modified sequence
atgagcagcgagtgcgacggcggcagcaaggccgtgatgaacggcctggcccccggcagcaacggccaggacaaggccaccgccgaccccctgagagccagaagcatcagcgccgtgaagatcatccccgtgaagaccgtgaagaacgccagcggcctggtgctgcccaccgacatggacctgaccaagatctgcaccggcaagggcgccgtgaccctgagagccagcagcagctacagagagacccccagcagcagccccgccagcccccaggagaccagacagcacgagagcaagcccggcctggagcccgagcccagcagcgccgacgagtggagactgagcagcagcgccgacgccaacggcaacgcccagcccagcagcctggccgccaagggctacagaagcgtgcaccccaacctgcccagcgacaagagccaggacgccaccagcagcagcgccgcccagcccgaggtgatcgtggtgcccctgtacctggtgaacaccgacagaggccaggagggcaccgccagaccccccacccccctgggccccctgggctgcgtgcccaccatccccgccaccgccagcgccgccagccccctgaccttccccaccctggacgacttcatccccccccacctgcagagatggccccaccacagccagcccgccagagccagcggcagcttcgcccccatcagccagaccccccccagcttcagcccccccccccccctggtgccccccgcccccgaggacctgagaagagtgagcgagcccgacctgaccggcgccgtgagcagcaccgacagcagccccctgctgaacgaggtgagcagcagcctgatcggcaccgacagccaggccttccccagcgtgagcaagcccagcagcgcctaccccagcaccaccatcgtgaaccccaccatcgtgctgctgcagcacaacagagagcagcagaagagactgagcagcctgagcgaccccgtgagcgagagaagagtgggcgagcaggacagcgcccccacccaggagaagcccaccagccccggcaaggccatcgagaagagagccaaggacgacagcagaagagtggtgaagagcacccaggacctgagcgacgtgagcatggacgaggtgggcatccccctgagaaacaccgagagaagcaaggactggtacaagaccatgttcaagcagatccacaagctgaacagagacgacgacagcgacctgtacagccccagatacagcttcagcgaggacaccaagagccccctgagcgtgcccagaagcaagagcgagatgagctacatcgacggcgagaaggtggtgaagagaagcgccaccctgcccctgcccgccagaagcagcagcctgaagagcagcagcgagagaaacgactgggagccccccgacaagaaggtggacaccagaaagtacagagccgagcccaagagcatctacgagtaccagcccggcaagagcagcgtgctgaccaacgagaagatgagcagagacatcagccccgaggagatcgacctgaagaacgagccctggtacaagttcttcagcgagctggagttcggcaagcccccccccaagaagatctgggactacacccccggcgactgcagcatcctgcccagagaggacagaaagaccaacctggacaaggacctgagcctgtgccagaccgagctggaggccgacctggagaagatggagaccctgaacaaggcccccagcgccaacgtgccccagagcagcgccatcagccccacccccgagatcagcagcgagacccccggctacatctacagcagcaacttccacgccgtgaagagagagagcgacggcgcccccggcgacctgaccagcctggagaacgagagacagatctacaagagcgtgctggagggcggcgacatccccctgcagggcctgagcggcctgaagagacccagcagcagcgccagcaccaaggacagcgagagccccagacacttcatccccgccgactacctggagagcaccgaggagttcatcagaagaagacacgacgacaaggagaagctgctggccgaccagagaagactgaagagagagcaggaggaggccgacatcgccgccagaagacacaccggcgtgatccccacccaccaccagttcatcaccaacgagagattcggcgacctgctgaacatcgacgacaccgccaagagaaagagcggcagcgagatgagacccgccagagccaagttcgacttcaaggcccagaccctgaaggagctgcccctgcagaagggcgacatcgtgtacatctacaagcagatcgaccagaactggtacgagggcgagcaccacggcagagtgggcatcttccccagaacctacatcgagctgctgccccccgccgagaaggcccagcccaagaagctgacccccgtgcaggtgctggagtacggcgaggccatcgccaagttcaacttcaacggcgacacccaggtggagatgagcttcagaaagggcgagagaatcaccctgctgagacaggtggacgagaactggtacgagggcagaatccccggcaccagcagacagggcatcttccccatcacctacgtggacgtgatcaagagacccctggtgaagaaccccgtggactacatggacctgcccttcagcagcagccccagcagaagcgccaccgccagcccccagttcagcagccacagcaagctgatcacccccgcccccagcagcctgccccacagcagaagagccctgagccccgagatgcacgccgtgaccagcgagtggatcagcctgaccgtgggcgtgcccggcagaagaagcctggccctgaccccccccctgccccccctgcccgaggccagcatctacaacaccgaccacctggccctgagccccagagccagccccagcctgagcctgagcctgccccacctgagctggagcgacagacccacccccagaagcgtggccagccccctggccctgcccagcccccacaagacctacagcctggcccccaccagccaggccagcctgcacatgaacggcgacggcggcgtgcacacccccagcagcggcatccaccaggacagcttcctgcagctgcccctgggcagcagcgacagcgtgatcagccagctgagcgacgccttcagcagccagagcaagagacagccctggagagaggagagcggccagtacgagagaaaggccgagagaggcgccggcgagagaggccccggcggccccaagatcagcaagaagagctgcctgaagcccagcgacgtggtgagatgcctgagcaccgagcagagactgagcgacctgaacacccccgaggagagcagacccggcaagcccctgggcagcgccttccccggcagcgaggccgagcagaccgagagacacagaggcggcgagcaggccggcagaaaggccgccagaagaggcggcagccagctgagccaccacagcctgagagccggccccgacctgaccgagagcgagaagagctacgtgcagccccaggcccagcagagaagagtgacccccgacagaagccagaccagccaggacctgttcagctaccaggccctgtacagctacatcccccagaacgacgacgagctggagctgagagacggcgacatcgtggacgtgatggagaagtgcgacgacggctggttcgtgggcaccagcagaagaaccaagcagttcggcaccttccccggcaactacgtgaagcccctgtacctgtag

SEQ ID NO: 109241 - DNA, 3801 bp, Artificial Sequence
  derived and/or modified sequence
atgtccagtgaatgtgatgggggatccaaggcagtgatgaacgggctggcacccggaagcaacggacaggataaagcgacagccgatccattacgagccaggagcattagcgcagtgaaaattatccctgtcaagacagtgaagaatgctagtggactggtgttacctaccgatatggatcttacgaagatatgtaccggcaagggagcagttactctccgggcctcttcgagttatagggaaacgcctagctcaagcccagcctccccccaggaaacacggcagcatgagagcaagccaggactggaacccgaacccagctctgccgacgagtggcgtctctcatctagcgccgacgctaacggaaacgcccagccttcttctctggctgctaagggctaccgctccgtacatcctaacttgccctccgataagtctcaggatgcaacatctagcagcgccgctcagccagaggtcatcgtggtgcctctgtatcttgtcaacacagatagggggcaggagggcacggctaggcctccgactcccttgggtcccctggggtgtgtgcctactatcccagccaccgccagtgcagcctcccccctgacgttccctactctggatgatttcatcccgccgcacctccagaggtggccccaccacagtcaaccagcacgtgctagcgggtcttttgcccccattagtcagacacccccaagcttctccccccccccccctctcgtgcctcctgcccccgaggatttacggagagtatcagagccggatctgacgggcgccgttagttctaccgactcgagcccacttctgaatgaagtgagctcatcactgatcgggactgactcgcaggccttcccatccgtgtctaaaccttcttccgcctacccctcgaccacaattgtgaatccgaccattgtgctcctgcagcataaccgcgagcagcagaaacgtctctcatccctgagtgaccccgtctctgagcgacgagttggggaacaggattccgcgccaacacaggagaaacccacaagccccggaaaagccatagagaaacgggccaaggatgactctcgccgggtagtgaagtcaacccaagacctgtctgacgtgagcatggatgaagttgggataccactgcgcaacactgagaggtccaaagattggtataagactatgtttaaacaaatacataagctgaacagagatgatgatagcgatctgtactcacctcgatatagcttttctgaggacaccaaatctccacttagcgtaccccgcagcaagtccgaaatgtcttatatagacggggaaaaagtggtgaagaggtctgctactctccccctgcctgcgcggagtagcagcctgaaatccagctcagagcgcaacgactgggagccacccgataaaaaagtggacacaagaaagtacagagccgaaccaaaatctatttacgagtaccaaccaggcaagtcatccgtgcttacaaatgagaagatgtcgagagatatttctcctgaggaaatagatctcaaaaacgaaccctggtacaagtttttttcggagctggagtttgggaagcccccgcctaagaagatctgggactatacccccggcgactgttccattctacccagggaggacagaaagacaaacttagataaagatctttcgctttgccagacagaactggaggccgacctggaaaagatggagacgttgaacaaagctccgtccgctaatgttccccaatcctcagcgatctcccccactcccgaaattagctcagaaacccccggctatatttactcttccaatttccacgcggtgaagagggagtccgatggtgctcctggggacctcaccagtttggaaaatgagagacagatctataagagtgtgttggaggggggggatatacctctgcagggtctttccggtttaaagcgtccatcaagctctgcaagcactaaggattctgaatctcctcgccactttatccccgcagactacctcgagtctactgaggaattcattcggcgcaggcatgacgataaggaaaagctgttggccgaccagaggcggctgaaaagagagcaggaagaggctgacatagccgctaggcggcacacaggtgtgatccccacccatcaccagttcatcacaaacgaacgcttcggcgatctcctaaacattgatgatacagccaaacgaaagtcaggaagcgagatgcggccagctagagccaagttcgatttcaaggctcagacgctgaaggaattaccattgcaaaagggagatatcgtgtacatctacaaacaaatcgatcaaaactggtatgaaggtgagcaccatggaagagtggggatattcccaagaacatacattgaactgttgccaccagcagagaaggcacagccgaaaaagctgaccccagtgcaggtactggagtacggagaagctatcgctaagttcaattttaacggcgatacacaggtggaaatgagttttagaaagggcgaacgaattacccttctgaggcaggtggatgagaactggtatgaggggcggattccaggcacgtcccgtcaaggcatcttccctatcacttacgtagacgtgatcaagcgcccgcttgtgaaaaacccggtcgactatatggatctgcccttctcttccagcccatcacgtagcgcaacggcctcaccacagtttagcagtcattctaagctgatcactcctgctccatctagtcttccccactcacgccgggcactgagtcctgagatgcatgcggtcacttccgagtggatatctctaaccgtcggcgtcccgggccggcggtcactggcccttacccctcctctgccccctcttcccgaggccagcatatacaatactgaccatctggcactctcccctcgggcatccccctccctaagtctgtccctaccacacctctcttggtcagatagaccaaccccaagaagcgtagcctcaccactggcgcttccctctcctcacaagacatattctctggcgcccaccagtcaagcttccctgcatatgaatggcgatggaggtgtccataccccttcttcaggcatccaccaggattcctttctgcagttgccgttaggctcgtcggactcagtgataagccagttaagcgatgctttctctagtcagagtaaacgccagccgtggagagaggaatcaggccagtacgaacgaaaagctgaacggggagcaggcgaacgcggtcccggaggcccgaagattagcaagaaatcctgtctgaagccatccgacgtagtgagatgcctgtcaaccgagcagcgactgagcgatctgaatacacctgaagaatccagacccggtaagccactcggatcagcatttcctggttcagaggccgagcagactgagcggcaccggggcggcgagcaggccggacgcaaggccgcccgccgcggtggctcacagctaagccaccacagcttaagagccggacctgacctgacggaatccgagaaatcgtacgttcaaccacaggctcagcagcggagagtgacccctgatcggagccagacgtcacaggatctgttctcctatcaggcgctgtacagttacatccctcaaaacgatgacgagttggagctcagagatggagatatcgtggatgtcatggagaagtgcgacgacggatggttcgtagggacatctcggaggaccaagcagttcggtacttttcctggcaattacgttaaacctctgtacctctag

SEQ ID NO: 109242 - DNA, 3801 bp, Artificial Sequence
  derived and/or modified sequence
atgagcagtgaatgtgatggcggcagcaaggctgtgatgaatggcctggcccctggcagcaatggccaggacaaggccacagctgaccccctgcgggcccggagcatctctgctgtgaagatcatccctgtgaagacagtgaagaatgccagcggcctggtgctgcccacagacatggacctgaccaagatctgcacaggaaaaggagctgtgaccctgcgggccagcagcagctaccgggagacccccagcagcagccctgccagcccccaggagacccggcagcacgagagcaagccaggcctggagcctgagcccagcagcgcagatgagtggaggctgagcagcagcgcagatgccaatggaaatgcccagcccagcagcctggccgccaagggctacagatctgtgcaccccaacctgcccagcgacaagagccaggatgccaccagcagcagcgctgcccagcctgaggtgattgtggtgcccctgtacctggtgaacacagaccggggccaggagggcacagcccggccccccacccccctgggccccctgggctgtgtgcccaccatcccagccacagccagcgctgccagccccctgaccttccccaccctggatgacttcatccccccccacctgcagcgctggccccaccacagccagcctgcccgggccagcggcagctttgcccccatcagccagaccccacccagcttcagccccccaccacccctggtgcccccagcccctgaggacctgcggcgggtgtctgagccagacctgaccggggctgtgagcagcacagacagcagccccctgctgaatgaggtgagcagcagcctcatcggcacagacagccaggccttccccagcgtgtccaagcccagcagcgcctaccccagcaccaccatcgtgaaccccaccatcgtgctgctgcagcacaaccgggagcagcagaagaggctgagcagcctgagtgaccctgtgtctgagcggcgggtgggggagcaggacagcgcccccacccaggagaagcccaccagccctgggaaggccatcgagaagagggccaaggatgacagccggcgggtggtgaagagcacccaggacctgagtgatgtgtccatggatgaggtgggcatccccctgaggaacacagagaggagcaaggactggtacaagaccatgttcaagcagatccacaagctgaacagagatgatgacagcgacctgtacagcccccgctacagcttcagcgaggacaccaagagccccctgtctgtgcccaggagcaagtctgagatgagctacattgatggagagaaggtggtgaagaggtctgccaccctgcccctgcctgcccggagcagcagcctgaagagcagcagcgagagaaatgactgggagcccccagacaagaaggtggacaccaggaagtacagagctgagcccaagagcatctatgagtaccagcccgggaagagctctgtgctgaccaatgagaagatgagccgggacatcagccctgaggagattgacctgaagaatgagccctggtacaagttcttcagcgagctggagtttgggaagcccccacccaagaagatctgggactacacccctggggactgcagcatcctgccccgggaggacaggaagaccaacctggacaaggacctgagcctgtgccagacagagctggaggccgacctggagaagatggagaccctgaacaaggcccccagcgccaacgtgccccagagcagcgccatcagccccaccccagagatcagcagcgagaccccaggctacatctacagcagcaacttccacgctgtgaagcgggagagtgatggagcccctggggacctgaccagcctggagaatgaaaggcagatctacaagtctgtgctggagggcggggacatccccctgcagggcctgagcggcctgaagaggcccagcagcagcgccagcaccaaggacagcgagagccccaggcacttcatcccagctgactacctggagagcacagaggagttcatcagaagaagacatgatgacaaggagaagctgctggccgaccagaggcggctgaagcgggagcaggaggaggccgacattgctgcccggcggcacactggagtcatccccacccaccaccagttcatcaccaatgaaagatttggagacctgctgaacattgatgacacagccaagaggaagagcggcagcgagatgaggcctgcccgggccaagtttgacttcaaggcccagaccctgaaggagctgcccctgcagaagggggacatcgtgtacatctacaagcagattgaccagaactggtatgaaggagagcaccacggccgggtgggcatcttccccaggacctacatcgagctgctgcccccagctgagaaggcccagcccaagaagctgacccctgtgcaggtgctggagtatggagaggccatcgccaagttcaacttcaatggagacacccaggtggagatgtccttcaggaagggggagcgcatcaccctgctgcggcaggtggatgagaactggtatgagggccgcatccctggcaccagccggcagggcatcttccccatcacctacgtggatgtgatcaagaggcccctggtgaagaaccctgtggactacatggacctgcccttcagcagcagccccagccgcagcgccacagccagcccccagttcagcagccacagcaagctgatcaccccagcccccagcagcctgccccacagccggcgggccctgagccctgagatgcatgctgtgaccagcgagtggatcagcctgactgtgggcgtgcccggccgccgcagcctggccctgaccccacccctgccccccctgcctgaggccagcatctacaacacagaccacctggccctgagcccccgggccagccccagcctgagcctgagcctgccccacctgtcctggagcgaccggcccacccccaggtctgtggccagccccctggccctgcccagcccccacaagacctacagcctggcccccaccagccaggccagcctgcacatgaatggagatggaggagtgcacacccccagcagcggcatccaccaggacagcttcctgcagctgcccctgggcagcagtgacagcgtcatcagccagctgagtgatgccttcagcagccagagcaagaggcagccctggagggaggagagcggccagtatgaaaggaaggccgagagaggagctggggagcggggccctgggggccccaagatcagcaagaagagctgcctgaagcccagtgatgtggtgcgctgcctgagcacagagcagaggctgagtgacctgaacaccccagaggagagcaggcctgggaagcccctgggcagcgccttccctggcagcgaggccgagcagacagagcggcaccggggcggggagcaggccggcaggaaggccgcccggcggggcggcagccagctgagccaccacagcctgcgggccggccctgacctgacagagagcgagaagagctatgtgcagccccaggcccagcagaggagagtgaccccagacaggagccagaccagccaggacctcttctcctaccaggccctgtacagctacatcccccagaatgatgatgagctggagctgagagatggagacatcgtggatgtgatggagaagtgtgatgatggctggtttgtgggcaccagcaggaggaccaagcagtttggcaccttccctggcaactacgtgaagcccctgtacctgtag

SEQ ID NO: 109243 - DNA, 3801 bp, Artificial Sequence
  derived and/or modified sequence
atgagcagcgagtgcgacggcggcagcaaggccgtgatgaacggcttggcacctggttctaatgggcaggataaggccactgctgatcctctaagagcgcggtctatttcagccgtgaagattattcctgtgaagactgtgaagaacgcctctggattggtcctgcctacagatatggacctcaccaagatatgtactgggaaaggtgccgtaacgctaagagcctcatcctcttatcgggagacgccttcgagcagtccagcgagtccacaagagacccggcagcatgagtctaaacccggcttggaacctgagccatcatcagccgacgagtggcggctcagtagcagcgccgacgctaatggcaacgctcagccgtctagcctggcagcgaaaggctaccggtctgtacaccccaatctcccatcagataagagtcaggatgccaccagtagctctgctgctcaaccagaggtgatcgtggtccccctgtacctcgtcaatacagatcgagggcaagaagggaccgcacggcccccaacgcccttgggtccactcgggtgcgtgcctactatcccagctactgcatccgccgcctcgcccttaacattcccaaccctggatgacttcatcccaccccaccttcagaggtggcctcatcattctcagccagcgcgtgcgagtggtagttttgcaccaatatcgcagactcccccatcctttagtcctccgccgcctttagtgcctccagcgccagaagacctaagaagggtgtctgagcctgatcttaccggagcggtgagctcaacggacagttcacctttgttgaacgaagtcagcagttccctgattggaaccgacagccaggcatttcccagcgtttctaagcctagtagcgcgtacccctctacgacaattgttaatccaacaattgttctgctccaacataaccgagagcaacagaaacgattgagctccctgagcgatcccgtctccgagcgcagggtaggcgagcaggatagcgccccaacccaggagaagcccaccagcccgggcaaggcgatcgaaaaacgtgccaaagacgatagcaggcgtgtggtcaaaagtacccaagatctgtcagatgtctcaatggacgaggtgggtatccctctgagaaacacagagagaagcaaggactggtataagaccatgttcaagcaaatacacaagttaaaccgagatgatgattcagacctgtattccccccggtactcttttagtgaggatacgaaatcacccctttcagtgccgcgaagcaagagtgagatgtcctacatcgacggtgaaaaggtggtgaagcggtcagctactctcccgctgccagcacgcagctcctctttgaaatccagctcagaacggaacgattgggagccacccgacaaaaaggtggacacccgcaaataccgcgcagaacctaagagtatatacgaataccagccaggcaaatcaagcgtcctgaccaatgagaaaatgagtagggacatatctcccgaggaaattgacctgaagaatgagccctggtataaattcttctcggaactggagttcggtaagcccccaccaaagaaaatttgggattacacccctggagactgcagcatcctgcctcgagaggaccggaaaacgaacctggataaagatctctctttgtgtcagaccgaattagaggctgacctcgagaaaatggagacccttaacaaagctcctagcgccaacgtcccccagagttctgctatcagtcctaccccggagatatcgtcagaaaccccgggttatatttactctagcaactttcatgccgttaaacgtgaaagtgacggggctcccggtgatctgacaagcttagagaacgaaagacagatctataagtctgtgttagaaggaggcgatatcccactgcaaggtctaagcgggctgaaacgtcccagcagctcagcatcaactaaggattcggaatctccacggcacttcattccagcagattacctggagtcaaccgaggaattcattcggcggcggcacgacgataaagagaagctactggccgaccagagacgacttaagagggaacaggaggaagccgatattgcggctaggcgacataccggggtgattccgacacatcaccaattcataaccaacgagagattcggggacctcctcaatatcgacgacaccgcaaagcgaaagagcggaagcgagatgcgtcctgcacgggctaaattcgactttaaagctcagaccttaaaagaattgccgttacagaagggtgatatagtgtacatctataaacagatcgatcaaaattggtatgaaggggaacaccatggccgtgtcggaattttcccccgcacttatattgagcttttgccacctgccgagaaagctcaacctaaaaagctgactcccgtgcaagtgcttgagtacggagaggcaattgcaaaatttaatttcaatggtgacactcaggtggagatgagctttagaaaaggcgaaagaattaccctattgcggcaagtggatgagaattggtatgagggcaggattcctgggacaagtcgacaaggaatttttcctatcacgtatgtcgatgttattaagcgtcccttagttaagaacccagtggattatatggatcttccattcagcagtagcccatctcgaagtgcaaccgcatcacctcagttttctagccacagcaaacttattactcccgctccaagcagcctgccacactcacgcagagctttatcacccgagatgcatgccgtaacgagcgaatggataagcctgaccgtcggagtgccaggaaggcgctcactggctctgactcctcctctgcctccgctgccggaggctagtatatataacaccgaccaccttgccctgtcccctcgcgcttcaccctcactgagtttgagtctaccgcacctgtcctggtctgatcggcccacacccagaagtgtggccagccctctagccctgccttccccccacaagacctactctttagccccaaccagccaagcgagtcttcacatgaatggcgatgggggcgttcatacaccatcttcgggcatccaccaagattcattcctgcagttgcccttggggagctcagactcagtaatcagccagctcagtgatgcgttctctagccagtccaaacgccagccttggcgcgaagaatccgggcagtatgaacggaaagccgagcgcggtgccggcgagaggggtcctggcggcccgaaaatttcgaagaaaagttgtctgaaaccctccgatgtagttcggtgtctgtccactgaacagcggctaagtgacctcaatacccctgaggaatccaggccgggaaagcctcttggatccgcgtttcccgggtcagaggctgaacaaaccgagagacatagaggcggagagcaagctgggaggaaagccgcacggcgtggtgggtcccagttatcccatcacagccttagggctggtcctgatttaactgaaagtgagaagtcttacgttcaaccccaggcacagcagcggcgggtgactccagatcggtcacaaaccagccaagatctgttctcctaccaagcgctttactcatacattccgcaaaacgacgacgagctggaactgcgcgatggagatattgtggacgttatggaaaaatgtgacgatggatggtttgtgggaacaagcagaaggacgaaacagtttgggacattccccgggaactacgtcaagcccttgtatctatag

SEQ ID NO: 109244 - DNA, 3801 bp, Artificial Sequence
  derived and/or modified sequence
atgtcatccgagtgcgatggaggatccaaggctgtgatgaacgggctggctcccggtagcaatgggcaggataaagctaccgcagatcccttgagggccaggagcatttccgccgtgaaaatcataccagtgaagaccgtgaaaaacgcgtcaggcctggttctgcccaccgacatggatcttactaaaatctgcactggcaagggagcagttacccttcgggcttcgagcagctaccgtgaaaccccaagcagcagtcctgcctcccctcaggaaacgagacagcacgagtccaagcctggtctggagcctgaaccaagttcggctgacgagtggcgcttatccagctctgccgatgctaacgggaacgcacagccatccagcctggcagcaaagggctacagatcggtccatcctaacctgccctccgataaatctcaggacgctacctcttcgtccgccgcacagccagaggtgatcgtggtgcccctctatcttgtgaacaccgatcggggtcaggaggggacggccagaccacctacacccttaggccctttaggctgtgtgcccaccatcccagcaactgcttccgcagcctcaccattgacttttcccacgttagacgacttcataccccctcacttgcagaggtggccacaccactcccaacctgcccgagcatccggtagttttgcaccgatatctcagacgccgccaagcttcagccctcctcctccactagtcccaccagctcctgaggatttgcgaagagtgtcagagccggacttaacaggggctgtaagctctacagactcttccccactgctgaatgaagtgtccagttcactcatcggaacagactctcaggccttccctagcgtatctaaaccctcgtctgcctacccttccaccactatcgtcaaccctaccatcgttctcctgcagcacaatcgtgagcagcagaaaaggctgagtagtctttcagatccagtgagcgagaggcgggttggtgaacaggatagcgcacccacgcaggaaaaacccacctcgccagggaaagcaatcgaaaaacgcgctaaagatgacagcagaagagtggttaagtctacacaggacctgagcgacgtctctatggatgaagtgggcatccctcttaggaacacagagagaagcaaggactggtataagacaatgttcaaacaaattcataagctgaatagggatgacgactctgatctctactctccaaggtattctttcagtgaggacactaaatctccgctttcagttcctcgttctaaaagcgagatgtcctacattgacggcgagaaggtggtgaaacgatccgctactctgccattgcctgcgaggtcgtcttctctgaaatcaagctctgagagaaacgactgggagccccctgacaagaaagtggacacccggaaataccgggctgaacccaagagtatatatgagtaccagccaggaaagagttctgtactcactaacgaaaaaatgagccgcgacatcagccccgaagaaattgacctaaagaacgagccttggtacaagttcttttcagagctggagtttgggaaacccccacccaaaaagatttgggattacaccccaggagactgttcgattctgccgagggaagaccgcaagaccaacctggacaaagacctcagcctttgccaaacagagctggaagcggatctggagaagatggagactttgaataaagctccctctgccaacgtgccacagagcagcgcaataagcccgactccggagatcagctctgaaacacctgggtatatttactcctctaattttcatgccgtcaagcgggagtccgatggtgccccaggtgatctcacgtctctggagaatgagcgccagatctacaaatcggtacttgaagggggtgatatccccctacaaggattgagcggcctgaaacggccttccagttcagccagcacaaaggacagcgagtctccacgacacttcatcccagcagattacctcgagtctaccgaggagttcattaggcggagacacgatgataaagaaaaattgctcgccgaccaaagaaggctgaagagggagcaggaggaggctgacatcgctgccagaagacacactggggtgattcctactcaccaccagttcatcacaaacgaacgcttcggagatttgctgaacatcgacgataccgccaaacggaagtcaggatctgaaatgagacccgcacgcgctaagttcgacttcaaagcccagaccctgaaggagttgcctctgcagaagggggacatagtctacatctataaacagatcgaccagaattggtacgagggggaacaccatgggagggtcgggatcttcccgaggacctacattgagctgctgcccccagcagaaaaagcccagcccaaaaaactgacgcccgttcaggtcttagagtacggagaggccatagccaaatttaatttcaacggcgatacgcaagtagaaatgtcttttcgcaaaggggaacggatcacccttctcagacaggtagacgaaaattggtacgaggggaggatcccaggaacttcccgccaagggatctttccaatcacttatgtggacgtcataaaacgccctctcgtgaagaatcctgtggactatatggatttacccttttcatcctccccctcccgctccgccactgctagcccccaatttagtagtcatagtaaactaatcacaccggctcctagctcacttccccatagccgcagggctctctcccccgaaatgcacgccgtgacttctgaatggatttccctgacagtaggcgtacccggtcggcgaagtctggcacttacgccaccattgccaccactacctgaggcgagcatttacaacaccgaccacctcgcattgtcgccgagagcttccccctctctgagcctgagcttgccccacctgagctggtccgatcgccctactccaaggtctgttgcaagcccgttagcgcttccctcccctcataagacgtacagcctggctcctacatcacaggcaagtcttcacatgaacggtgatggtggcgttcacactccctcaagcggaatacatcaagacagttttctgcagttacccctagggagcagcgatagcgtcataagccagctgagtgacgcgtttagctctcagtcaaagcggcagccttggcgggaggagagtggccagtacgaaagaaaggccgaaaggggcgcaggcgagcggggtccaggagggccaaaaattagtaagaaaagctgcctcaaacccagtgatgttgtacgctgtctgtctactgagcagcgcctgtctgacctgaatactccagaggaatcacgacccggaaaacctcttggaagcgctttccccggatctgaagcagagcaaactgaacggcatcgaggcggagaacaggccggacgcaaggctgctaggcgagggggaagccagttgtcccaccactcactgcgagctggaccagacttgacagaaagcgagaaatcttatgtgcagccacaagcacagcaaaggcgtgtgactcctgaccggagccagaccagccaggaccttttctcctatcaggctctctacagctacattcctcagaacgatgatgaattggagctgcgagacggggacatcgtcgatgtgatggagaagtgcgatgacggctggttcgtcggaaccagccgacggactaagcagtttggcaccttcccgggaaactatgttaaaccactctatctctag

SEQ ID NO: 109245 - DNA, 7276 bp, Artificial Sequence
  derived and/or modified sequence
gcagcgtgtagtgcgagtggggcggacgcgcgcagcccgcccgcccggcgaccagcaaggagttggcatcctttggaagagttcgtgaaagctttctgcccagagctcctggaccaatgcatcttcccaccaccttaaaccactgagcagttcagagccccagttgcagacgacttgtcctgccaccaccatgagttctgaatgtgatggtggttccaaagctgtgatgaatggcttggcacctggcagcaatgggcaagacaaagcaactgccgaccctttacgcgcacgctctatttctgctgttaaaatcattcctgtgaagacagtgaaaaacgcctcaggcctagttctccctacagacatggatcttacaaaaatctgcactgggaagggagcggtgactctccgggcctcgtcttcctacagggaaaccccaagcagtagccctgcgagccctcaggaaacccggcaacacgaaagcaaaccaggtctggagccagagccttcttcagcagatgagtggaggctttcttccagtgctgatgccaatggaaatgcccagccctcttcactcgctgccaagggctacagaagtgtgcatcccaaccttccttctgacaagtcccaggatgccacttcctccagtgcagcccagccggaggtaatagttgtccctctctacctggttaatactgacagagggcaagaaggcactgccagacctccaacacctctggggcctcttggctgcgtccccacaatcccagcgactgcctctgccgcctcacctctgaccttcccgactctagatgatttcattccccctcatctgcagaggtggccccaccacagccagccagcccgcgcctctggctcctttgcccccattagccagacgccaccatccttctcaccaccacctccgctggtccctcctgccccggaggacctccgcagagtctcggagcctgacctcacgggagctgtttcgagtaccgattccagtcctctactaaatgaagtttcttcttcccttattggaactgattcccaagcctttccatcagttagcaagccttcatccgcctatccctccacaacgattgtcaatcctactattgtgctcttgcaacacaatcgagaacagcaaaaacgactcagtagcctttcagatcctgtctcagaaagaagagtgggagagcaggactcagcaccaacccaggaaaaacccacctcacctggcaaggctattgaaaaaagagcaaaggatgacagtaggcgggtggtgaagagcactcaggacttaagcgatgtttccatggatgaagtgggcatcccactccggaacactgagagatcaaaagactggtacaagactatgtttaaacagatccacaaactgaacagagatgatgattcagatctgtactctcccagatactcattttctgaagacacaaaatctcccctttctgtgcctcgctcaaaaagtgagatgagctacattgatggtgagaaggtagtcaagaggtcggccacactacccctcccagcccgctcttcctcactgaagtcaagctcagaaagaaatgactgggaacccccagataagaaagtagacacaagaaaatatcgtgcagagcccaagagcatttacgaatatcagcctggcaagtcttccgttctgaccaacgaaaagatgagtcgggatataagcccagaagagatagatttaaagaatgaaccttggtataaattcttttcggaattggagtttgggaaaccgcctcccaaaaagatatgggattatactcctggagactgctctatccttcctagagaggatagaaagactaatctagacaaagatctcagcctctgccagacagagttagaggcagatttagaaaaaatggagacgcttaataaagcacccagtgcaaacgtgccacagagctcagccatcagccctactccggaaatttcttcagagactcctggatatatatattcttccaacttccatgcagtgaagagggaatcagacggggctcctggggatctcactagcttggagaatgagagacaaatttataaaagtgtcttggaaggtggtgacatccctcttcagggcctgagtgggctcaagcgaccatccagctctgcttccactaaagattcagaatcgccaagacattttataccagctgattacttggaatccacggaagaatttattcgaagacgtcatgatgataaagagaaacttttagcggaccagagacgacttaaacgcgagcaagaagaggctgatattgcagctcgacgccacacaggcgtcattccgacgcaccatcagtttatcactaatgagcgctttggggacctcctcaatatagacgatactgcaaaaaggaaatctgggtcagagatgagacctgccagagccaaatttgactttaaagctcagacactaaaggagcttcctctgcagaagggagatattgtttacatttataagcaaattgatcagaactggtatgaaggagaacaccacggccgggtgggaatcttcccacgcacctacatcgagcttcttcctcctgctgagaaggcacagcccaaaaagttgacaccagtgcaggttttggaatatggagaagctattgctaagtttaactttaatggtgatacacaagtagaaatgtccttcagaaagggtgagaggatcacactgctccggcaggtagatgagaactggtacgaagggaggatcccggggacatcccgacaaggcatcttccccatcacctacgtggatgtgatcaagcgaccactggtgaaaaaccctgtggattacatggacctgcctttctcctcctccccaagtcgcagtgccactgcaagcccacagttttccagtcacagcaagctcatcacgccagccccctcatctctgccccactcccgccgagccctgtcccccgagatgcacgctgtcacctctgagtggatctcactgactgtgggggtcccaggcaggcgttctctggccctgaccccacccttgcctcctctgccagaggcttctatctataacactgaccacctcgccttgtcaccaagggccagtccctccctgtctctcagcctcccccatttgagttggtcagatcgtcccaccccacgatcagtagcttctccactggccctaccttccccacacaaaacctactccctagcacctacttcccaggcctcccttcacatgaatggagacggtggtgtccacacgccatcttcaggcatccaccaagatagcttcttgcagctgccgctggggagctctgatagtgtcatctcccagcttagtgatgcctttagcagccagagcaagaggcagccatggcgcgaagagagtggacaatatgagaggaaagcagagaggggggcaggcgaaagaggccctggtggacccaagatctctaagaagagctgcttgaagccttcagacgtggtcaggtgcctgagtactgaacagagactctcagatctcaacacccctgaggagagccggcccggcaagcccctgggtagcgcttttccaggaagtgaggctgagcagacagagcggcatagaggtggcgagcaggcggggaggaaagctgctcggagaggtgggagccagctttctcatcattcattgagagcaggaccagatctcacagaatctgaaaagagctatgtgcaacctcaagcccagcagcgaagagtcacccccgacaggagtcaaacctcacaagatttatttagctatcaagcattatatagctatataccacagaatgatgatgagttggaactccgcgatggagatatcgttgatgtcatggaaaaatgtgacgatggatggtttgttggtacttcaagaaggacaaagcagtttggtacttttccaggcaactatgtaaaacctttgtatctataagaagactgaaaaccatggagattatttttattggaggaggaagcatcattcatgaaccgatctttttagttgagtcagtaggaaaattaatacagtggataaagtaagaagcaaaagacagggacagagaagtgttgtgtttaaaacccaagcctgtctaaggttactgtgtattagacagggccgaactagtgtgctgagcaaaaagaattgaagcaaattgtatttacttagccgcttctgggagccacttcagcctttcccctcccctccacttcttgggtaatctgacctgaagcatagtccaggagcagagttagccagaaatgcctcctgctgccccagccttagagagctcccatctcaatcattgagcctgaaggcttcaagcccaagaatgcaacaagacccccagcctacatttctcagctcccctggagccagctgatcctgtaacgctgctggaggtcagtctgagctaccaagactgtccctagacaaaggtggagtcccccacactgcccaagaccaaatccctcactcaacctgctgaggtgtggatggggaaacagaggcaaaactgaggcacctgatgcattcagcctgctgtgcagcagtgccattgactgccctgatgttcagagagaaacgcacacaaggtttgcccatgagaattggggagcagatggccaagcagataggttatgtctgttttctgagtgatgaagtcaggaagccctgtggctctggaggccacttgtggttcattcttttcccatatccttggcttttagaaatggttaccttcaggacagtgcagctgcatttatcagagcactattgctaagttttcttttctggcttgtgtttttctgggacagtttagaattgggaggcctattctcatagaacaccaaaaatgatgttcagtgattcatttaacatacaccaatgtactctggctgctggggggacaaccataagcaagacatgcccagggtttgccgtggctccagatctactccctgtaggagttcaaggatcacacaaacggtagtaaccagggttgtgaatctgagtacaccctggcaaggcttctcttcagactgaagcagcaattctgccactaccagcagcaaccaggacgtctgttctttgtgggggccagatcagaagagagaggcccctgtgacgcccgggctgcttggtcacaactctgtccaattcaaggatgtttatcggcctctcttagatcctgagtgagacaaatacagaaatgacccattccctgcccaccagaaactcagaggtgattggggagactgacacaggaaaatgaacttaatcaagagagactgtgatatgtgctaagaagggtgtgagggagggagagatgaattttccctggagggatcctagaaagcattgtcatattgccatctccattagctcacttttaaacaactagggtgctggaagaacctttgtctgagggtagttcatagctggaaatacttggaatattttccagagtctctaaactctcatcttcccccacagatacacatccaagctcacaaataggagtagcaattctaggtggtagggttgtgtacggaacccctggctgtctgcatatatctcagaattaccccaggaccattgtcccaaagtctagagtctttacaggtaggcaaaatttgttttcaatgcctgtgcctcagctgctgtcacaaatacccatcttaggatcccatcagcttcccatcccccaccagacagccacagtaccctcactttctccctattgttctttcaaatcctgttctcaggaaagaaactgccactaattcattcacactaaggtgtaaatgattgataataggaatgagttacctcttcccacagacatttgtttttaagtatgacagagcagggccttaatcccaagggaaaaggttatggaactggagggggtgagctttctgggtagaaggagacttcctgaatttccttaaaacccagtaagagtaagacctgttgttttggaaggtctgctccaccatctaagagcactgtttttttttttttgttgttgttgttgttttacggtctctgagggaatatagtaaaaatgcatatgcacgtgcaatttgcacggcagcatttcaccgattgtggactgtattggctaatgtgtttcctggtctttagatgcaaaccattaataacactatcttatctcatagttttttcaggggtgcttcttgattagtagggaattttgaacacctctttaaatacagctagaaaataaaaccaatttgtaaagccacatttgcatatgatgccagcctcacgcatttgtatatctccagaaattcaggtatgcctcaccaatttgcccgtctttaataaaatcttgtgttaaaatttgcatcacgtcgccttcctatgtatgacgaaacaagaaacagagatttccaattgctcttttgtcttcagacatttagtaatataaagtacctatttttatgctgaaatgtttatacaggtttattaatagcaagtgcaactaactggcggcatgccttgcaacacattttgatatattagccatgcttccgggtaaaggcaagccccaaactccttatcttttgcagtctctctgggatcagtaaaagaaaaaaaaaataatgtgcttaagaagtgggactgtaaatatgtatatttaactttgtatagcccatgtacctaccttgtatagaaaaataattttaaaaatttgaatggaagggggtaaaggaagtcatgaagtttttttgcatttttatttaaatgaaggaattccaaataactcacctacagatttttagcacaaaaatagccattgtaaagtgttaaaatttacgataagtattctattggggaggaaaggtaactctgatctcagttacagtttttttttcctttttaatttcattattttgggtttttggtttttgcagtcctatttatctgcagtcgtattaagtcctattgctagaataggttactacaaaaaaggttatattctgaaagaaaaataactgacattatatataaccaattaatttaaagtattgccatttaaattacacactgagagcatgtcctatgcagacatagatttttctgttcatttatttttcttcattgcagtggattgatttgataaatagatgtgttgaattactacatttgctgtacatattatttaataaactttattcagaattgcgtggc

SEQ ID NO: 109246 - protein, 811 aa, Artificial Sequence
  derived and/or modified sequence
MSSECDGGSKAVMNGLAPGSNGQDKDMDLTKICTGKGAVTLRASSSYRETPSSSPASPQETRQHESKPGLEPEPSSADEWRLSSSADANGNAQPSSLAAKGYRSVHPNLPSDKSQDSSPLLNEVSSSLIGTDSQAFPSVSKPSSAYPSTTIVNPTIVLLQHNREQQKRLSSLSDPVSERRVGEQDSAPTQEKPTSPGKAIEKRAKDDSRRVVKSTQDLSDVSMDEVGIPLRNTERSKDWYKTMFKQIHKLNRDDDSDLYSPRYSFSEDTKSPLSVPRSKSEMSYIDGEKVVKRSATLPLPARSSSLKSSSERNDWEPPDKKVDTRKYRAEPKSIYEYQPGKSSVLTNEKMSRDISPEEIDLKNEPWYKFFSELEFGKPTNLDKDLSLCQTELEADLEKMETLNKAPSANVPQSSAISPTPEISSETPGYIYSSNFHAVKRESDGAPGDLTSLENERQIYKSVLEGGDIPLQGLSGLKRPSSSASTKDSESPRHFIPADYLESTEEFIRRRHDDKEKLLADQRRLKREQEEADIAARRHTGVIPTHHQFITNERFGDLLNIDDTAKRKSGSEMRPARAKFDFKAQTLKELPLQKGDIVYIYKQIDQNWYEGEHHGRVGIFPRTYIELLPPAEKAQPKKLTPVQVLEYGEAIAKFNFNGDTQVEMSFRKGERITLLRQVDENWYEGRIPGTSRQGIFPITYVDVIKRPLVKNPVDYMDLPFSSSPSRSATASPQQPQAQQRRVTPDRSQTSQDLFSYQALYSYIPQNDDELELRDGDIVDVMEKCDDGWFVGTSRRTKQFGTFPGNYVKPLYL

SEQ ID NO: 109247 - DNA, 2436 bp, Artificial Sequence
  derived and/or modified sequence
atgagcagcgagtgcgacggcggcagcaaggccgtgatgaacggcctggcccccggcagcaacggccaggacaaggacatggacctgaccaagatctgcaccggcaagggcgccgtgaccctgagagccagcagcagctacagagagacccccagcagcagccccgccagcccccaggagaccagacagcacgagagcaagcccggcctggagcccgagcccagcagcgccgacgagtggagactgagcagcagcgccgacgccaacggcaacgcccagcccagcagcctggccgccaagggctacagaagcgtgcaccccaacctgcccagcgacaagagccaggacagcagccccctgctgaacgaggtgagcagcagcctgatcggcaccgacagccaggccttccccagcgtgagcaagcccagcagcgcctaccccagcaccaccatcgtgaaccccaccatcgtgctgctgcagcacaacagagagcagcagaagagactgagcagcctgagcgaccccgtgagcgagagaagagtgggcgagcaggacagcgcccccacccaggagaagcccaccagccccggcaaggccatcgagaagagagccaaggacgacagcagaagagtggtgaagagcacccaggacctgagcgacgtgagcatggacgaggtgggcatccccctgagaaacaccgagagaagcaaggactggtacaagaccatgttcaagcagatccacaagctgaacagagacgacgacagcgacctgtacagccccagatacagcttcagcgaggacaccaagagccccctgagcgtgcccagaagcaagagcgagatgagctacatcgacggcgagaaggtggtgaagagaagcgccaccctgcccctgcccgccagaagcagcagcctgaagagcagcagcgagagaaacgactgggagccccccgacaagaaggtggacaccagaaagtacagagccgagcccaagagcatctacgagtaccagcccggcaagagcagcgtgctgaccaacgagaagatgagcagagacatcagccccgaggagatcgacctgaagaacgagccctggtacaagttcttcagcgagctggagttcggcaagcccaccaacctggacaaggacctgagcctgtgccagaccgagctggaggccgacctggagaagatggagaccctgaacaaggcccccagcgccaacgtgccccagagcagcgccatcagccccacccccgagatcagcagcgagacccccggctacatctacagcagcaacttccacgccgtgaagagagagagcgacggcgcccccggcgacctgaccagcctggagaacgagagacagatctacaagagcgtgctggagggcggcgacatccccctgcagggcctgagcggcctgaagagacccagcagcagcgccagcaccaaggacagcgagagccccagacacttcatccccgccgactacctggagagcaccgaggagttcatcagaagaagacacgacgacaaggagaagctgctggccgaccagagaagactgaagagagagcaggaggaggccgacatcgccgccagaagacacaccggcgtgatccccacccaccaccagttcatcaccaacgagagattcggcgacctgctgaacatcgacgacaccgccaagagaaagagcggcagcgagatgagacccgccagagccaagttcgacttcaaggcccagaccctgaaggagctgcccctgcagaagggcgacatcgtgtacatctacaagcagatcgaccagaactggtacgagggcgagcaccacggcagagtgggcatcttccccagaacctacatcgagctgctgccccccgccgagaaggcccagcccaagaagctgacccccgtgcaggtgctggagtacggcgaggccatcgccaagttcaacttcaacggcgacacccaggtggagatgagcttcagaaagggcgagagaatcaccctgctgagacaggtggacgagaactggtacgagggcagaatccccggcaccagcagacagggcatcttccccatcacctacgtggacgtgatcaagagacccctggtgaagaaccccgtggactacatggacctgcccttcagcagcagccccagcagaagcgccaccgccagcccccagcagccccaggcccagcagagaagagtgacccccgacagaagccagaccagccaggacctgttcagctaccaggccctgtacagctacatcccccagaacgacgacgagctggagctgagagacggcgacatcgtggacgtgatggagaagtgcgacgacggctggttcgtgggcaccagcagaagaaccaagcagttcggcaccttccccggcaactacgtgaagcccctgtacctgtag

SEQ ID NO: 109248 - DNA, 2436 bp, Artificial Sequence
  derived and/or modified sequence
atgtctagcgaatgtgacggggggagtaaggcagtaatgaatggcctggcaccaggctcaaacgggcaggacaaggatatggatcttacaaaaatttgcacaggcaagggcgctgtgaccctgcgtgcctcgagttcttacagagagaccccttcaagctctcctgcttctccgcaagagacgcggcagcatgagtccaaacctggacttgagccagagcctagctctgcggacgagtggaggctctctagcagcgccgacgccaatggaaacgcccagccatcctcgcttgctgccaaagggtaccgatcggtccacccaaatttgccttccgataagtctcaggattccagtcccctcctgaatgaagtgagttctagcctcattgggaccgactcgcaggctttccccagcgtcagcaagcccagctcagcttacccttccaccaccattgtcaacccaaccatagttctgctgcagcacaaccgggaacaacagaagaggctgagttccctcagtgaccccgtcagcgagaggagggtcggggagcaagactctgcgcccacgcaagagaaaccaacttctcctggcaaagccattgagaagcgggcaaaggacgatagtcgccgtgtggtgaaaagtacccaggatctgtccgacgtgtctatggacgaagtgggaattcccctgcgcaacacggagcggtctaaggactggtacaaaacaatgtttaagcagattcacaaacttaaccgggacgacgactctgacctctatagtccacgatacagcttttctgaagatactaaaagtcccctatctgtgccaagatcgaagtctgagatgtcatacatcgacggagaaaaagtggtgaaacgctctgctaccttgccactaccggcacggagttccagcttaaaatcttctagcgagcgaaacgactgggaaccacccgacaaaaaggtcgacaccagaaagtaccgcgccgagccaaaaagtatttacgagtatcagcccggcaaatcctcggtgctgacaaacgaaaaaatgagccgggatattagcccagaggaaatcgacctgaagaacgagccctggtataagttctttagcgaactggagtttggaaaacctaccaatctggacaaggacctttctctctgccaaacagaactggaggccgacctggagaagatggaaaccctcaataaggcgccttcggcgaatgtacctcagtcctctgccatctcaccgactcccgaaatttcgagcgaaacacctgggtatatatactcgtccaacttccacgctgtcaaaagagaaagcgacggagcgcccggcgatttgacaagtctagagaacgaacgccaaatctacaaaagtgttcttgagggtggcgatatccccctgcaagggctctcggggctgaaaagaccctcctcctcggcctccacaaaagacagcgaatctccaaggcattttattccagccgattacctcgagtctactgaagaatttatccggaggcggcacgatgacaaggagaaactgcttgctgaccagaggcgcctgaaaagggaacaagaggaagccgatatcgctgcccgccgtcacaccggagttatccccacccaccatcaattcattaccaacgagaggttcggcgacctgcttaatatcgacgacacagcaaaaaggaaaagtggcagcgagatgcgtccagcccgggccaaatttgacttcaaggctcagacacttaaagagttgccactgcagaagggggatatcgtctatatttataagcagatcgatcagaattggtacgaaggggagcaccacggcagagtgggcatcttcccacggacgtacattgagttactgcctcccgccgaaaaggctcagcccaaaaaactgactcctgtccaggttcttgagtatggtgaagctattgcgaagttcaatttcaatggtgacacacaggtggagatgtccttccgcaaaggagaaaggatcaccctgctgaggcaggtagacgagaactggtatgaggggcgcattccagggacctctcgccagggcatcttcccgatcacatacgtggacgtgatcaaacgcccccttgttaaaaaccccgtggactacatggatctccctttttcttcctcaccatcaagaagcgcaaccgccagccctcaacagccccaggctcagcaacggcgtgtgacaccggatagatcgcagacctcccaggacttgttttcttatcaggccctttattcctatattccgcagaatgatgacgaactcgaactccgcgacggtgatattgtcgatgtaatggagaaatgtgacgatggctggttcgtcgggacatccagaaggaccaagcagttcgggaccttccctgggaactatgtgaaaccactctatctttag

SEQ ID NO: 109249 - DNA, 2436 bp, Artificial Sequence
  derived and/or modified sequence
atgagcagtgaatgtgatggcggcagcaaggctgtgatgaatggcctggcccctggcagcaatggccaggacaaggacatggacctgaccaagatctgcacaggaaaaggagctgtgaccctgcgggccagcagcagctaccgggagacccccagcagcagccctgccagcccccaggagacccggcagcacgagagcaagccaggcctggagcctgagcccagcagcgcagatgagtggaggctgagcagcagcgcagatgccaatggaaatgcccagcccagcagcctggccgccaagggctacagatctgtgcaccccaacctgcccagcgacaagagccaggacagcagccccctgctgaatgaggtgagcagcagcctgattggaacagacagccaggccttccccagcgtgtccaagcccagcagcgcctaccccagcaccaccatcgtgaaccccaccatcgtgctgctgcagcacaaccgggagcagcagaagaggctgagcagcctgagtgaccctgtgtctgaaagaagagtgggggagcaggacagcgcccccacccaggagaagcccaccagccctgggaaggccatcgagaagagggccaaggatgacagcagaagagtggtgaagagcacccaggacctgagtgatgtgtccatggatgaggtgggcatccccctgaggaacacagagaggagcaaggactggtacaagaccatgttcaagcagatccacaagctgaacagagatgatgacagcgacctgtacagcccccgctacagcttcagcgaggacaccaagagccccctgtctgtgcccaggagcaagtctgagatgagctacattgatggagagaaggtggtgaagaggtctgccaccctgcccctgcctgcccggagcagcagcctgaagagcagcagcgagagaaatgactgggagcccccagacaagaaggtggacaccaggaagtacagagctgagcccaagagcatctatgagtaccagcccgggaagagctctgtgctgaccaatgagaagatgagccgggacatcagccctgaggagattgacctgaagaatgagccctggtacaagttcttcagcgagctggagtttgggaagcccaccaacctggacaaggacctgagcctgtgccagacagagctggaggccgacctggagaagatggagaccctgaacaaggcccccagcgccaacgtgccccagagcagcgccatcagccccaccccagagatcagcagcgagaccccaggctacatctacagcagcaacttccacgctgtgaagcgggagagtgatggagcccctggggacctgaccagcctggagaatgaaaggcagatctacaagtctgtgctggagggcggggacatccccctgcagggcctgagcggcctgaagaggcccagcagcagcgccagcaccaaggacagcgagagccccaggcacttcatcccagctgactacctggagagcacagaggagttcatcagaagaagacatgatgacaaggagaagctgctggccgaccagaggcggctgaagcgggagcaggaggaggccgacattgctgcccggcggcacactggagtcatccccacccaccaccagttcatcaccaatgaaagatttggagacctgctgaacattgatgacacagccaagaggaagagcggcagcgagatgaggcctgcccgggccaagtttgacttcaaggcccagaccctgaaggagctgcccctgcagaagggggacatcgtgtacatctacaagcagattgaccagaactggtatgaaggagagcaccacggccgggtgggcatcttccccaggacctacatcgagctgctgcccccagctgagaaggcccagcccaagaagctgacccctgtgcaggtgctggagtatggagaggccatcgccaagttcaacttcaacggggacacccaggtggagatgtccttcagaaaaggagagcgcatcaccctgctgcggcaggtggatgagaactggtatgagggccgcatccctggcaccagccggcagggcatcttccccatcacctacgtggatgtgatcaagaggcccctggtgaagaaccctgtggactacatggacctgcccttcagcagcagccccagccgcagcgccacagccagcccccagcagccccaggcccagcagaggagagtgaccccagacaggagccagaccagccaggacctcttctcctaccaggccctgtacagctacatcccccagaatgatgatgagctggagctgagagatggagacatcgtggatgtgatggagaagtgtgatgatggctggtttgtgggcaccagcaggaggaccaagcagtttggcaccttccctggcaactacgtgaagcccctgtacctgtag

SEQ ID NO: 109250 - DNA, 2436 bp, Artificial Sequence
  derived and/or modified sequence
atgagcagcgagtgcgacggcggcagcaaggccgtgatgaacggcttagccccagggagcaatggccaggataaagatatggacttgacaaagatctgcactggaaaaggggcagtgaccctgcgagcctcctcgagttaccgcgagaccccaagtagctccccggccagtccgcaggagacacggcaacacgagagcaaacctgggctcgaaccagaaccttcttcagctgacgaatggcgcctatccagcagtgcagacgccaatggcaacgctcagccaagttccctggcagccaaaggataccggagtgtgcatcctaatttaccctctgataagtctcaggattctagcccccttcttaacgaagtatcctctagtttgattggcaccgacagccaagctttcccctccgtttcaaaaccctcgagcgcctaccccagtaccacaatcgtaaatcctacaatcgttctcctgcagcataatcgtgagcagcaaaagaggttgtcctctctttcggatccggtgtccgaacgcagagttggcgaacaggattctgcccctacccaagagaaacccaccagccctggaaaggcaattgagaagagggccaaggatgacagtcgtcgagtcgttaagagtacccaggatttgtctgacgtgtccatggacgaggtgggcatcccgctgcgcaatactgagcgctccaaggattggtacaagacaatgttcaaacagatccataaactcaacagagacgatgacagtgacctctactcgcccaggtactcgttcagcgaggacacgaagagtccactctcagtccccaggagcaagtcagagatgagttatattgatggcgagaaagtggttaagaggtccgcaactctgccgcttccggccaggtcaagttcccttaagtcttccagtgagcggaatgactgggaaccacctgacaagaaggtggacacaaggaagtaccgggccgagccaaaatccatttacgagtaccaaccaggcaagtcctcagtcctgactaacgagaagatgagccgcgatatctctccggaagaaattgacttgaagaatgagccatggtacaaatttttttctgaattggaattcggcaaaccaaccaatctagacaaggatcttagcctctgccagaccgagctggaggccgatctcgaaaagatggagaccctcaacaaagcaccaagcgcgaacgtgccccagtcaagcgccatcagcccaacaccagaaattagttctgagacaccaggctacatttatagcagcaacttccatgccgtgaagcgagagtcggacggcgcaccaggtgacctcaccagccttgagaatgaaagacagatatacaaatctgtgctggagggaggcgatattcccctccaggggttaagcggcctcaagcggccaagttctagcgccagcacaaaggacagcgagtcccctcggcacttcattcctgccgattatctggagtctactgaagaattcattagacggcggcacgacgacaaggagaagctcctagccgaccagagaaggctgaagcgtgagcaggaagaagcagatatcgcggcccgacggcacaccggagtcatccccacacaccatcaatttatcacgaacgagagatttggcgatctcctgaacattgacgacactgccaagagaaagagcgggtccgagatgcggccagcaagagccaagtttgatttcaaagcccagactctgaaagaactaccgcttcagaaaggcgacatcgtgtacatctacaagcagatagaccagaactggtatgaaggagaacaccatggccgggtgggcatctttccccgtacatacattgagctgctcccacccgccgagaaggcccagcccaaaaagctcacacctgtacaggtactggagtacggggaggcaatcgcgaagttcaattttaacggggacacccaggtcgagatgtcatttcgaaaaggcgagaggattaccctgctccgccaggttgacgagaactggtatgaaggaagaattcctggtacctcccgacaggggatattccctatcacttatgtggatgttatcaaacgtccccttgtgaaaaaccctgtcgactatatggatctgccattctcatccagtccatctcgttcagccaccgcatcccctcagcagccgcaagctcaacagcgccgcgtgacgccggatcggagtcagacctctcaagatctcttctcttatcaggcactctattcttacatccctcagaatgatgatgagctcgagctgagagatggggatattgttgacgtcatggaaaagtgcgatgacggctggttcgtggggacttcaaggaggactaaacagttcggtactttccctggaaattatgttaagcctctctacctatag

SEQ ID NO: 109251 - DNA, 2436 bp, Artificial Sequence
  derived and/or modified sequence
atgtcttctgaatgcgatgggggaagcaaagcagtgatgaatgggctggcacccggatcaaatggccaggataaggatatggatctgactaagatttgcaccggtaagggagcagtaaccctgagggcttcaagtagctatcgagaaaccccttcctcgtcgcctgcaagtccgcaagaaaccaggcagcacgagtcaaagcccggacttgagcccgagcctagttccgcagatgaatggcgcctcagctccagtgcagacgcaaatgggaatgcccagcctagttcattggctgctaaaggataccgcagtgtgcacccaaatctcccttcagataagagccaggattcatcccccctccttaacgaggtgagctcgtcccttatcggaaccgattcgcaggcgttcccaagcgtgtctaagccctccagtgcgtatccatccactacaattgtaaatcccactatagtgcttctgcaacataatcgcgagcagcagaaacgccttagctccctctccgacccagtgtcagagcgaagggtgggagagcaagactctgcgcctacccaggaaaagccaactagcccagggaaggccattgagaagagggccaaggatgactcccgcagggttgttaagagcacgcaggatttatcagacgtgtcaatggacgaggtggggatccccctccggaatacggagagatctaaagactggtataaaacaatgttcaaacaaatacacaaactcaatcgcgatgatgactccgatctttacagcccgcgttattccttcagtgaagacactaaatcacctttgtccgtgcctcggagcaaatctgaaatgtcatatattgatggagagaaggttgtaaaacggtccgccaccctgcccctcccagccaggtcgtcatctcttaaatcgtcctcggaacgcaacgactgggagccacccgacaagaaggtggacacacgcaaatatcgcgcagaaccaaagagcatatacgaatatcagcctgggaagagtagcgttctgaccaacgaaaaaatgagccgagacattagcccagaagaaatcgacctcaagaatgaaccttggtacaaattcttttccgaactagaattcggaaagccaacaaatttggacaaggacttgtctctgtgtcagacggaactggaggcagacttggaaaaaatggagacccttaataaagcccctagtgccaatgtgcctcagtcaagcgccattagtccaacacctgagatctcttctgagaccccgggttatatctactcaagcaactttcatgctgtcaaaagggagtcagacggcgctcctggcgacctgacatccctggagaatgaacgccagatctacaaaagcgtcctcgaggggggtgacatcccacttcagggcctgagcggccttaagagaccatcttcatcggccagtaccaaagattccgaatcgcctcgccactttattcctgcagattacctggaatcaacagaggagttcatcagacgaaggcatgatgacaaggaaaagcttttggctgatcaacgccgactgaagcgcgagcaggaagaggccgatatagccgctaggagacatactggagtgattccgacccaccatcaattcatcaccaacgagcggtttggagacttgttgaacatcgacgatactgctaaaaggaaaagcggaagcgagatgcggcctgcgcgagccaagtttgactttaaggctcagacgctgaaagagctacccctgcagaagggcgatatcgtgtacatctataagcagattgatcagaattggtacgagggcgaacatcatgggagggtggggatctttccgaggacgtacattgagctcctcccgcctgcagagaaagctcaacccaagaagttaacaccggtgcaggtgttggaatacggagaggccatcgccaaattcaactttaacggagacacgcaggtggagatgtcttttcgaaagggcgagcggatcacactgttaaggcaggtcgacgagaattggtacgaaggtcggattcccggaacatctagacaggggattttccccatcacctacgtcgatgttatcaagagaccgctcgtgaagaaccctgtagattacatggatcttcccttctccagtagcccctctcgctcagccaccgctagtccccagcaacctcaagctcagcagcgccgagtaactccggatcgtagtcaaaccagccaagacctgttcagctaccaggcactatattcttacatccctcagaatgatgacgaactggaacttcgcgatggcgacatagtagacgtgatggagaagtgcgatgatgggtggttcgtggggacgagtcggaggacgaaacagtttggcacatttcctggcaattatgtgaaacccctctacctgtag

SEQ ID NO: 109252 - DNA, 2436 bp, Artificial Sequence
  derived and/or modified sequence
atgagttctgaatgtgatggtggttccaaagctgtgatgaatggcttggcacctggcagcaatgggcaagacaaagacatggatcttacaaaaatctgcactgggaagggagcggtgactctccgggcctcgtcttcctacagggaaaccccaagcagtagccctgcgagccctcaggaaacccggcaacacgaaagcaaaccaggtctggagccagagccttcttcagcagatgagtggaggctttcttccagtgctgatgccaatggaaatgcccagccctcttcactcgctgccaagggctacagaagtgtgcatcccaaccttccttctgacaagtcccaggattccagtcctctactaaatgaagtttcttcttcccttattggaactgattcccaagcctttccatcagttagcaagccttcatccgcctatccctccacaacgattgtcaatcctactattgtgctcttgcaacacaatcgagaacagcaaaaacgactcagtagcctttcagatcctgtctcagaaagaagagtgggagagcaggactcagcaccaacccaggaaaaacccacctcacctggcaaggctattgaaaaaagagcaaaggatgacagtaggcgggtggtgaagagcactcaggacttaagcgatgtttccatggatgaagtgggcatcccactccggaacactgagagatcaaaagactggtacaagactatgtttaaacagatccacaaactgaacagagatgatgattcagatctgtactctcccagatactcattttctgaagacacaaaatctcccctttctgtgcctcgctcaaaaagtgagatgagctacattgatggtgagaaggtagtcaagaggtcggccacactacccctcccagcccgctcttcctcactgaagtcaagctcagaaagaaatgactgggaacccccagataagaaagtagacacaagaaaatatcgtgcagagcccaagagcatttacgaatatcagcctggcaagtcttccgttctgaccaacgaaaagatgagtcgggatataagcccagaagagatagatttaaagaatgaaccttggtataaattcttttcggaattggagtttgggaaaccgactaatctagacaaagatctcagcctctgccagacagagttagaggcagatttagaaaaaatggagacgcttaataaagcacccagtgcaaacgtgccacagagctcagccatcagccctactccggaaatttcttcagagactcctggatatatatattcttccaacttccatgcagtgaagagggaatcagacggggctcctggggatctcactagcttggagaatgagagacaaatttataaaagtgtcttggaaggtggtgacatccctcttcagggcctgagtgggctcaagcgaccatccagctctgcttccactaaagattcagaatcgccaagacattttataccagctgattacttggaatccacggaagaatttattcgaagacgtcatgatgataaagagaaacttttagcggaccagagacgacttaaacgcgagcaagaagaggctgatattgcagctcgacgccacacaggcgtcattccgacgcaccatcagtttatcactaatgagcgctttggggacctcctcaatatagacgatactgcaaaaaggaaatctgggtcagagatgagacctgccagagccaaatttgactttaaagctcagacactaaaggagcttcctctgcagaagggagatattgtttacatttataagcaaattgatcagaactggtatgaaggagaacaccacggccgggtgggaatcttcccacgcacctacatcgagcttcttcctcctgctgagaaggcacagcccaaaaagttgacaccagtgcaggttttggaatatggagaagctattgctaagtttaactttaatggtgatacacaagtagaaatgtccttcagaaagggtgagaggatcacactgctccggcaggtagatgagaactggtacgaagggaggatcccggggacatcccgacaaggcatcttccccatcacctacgtggatgtgatcaagcgaccactggtgaaaaaccctgtggattacatggacctgcctttctcctcctccccaagtcgcagtgccactgcaagcccacagcaacctcaagcccagcagcgaagagtcacccccgacaggagtcaaacctcacaagatttatttagctatcaagcattatatagctatataccacagaatgatgatgagttggaactccgcgatggagatatcgttgatgtcatggaaaaatgtgacgatggatggtttgttggtacttcaagaaggacaaagcagtttggtacttttccaggcaactatgtaaaacctttgtatctataa

SEQ ID NO: 109253 - DNA, 357 bp, Artificial Sequence
  derived and/or modified sequence
atgacagcggtccatgcaggtaacattaattttaaatgggaccctaagtcattagagatcaggaccctagctgtggagagactcctggagcccctggtgacccaagtgacaaccttggtcaacactaactcaaaaggtccgtctaataagaaacgagggcgctccaagaaggcacacgttctagccgccagtgtggagcaggccacggagaacttcctggagaaaggggacaaaatagcaaaggaaagccaattcttgaaagaagagctagtcgccgccgtggaggacgtccgaaaacagggggatttgatgaaagctgccgcgggggagttcgccgatgacccatgctctagttag

SEQ ID NO: 109254 - DNA, 420 bp, Artificial Sequence
  derived and/or modified sequence
atgactgcggttcatgcaggaaatataaatttcaagtgggaccctaaatccttggaaatccggacacttgctgtcgaaagactgttggaaccactcgtcacacaggttacaactttagtaaataccaactccaaaggaccctccaataaaaaaagaggtcgatcaaaaaaggcacacgtgctggctgccagcgtagaacaggctaccgaaaatttcctagaaaagggtgataagatcgctaaggagtcccagtttctaaaagaagaacttgtggctgccgtggaagacgtacggaagcagggagatttaatgaaggccgctgctggagagtttgcggatgacccctgctcctctgttaagcgtggaaatatggtaagagccgccagagcgctgctgtctgccgtgactcgactattgtag

SEQ ID NO: 109255 - DNA, 648 bp, Artificial Sequence
  derived and/or modified sequence
atgacagcagtgcacgccggtaatatcaactttaagtgggacccaaaaagcttggaaatcaggacccttgctgttgaaagattactggagcctctcgtcactcaggtcacgacactagtgaatacaaatagcaagggccccagcaacaagaaacgtggaagaagtaaaaaagcccacgtactagcagccagcgtggagcaggccacggaaaatttcctggaaaaaggagacaagatcgccaaagaatctcagttcctgaaggaagagttagtggcagctgtggaggacgtgcgcaagcagggcgacttgatgaaggcggcagcaggtgaattcgccgacgacccttgttcttccgtaaagcggggcaatatggttcgcgccgcaagagccctcctatccgcagttaccagactgctcatactggccgacatggccgatgtgtataagttgctggtacagctgaaggtggtggaagatggaattctgaagctgaggaacgcagggaacgagcaagacctcggcattcagtataaagctctcaaacctgaggtggataaactcaatattatggctgctaaaaggcagcaggagctcaaggacgtgggacatcgggatcagatggccgctgcccgaggaatactgcagtag

SEQ ID NO: 109256 - DNA, 306 bp, Artificial Sequence
  derived and/or modified sequence
atgaccgcagtccacgcagggaacattaattttaaatgggatccaaagagcctggagatacggacgctcgcagtggagagactgctggaaccccttgttacccaggtgactacactcgtaaacactaatagcaaaggaccttccaataagaagcgaggcagatccaagaaggcccacgtcctcgccgcatcagtggaacaagcaacggaaaactttctggagaaaggcgataagatagccaaagagagtcagttcctgaaagaagaactggtcgccgccgtcgaagacgttcgaaagcaggggtag

SEQ ID NO: 109257 - DNA, 372 bp, Artificial Sequence
  derived and/or modified sequence
atgaccgctgtccacgccggaaacatcaacttcaaatgggatccgaaaagtctggagatcagaacacttgctgtagaacgtctcctggagccactagttacccaggtaacaactcttgtcaatacaaactctaaaggtcctagtaacaaaaagagaggaaggtccaagaaagcacacgtcttggccgctagtgtggagcaggcaaccgagaattttctggaaaagggggacaaaattgcaaaagaatcacaattcctgaaagaggagttggtcgccgccgtcgaagacgtacgcaagcagggagacctgatgaaggcagcggccggggagtttgccgatgacccttgcagtagcgtcaagcgaggcaattag

SEQ ID NO: 109258 - DNA, 471 bp, Artificial Sequence
  derived and/or modified sequence
atgacagccgtgcacgcaggtaatatcaacttcaagtgggatccgaaatctctagagatccggaccttggcggtggagagactgttagaaccacttgtgacacaagtcacgaccctagtaaataccaactctaagggcccttcaaataagaagagagggcggagcaaaaaagcccacgtcctagctgcctccgtggagcaggccacggagaacttcctggaaaaaggcgataagattgcaaaggagtcacagttcctgaaggaagagctggtcgctgcagtcgaggacgtaagaaagcagggagatctcatgaaagctgctgccggcgagttcgctgatgacccgtgcagttccgtaaagaggggaaatatggtgcgggccgccagggcactcctcagtgcagttacacgcctgctcatcttggcagacatggctgacgtctacaagttgctcgtgcagctgaaggtttag

SEQ ID NO: 109259 - DNA, 285 bp, Artificial Sequence
  derived and/or modified sequence
atgacggccgtccacgctggcaatattaatttcaaatgggatcccaagagtcttgagatccggaccctcgcagtggagagactgctggaaccattggtgacccaagtcacaaccctcgttaacactaatagcaaggggccaagtaacaagaagagaggacgctcaaagaaagcacacgtgctagccgcatccgtggagcaagccacagaaaatttcttggagaaaggcgataagattgccaaagagtcccaattccttaaagaagagctggtggctgcagtgtag

SEQ ID NO: 109260 - DNA, 357 bp, Artificial Sequence
  derived and/or modified sequence
atgacagctgtgcacgccggcaacatcaacttcaagtgggaccccaagagcctggagatccgcaccctggccgtggagcggctgctggagcccctggtgacccaggtgaccaccctggtgaacaccaacagcaagggccccagcaacaagaagaggggccgcagcaagaaggcccacgtgctggccgcctctgtggagcaggccacagagaacttcctggagaagggggacaagatcgccaaggagagccagttcctgaaggaggagctggtggccgctgtggaggatgtgaggaagcagggcgacctgatgaaggctgctgctggggagtttgctgatgacccctgcagcagctag

SEQ ID NO: 109261 - DNA, 420 bp, Artificial Sequence
  derived and/or modified sequence
atgacagctgtgcacgccggcaacatcaacttcaagtgggaccccaagagcctggagatccgcaccctggccgtggagcggctgctggagcccctggtgacccaggtgaccaccctggtgaacaccaacagcaagggccccagcaacaagaagaggggccgcagcaagaaggcccacgtgctggccgcctctgtggagcaggccacagagaacttcctggagaagggggacaagatcgccaaggagagccagttcctgaaggaggagctggtggccgctgtggaggatgtgaggaagcagggcgacctgatgaaggctgctgctggggagtttgctgatgacccctgcagctctgtgaagaggggcaacatggtgcgggccgcccgggccctgctgtctgctgtgacccggctgctgtag

SEQ ID NO: 109262 - DNA, 648 bp, Artificial Sequence
  derived and/or modified sequence
atgacagctgtgcacgccggcaacatcaacttcaagtgggaccccaagagcctggagatccgcaccctggccgtggagcggctgctggagcccctggtgacccaggtgaccaccctggtgaacaccaacagcaagggccccagcaacaagaagaggggccgcagcaagaaggcccacgtgctggccgcctctgtggagcaggccacagagaacttcctggagaagggggacaagatcgccaaggagagccagttcctgaaggaggagctggtggccgctgtggaggatgtgaggaagcagggcgacctgatgaaggctgctgctggggagtttgctgatgacccctgcagctctgtgaagaggggcaacatggtgcgggccgcccgggccctgctgtctgctgtgacccggctgctgatcctggccgacatggctgatgtgtacaagctgctggtgcagctgaaggtggtggaggatggcatcctgaagctgagaaatgctggaaatgagcaggacctgggcatccagtacaaggccctgaagccagaggtggacaagctgaacatcatggccgccaagaggcagcaggagctgaaggatgtgggccaccgggaccagatggctgctgcccggggcatcctgcagtag

SEQ ID NO: 109263 - DNA, 306 bp, Artificial Sequence
  derived and/or modified sequence
atgacagctgtgcacgccggcaacatcaacttcaagtgggaccccaagagcctggagatccgcaccctggccgtggagcggctgctggagcccctggtgacccaggtgaccaccctggtgaacaccaacagcaagggccccagcaacaagaagaggggccgcagcaagaaggcccacgtgctggccgcctctgtggagcaggccacagagaacttcctggagaagggggacaagatcgccaaggagagccagttcctgaaggaggagctggtggccgctgtggaggatgtgaggaagcagggctag

SEQ ID NO: 109264 - DNA, 372 bp, Artificial Sequence
  derived and/or modified sequence
atgacagctgtgcacgccggcaacatcaacttcaagtgggaccccaagagcctggagatccgcaccctggccgtggagcggctgctggagcccctggtgacccaggtgaccaccctggtgaacaccaacagcaagggccccagcaacaagaagaggggccgcagcaagaaggcccacgtgctggccgcctctgtggagcaggccacagagaacttcctggagaagggggacaagatcgccaaggagagccagttcctgaaggaggagctggtggccgctgtggaggatgtgaggaagcagggcgacctgatgaaggctgctgctggggagtttgctgatgacccctgcagctctgtgaagaggggcaactag

SEQ ID NO: 109265 - DNA, 471 bp, Artificial Sequence
  derived and/or modified sequence
atgacagctgtgcacgccggcaacatcaacttcaagtgggaccccaagagcctggagatccgcaccctggccgtggagcggctgctggagcccctggtgacccaggtgaccaccctggtgaacaccaacagcaagggccccagcaacaagaagaggggccgcagcaagaaggcccacgtgctggccgcctctgtggagcaggccacagagaacttcctggagaagggggacaagatcgccaaggagagccagttcctgaaggaggagctggtggccgctgtggaggatgtgaggaagcagggcgacctgatgaaggctgctgctggggagtttgctgatgacccctgcagctctgtgaagaggggcaacatggtgcgggccgcccgggccctgctgtctgctgtgacccggctgctgatcctggccgacatggctgatgtgtacaagctgctggtgcagctgaaggtgtag

SEQ ID NO: 109266 - DNA, 285 bp, Artificial Sequence
  derived and/or modified sequence
atgacagctgtgcacgccggcaacatcaacttcaagtgggaccccaagagcctggagatccgcaccctggccgtggagcggctgctggagcccctggtgacccaggtgaccaccctggtgaacaccaacagcaagggccccagcaacaagaagaggggccgcagcaagaaggcccacgtgctggccgcctctgtggagcaggccacagagaacttcctggagaagggggacaagatcgccaaggagagccagttcctgaaggaggagctggtggccgctgtgtag

SEQ ID NO: 109267 - DNA, 357 bp, Artificial Sequence
  derived and/or modified sequence
atgaccgccgtgcacgccggcaacatcaacttcaagtgggaccccaagtctctcgaaatcagaacactggctgtcgaacggctcctggagccacttgtgacgcaggtcactacattggtcaatactaactctaaaggtccatcaaacaaaaagaggggcaggtctaagaaggctcacgtgttagccgcttctgtggaacaggccacggaaaattttcttgaaaagggcgacaagatcgcgaaggaaagtcaattcctgaaggaggagcttgtggccgcagtggaggatgtgcgaaaacagggggaccttatgaaagcggcggctggggaattcgctgacgacccttgctcttcttag

SEQ ID NO: 109268 - DNA, 420 bp, Artificial Sequence
  derived and/or modified sequence
atgaccgccgtgcacgccggcaacatcaacttcaagtgggaccccaagtccctcgagatccgcaccctggccgtcgagcggctgctcgagcctctcgtgacacaagtgaccaccctggtaaatacgaactctaagggcccaagcaacaagaagcgagggaggtcaaaaaaggctcacgtcctcgcggcatccgtggaacaggcaacagaaaattttcttgaaaagggagacaaaatcgccaaagagagtcagtttctcaaggaagagctcgtcgccgccgtagaagacgtgaggaagcagggtgatctgatgaaagcagcagcaggggagttcgccgacgacccatgcagctcagtgaagcggggcaacatggtgcgggctgcccgggccctcttgtctgctgttactaggctgctgtag

SEQ ID NO: 109269 - DNA, 648 bp, Artificial Sequence
  derived and/or modified sequence
atgaccgccgtgcacgccggcaacatcaacttcaagtgggaccccaaaagtctggaaattagaacactggctgttgagcgccttctcgaaccattggtgacacaagtgaccacactggtaaacacgaacagtaaggggcctagtaataagaagaggggacgaagcaagaaggcccacgtccttgccgccagcgtcgagcaggcaaccgaaaattttttggagaaaggtgacaagatagcaaaagagtcccagtttttaaaggaagagcttgttgccgccgtcgaagatgtccgcaaacaaggcgatctcatgaaggccgctgccggcgagttcgccgatgacccttgctccagcgtgaagaggggtaatatggtgcgcgccgctagagccttgctgtctgctgtgactaggctcctcatcttggccgatatggctgatgtgtacaagttgctcgtgcaactcaaggtggtggaggatggcatcctgaagctgcgcaacgccggcaacgagcaagaccttggaatacagtacaaagcgctgaagccagaagtggacaaattgaatatcatggcagcgaagcgacagcaggagctgaaggacgtaggtcaccgtgatcagatggccgcagcacgagggattttgcagtag

SEQ ID NO: 109270 - DNA, 306 bp, Artificial Sequence
  derived and/or modified sequence
atgaccgccgtgcacgccggcaacatcaacttcaagtgggaccccaagagtctggaaattcggactctagctgtggagagactgctggaaccactggtaacacaggtgaccacacttgttaacacaaatagcaaaggcccatctaataagaagcgcggacgctccaaaaaagctcatgtcttagcagctagcgtggaacaagctacagaaaacttcttagaaaaaggagacaaaatcgccaaggagtcacagttcttgaaagaggaactggttgccgccgtggaggatgtacgcaagcagggatag

SEQ ID NO: 109271 - DNA, 372 bp, Artificial Sequence
  derived and/or modified sequence
atgaccgccgtgcacgccggcaacatcaacttcaagtgggaccccaaaagcctagaaatacgtactctcgctgtggagaggcttctggaaccactggtgacccaggtgacaacccttgtgaacactaactccaaaggtcctagtaacaaaaagcgcgggcggagcaagaaagcgcacgttttggctgcttcggtggagcaggctacagagaactttctggaaaaaggcgataagattgccaaggagtcccagtttctgaaggaggagctcgtggcggccgttgaagatgtgagaaaacagggagatctcatgaaggccgcagctggtgaattcgccgacgacccgtgtagttctgtcaaaagaggcaattag

SEQ ID NO: 109272 - DNA, 471 bp, Artificial Sequence
  derived and/or modified sequence
atgaccgccgtgcacgccggcaacatcaacttcaagtgggaccccaaatctttagagattcgaacccttgctgtggaaaggctgctggagcctctcgtcacccaggttaccacacttgtgaacaccaactcgaagggacctagtaacaagaagcgcggtagatcaaagaaggcacatgttcttgccgcctctgtggagcaggccactgagaactttctggagaaaggagacaagatagccaaagaaagccaatttctcaaagaggagcttgtagctgcagtggaggacgtccgaaagcagggagacctcatgaaggcagccgctggcgagttcgcggacgatccatgctcttccgtgaagagaggcaatatggtcagagccgcccgagctttactgtcggccgtcacgaggctcctgattttagctgacatggccgatgtgtataagctattggtccagctgaaagtgtag

SEQ ID NO: 109273 - DNA, 285 bp, Artificial Sequence
  derived and/or modified sequence
atgaccgccgtgcacgccggcaacatcaacttcaagtgggaccccaagagtctggagatcaggacgctggcggtggaacggctgctggagcccttggtgactcaggtcacgactctggtgaacaccaattcaaaaggcccctcaaataagaagcggggccgcagtaaaaaggcccatgtactggctgcctccgtcgagcaggctaccgaaaatttcctagagaagggagataaaatcgctaaagaatcacagtttctgaaggaagaattggtcgccgccgtgtag

SEQ ID NO: 109274 - DNA, 357 bp, Artificial Sequence
  derived and/or modified sequence
atgaccgctgtccacgctggaaacatcaacttcaagtgggaccctaagagtcttgagatacggactttagccgttgagcggctgctagagccactggtaacccaggttacaactctagtgaataccaattccaagggtccatccaataagaaacgtgggaggagcaaaaaggcacacgtcctagccgctagcgtggaacaggccactgagaactttctagagaaaggggataagatcgccaaggagagccagttcttgaaagaagagttagtggcagccgtagaggacgtgaggaagcagggcgacctgatgaaggccgctgccggtgagttcgcagacgacccttgcagctcttag

SEQ ID NO: 109275 - DNA, 420 bp, Artificial Sequence
  derived and/or modified sequence
atgaccgccgttcacgccggtaacattaacttcaagtgggacccaaaatccctcgaaatccgtacccttgccgtggaacggctgcttgaaccactggtcacccaggtgactacactcgtgaacacaaactctaagggcccatcgaacaaaaagagggggagatccaagaaggcacacgtgcttgccgcatccgtggaacaggccacagaaaactttctggaaaaaggagacaaaatcgctaaggagtctcagttcctgaaggaggaattggtagctgccgtggaggacgttagaaagcaaggcgatctaatgaaagccgcagcaggcgagtttgcagatgacccatgctcaagtgtaaagcgtgggaatatggtgcgggctgccagagcgttacttagcgcagtcactcgcctgctttag

SEQ ID NO: 109276 - DNA, 648 bp, Artificial Sequence
  derived and/or modified sequence
atgacagccgttcatgctggcaacatcaattttaagtgggatcccaagtccctcgagatcagaacactcgctgttgagcgattgctggagcccctggtcacacaggtgactaccctcgtaaatacgaatagcaaaggtccgtcgaataaaaagcgcggtcgtagcaaaaaagcccacgtccttgctgcgtcagttgagcaggcgacagagaactttctggagaaaggagacaaaatcgctaaagagtctcagttccttaaggaagagcttgtggccgctgtggaagatgtgagaaagcagggtgatctgatgaaagccgctgccggagaattcgcagacgacccatgctcatcagttaagagggggaatatggtgcgagccgcaagggccctgttgtctgccgttacccgattgcttatcctggctgacatggccgatgtttataagctgctggtgcaacttaaggtcgtggaggacggcatcctgaagcttcggaacgctgggaatgaacaggatttgggcattcaatataaggctttgaaaccagaagtcgacaagctcaatatcatggctgccaagcggcaacaagaactgaaagacgttggccatcgggaccagatggccgctgctagggggatactgcagtag

SEQ ID NO: 109277 - DNA, 306 bp, Artificial Sequence
  derived and/or modified sequence
atgacggctgtccatgccggaaacatcaactttaaatgggacccgaaatctctggagattagaaccctcgctgttgagcgcttgctggaaccgttggtcacccaggtcaccacattagtgaataccaatagtaaggggccttccaataagaaacgcggtcgctccaaaaaagcacacgtcctggcagccagcgtcgagcaggccacggaaaatttccttgaaaaaggcgataaaatcgcgaaagaaagtcaatttctgaaggaagaactggtggcagcagttgaggatgtaaggaagcaggggtag

SEQ ID NO: 109278 - DNA, 372 bp, Artificial Sequence
  derived and/or modified sequence
atgactgccgtacatgctggcaacatcaactttaagtgggatcctaagagcttggaaatccgtacccttgctgtagagcgattgcttgaaccgctggtgacccaggttacaacacttgtgaataccaattctaaaggcccaagcaacaagaagcgcggtcggtctaaaaaggcccacgtgctcgcggctagcgtcgagcaggctaccgagaactttctcgagaaaggtgacaagatcgccaaagagtcccagttcctcaaagaagaattagtggcagccgtggaagatgtgaggaagcagggggatcttatgaaagccgctgctggggaattcgcagatgatccatgttcaagcgtaaagcgcggaaattag

SEQ ID NO: 109279 - DNA, 471 bp, Artificial Sequence
  derived and/or modified sequence
atgacagccgtgcatgccggaaatataaactttaagtgggatcccaagagcctggagatcagaaccctcgcagtcgaacgcctgctcgagccattagtgacccaggtgacgacactcgtgaacaccaattcgaagggcccatctaacaaaaagcgcggtcggtcaaagaaagctcacgttctcgcggctagcgtggagcaggccacagagaactttctggagaaaggagacaaaatcgcaaaggaatcacagttcttaaaagaagagctggtggcggcagttgaggacgttcgcaaacagggcgatcttatgaaggcggcagcaggagagtttgctgacgacccctgctcatctgtgaaaagaggaaacatggtccgggcagctcgagctcttctctccgcagtgaccagactcctgattctagccgatatggctgacgtgtacaagctgctcgttcagctgaaggtgtag

SEQ ID NO: 109280 - DNA, 285 bp, Artificial Sequence
  derived and/or modified sequence
atgaccgcagtccatgcaggaaatataaactttaaatgggaccctaaatcgttggaaatcagaacgttggccgtcgagcgcttgctggaacccctggttacacaggttacaaccctggttaatacaaatagtaagggtccaagtaacaagaaaagaggcagaagcaaaaaggcgcacgtattggcagcctctgtggagcaggcaaccgagaacttcttagagaaaggggacaaaatcgcaaaggagtcccaattccttaaggaagaactcgtggcagctgtctag

SEQ ID NO: 109281 - DNA, 696 bp, Artificial Sequence
  derived and/or modified sequence
aggagggggttgggcagtcgctggcgctgccgctggtggtccctgtgcttgaagtgccggtggtatcggagtccatgcacccaaggcccagcacccagcaacattctctggcccagcagagggggttattgtgaagatcaaatgacacattccctttggaaactcttaaaggctttacaaaggataccccaaaccaagacagatgtctcacaaaacacaagcagagatgtcagtcttcaggcctcgcatggagaagatgaaagagaggggtggcttttccaaagcccagcgtcagcacgaagcttccacgagatgattttccctcttattttgaagtcctgaaatgactgctgtccatgcaggcaacataaacttcaagtgggatcctaaaagtctagagatcaggactctggcagttgagagactgttggagcctcttgttacacaggttacaacccttgtaaacaccaatagtaaagggccctctaataagaagagaggtcgttctaagaaggcccatgttttggctgcatctgttgaacaagcaactgagaatttcttggagaagggggataaaattgcgaaggagagccagtttctcaaggaggagcttgtggctgctgtagaagatgttcgaaaacaaggtgatttgatgaaggctgctgcaggagagttcgcagatgatccctgctcttc

SEQ ID NO: 109282 - DNA, 859 bp, Artificial Sequence
  derived and/or modified sequence
ccccgggcgggcgtgggacccgcgtcgggccggcggtcccttcccccgcagggcccgagtatggggcccgggcgggcacggccggcgcttcccagcgctcgggaagtcggggggccgcctgggctggggaggagaaactataggcccagcgccgccgccgcgtttcctcttggaaaagttttctcgcggtttccaaactttgttaccgcggcctcggcgcgcgcggcagccccgcgccgggcccctcggccgccttccttccctggggcggcttgtctgggagccgctttcccgggaagtgattgtcgtccggctccgaggcgttcctgccccctcccccttcccggccgctgagacttcccgatggggcggcggggacgcgggctcggcgaaccgggaggctggagcccgggcttctcccatacagcttcgccgtagaaatgactgctgtccatgcaggcaacataaacttcaagtgggatcctaaaagtctagagatcaggactctggcagttgagagactgttggagcctcttgttacacaggttacaacccttgtaaacaccaatagtaaagggccctctaataagaagagaggtcgttctaagaaggcccatgttttggctgcatctgttgaacaagcaactgagaatttcttggagaagggggataaaattgcgaaggagagccagtttctcaaggaggagcttgtggctgctgtagaagatgttcgaaaacaaggtgatttgatgaaggctgctgcaggagagttcgcagatgatccctgctcttctgtgaagcgaggcaacatggttcgggcagctcgagctttgctctctgctgttacccggttgctgat

SEQ ID NO: 109283 - DNA, 719 bp, Artificial Sequence
  derived and/or modified sequence
ggcggcggttggcccagttccaaggttgactccctcttacgtcctcttgcatcttggtgacatttttttgaaatgactgctgtccatgcaggcaacataaacttcaagtgggatcctaaaagtctagagatcaggactctggcagttgagagactgttggagcctcttgttacacaggttacaacccttgtaaacaccaatagtaaagggccctctaataagaagagaggtcgttctaagaaggcccatgttttggctgcatctgttgaacaagcaactgagaatttcttggagaagggggataaaattgcgaaggagagccagtttctcaaggaggagcttgtggctgctgtagaagatgttcgaaaacaaggtgatttgatgaaggctgctgcaggagagttcgcagatgatccctgctcttctgtgaagcgaggcaacatggttcgggcagctcgagctttgctctctgctgttacccggttgctgattttggctgacatggcagatgtctacaaattacttgttcagctgaaagttgtggaagatggtatcttgaagttgaggaatgctggcaatgaacaagacttaggaatccagtataaagccctaaaacctgaagtggataagctgaacattatggcagccaaaagacaacaggaattgaaagatgttggccatcgtgatcagatggctgcagctagaggaatcctgcagaa

SEQ ID NO: 109284 - DNA, 868 bp, Artificial Sequence
  derived and/or modified sequence
ccatttcctcctcctagccggactggagggagacaaagcagcgcccgtctgcttcgggcctctggaatttagcgctcgcccagctagccgcaggaagaatgaagaatgagtgtaggagttacctatagtttctgcctaattatttaccaatctggacttttgaacaaacattttttttaaagacggggtctccgtcgcccgggctggagcgcagtgacacgatcatgactcactgcggcttctgtctcctgggctcaagtgatccccccacctcggcttccgaagtagttgggactacaggcacgcgccaccacatccgtctaatttttgtatttttggtagagatggtgtctcgctgtcttgcccaagctggtctcgaactcctgggctcaagtggtcctcctgcctcagcctcccaaagtgttgtgattacaggcctgagccagggtgcctgaccccatctggatatttattcagcgaaagaataattttttaatccacctaagagctcacagtgtaataggggagacacacaccccaggtgtagtacagagcggactgcaaaatgactgctgtccatgcaggcaacataaacttcaagtgggatcctaaaagtctagagatcaggactctggcagttgagagactgttggagcctcttgttacacaggttacaacccttgtaaacaccaatagtaaagggccctctaataagaagagaggtcgttctaagaaggcccatgttttggctgcatctgttgaacaagcaactgagaatttcttggagaagggggataaaattgcgaaggagagccagtttctcaaggaggagcttgtggctgctgtagaagatgttcgaaaacaaggt

SEQ ID NO: 109285 - DNA, 642 bp, Artificial Sequence
  derived and/or modified sequence
gggcagtcgctggcgctgccgctggtggtccctgtgcttgaagtgccggtggtatcggagtccatgcacccaaggcccagcacccagcaacattctctggcccagcagaggggataccccaaaccaagacagatgtctcacaaaacacaagcagagatgtcagtcttcaggcctcgcatggagaagatgaaagagaggggtggcttttccaaagcccagcgtcagcacgaagcttccacgagatgattttccctcttattttgaagtcctgaaatgactgctgtccatgcaggcaacataaacttcaagtgggatcctaaaagtctagagatcaggactctggcagttgagagactgttggagcctcttgttacacaggttacaacccttgtaaacaccaatagtaaagggccctctaataagaagagaggtcgttctaagaaggcccatgttttggctgcatctgttgaacaagcaactgagaatttcttggagaagggggataaaattgcgaaggagagccagtttctcaaggaggagcttgtggctgctgtagaagatgttcgaaaacaaggtgatttgatgaaggctgctgcaggagagttcgcagatgatccctgctcttctgtgaagcgaggcaac

SEQ ID NO: 109286 - DNA, 545 bp, Artificial Sequence
  derived and/or modified sequence
accgctcctcctccctctcaggggtcactcccggcctaagctcccactaggggccggggaggaaggaattctgagaaatgactgctgtccatgcaggcaacataaacttcaagtgggatcctaaaagtctagagatcaggactctggcagttgagagactgttggagcctcttgttacacaggttacaacccttgtaaacaccaatagtaaagggccctctaataagaagagaggtcgttctaagaaggcccatgttttggctgcatctgttgaacaagcaactgagaatttcttggagaagggggataaaattgcgaaggagagccagtttctcaaggaggagcttgtggctgctgtagaagatgttcgaaaacaaggtgatttgatgaaggctgctgcaggagagttcgcagatgatccctgctcttctgtgaagcgaggcaacatggttcgggcagctcgagctttgctctctgctgttacccggttgctgattttggctgacatggcagatgtctacaaattacttgttcagctgaaagtt

SEQ ID NO: 109287 - DNA, 483 bp, Artificial Sequence
  derived and/or modified sequence
agttccaggcagagggaacagccaaggcaagagcactgaggataccccaaaccaagacagatgtctcacaaaacacaagcagagatgtcagtcttcaggcctcgcatggagaagatgaaagagaggggtggcttttccaaagcccagcgtcagcacgaagcttccacgagatgattttccctcttattttgaagtcctgaaatgactgctgtccatgcaggcaacataaacttcaagtgggatcctaaaagtctagagatcaggactctggcagttgagagactgttggagcctcttgttacacaggttacaacccttgtaaacaccaatagtaaagggccctctaataagaagagaggtcgttctaagaaggcccatgttttggctgcatctgttgaacaagcaactgagaatttcttggagaagggggataaaattgcgaaggagagccagtttctcaaggaggagcttgtggctgctgta

SEQ ID NO: 109288 - DNA, 357 bp, Artificial Sequence
  derived and/or modified sequence
atgaccgccgtgcacgccggcaacatcaacttcaagtgggaccccaagagcctggagatcagaaccctggccgtggagagactgctggagcccctggtgacccaggtgaccaccctggtgaacaccaacagcaagggccccagcaacaagaagagaggcagaagcaagaaggcccacgtgctggccgccagcgtggagcaggccaccgagaacttcctggagaagggcgacaagatcgccaaggagagccagttcctgaaggaggagctggtggccgccgtggaggacgtgagaaagcagggcgacctgatgaaggccgccgccggcgagttcgccgacgacccctgcagcagctag

SEQ ID NO: 109289 - DNA, 420 bp, Artificial Sequence
  derived and/or modified sequence
atgaccgccgtgcacgccggcaacatcaacttcaagtgggaccccaagagcctggagatcagaaccctggccgtggagagactgctggagcccctggtgacccaggtgaccaccctggtgaacaccaacagcaagggccccagcaacaagaagagaggcagaagcaagaaggcccacgtgctggccgccagcgtggagcaggccaccgagaacttcctggagaagggcgacaagatcgccaaggagagccagttcctgaaggaggagctggtggccgccgtggaggacgtgagaaagcagggcgacctgatgaaggccgccgccggcgagttcgccgacgacccctgcagcagcgtgaagagaggcaacatggtgagagccgccagagccctgctgagcgccgtgaccagactgctgtag

SEQ ID NO: 109290 - DNA, 648 bp, Artificial Sequence
  derived and/or modified sequence
atgaccgccgtgcacgccggcaacatcaacttcaagtgggaccccaagagcctggagatcagaaccctggccgtggagagactgctggagcccctggtgacccaggtgaccaccctggtgaacaccaacagcaagggccccagcaacaagaagagaggcagaagcaagaaggcccacgtgctggccgccagcgtggagcaggccaccgagaacttcctggagaagggcgacaagatcgccaaggagagccagttcctgaaggaggagctggtggccgccgtggaggacgtgagaaagcagggcgacctgatgaaggccgccgccggcgagttcgccgacgacccctgcagcagcgtgaagagaggcaacatggtgagagccgccagagccctgctgagcgccgtgaccagactgctgatcctggccgacatggccgacgtgtacaagctgctggtgcagctgaaggtggtggaggacggcatcctgaagctgagaaacgccggcaacgagcaggacctgggcatccagtacaaggccctgaagcccgaggtggacaagctgaacatcatggccgccaagagacagcaggagctgaaggacgtgggccacagagaccagatggccgccgccagaggcatcctgcagtag

SEQ ID NO: 109291 - DNA, 306 bp, Artificial Sequence
  derived and/or modified sequence
atgaccgccgtgcacgccggcaacatcaacttcaagtgggaccccaagagcctggagatcagaaccctggccgtggagagactgctggagcccctggtgacccaggtgaccaccctggtgaacaccaacagcaagggccccagcaacaagaagagaggcagaagcaagaaggcccacgtgctggccgccagcgtggagcaggccaccgagaacttcctggagaagggcgacaagatcgccaaggagagccagttcctgaaggaggagctggtggccgccgtggaggacgtgagaaagcagggctag

SEQ ID NO: 109292 - DNA, 372 bp, Artificial Sequence
  derived and/or modified sequence
atgaccgccgtgcacgccggcaacatcaacttcaagtgggaccccaagagcctggagatcagaaccctggccgtggagagactgctggagcccctggtgacccaggtgaccaccctggtgaacaccaacagcaagggccccagcaacaagaagagaggcagaagcaagaaggcccacgtgctggccgccagcgtggagcaggccaccgagaacttcctggagaagggcgacaagatcgccaaggagagccagttcctgaaggaggagctggtggccgccgtggaggacgtgagaaagcagggcgacctgatgaaggccgccgccggcgagttcgccgacgacccctgcagcagcgtgaagagaggcaactag

SEQ ID NO: 109293 - DNA, 471 bp, Artificial Sequence
  derived and/or modified sequence
atgaccgccgtgcacgccggcaacatcaacttcaagtgggaccccaagagcctggagatcagaaccctggccgtggagagactgctggagcccctggtgacccaggtgaccaccctggtgaacaccaacagcaagggccccagcaacaagaagagaggcagaagcaagaaggcccacgtgctggccgccagcgtggagcaggccaccgagaacttcctggagaagggcgacaagatcgccaaggagagccagttcctgaaggaggagctggtggccgccgtggaggacgtgagaaagcagggcgacctgatgaaggccgccgccggcgagttcgccgacgacccctgcagcagcgtgaagagaggcaacatggtgagagccgccagagccctgctgagcgccgtgaccagactgctgatcctggccgacatggccgacgtgtacaagctgctggtgcagctgaaggtgtag

SEQ ID NO: 109294 - DNA, 285 bp, Artificial Sequence
  derived and/or modified sequence
atgaccgccgtgcacgccggcaacatcaacttcaagtgggaccccaagagcctggagatcagaaccctggccgtggagagactgctggagcccctggtgacccaggtgaccaccctggtgaacaccaacagcaagggccccagcaacaagaagagaggcagaagcaagaaggcccacgtgctggccgccagcgtggagcaggccaccgagaacttcctggagaagggcgacaagatcgccaaggagagccagttcctgaaggaggagctggtggccgccgtgtag

SEQ ID NO: 109295 - DNA, 1611 bp, Artificial Sequence
  derived and/or modified sequence
atgaccaagaaaacaagggatctgcgaaggcagctgcgtaaagccgttatggaccacgtgagcgattcattcctggagacaaatgtgccccttctggtactaatcgaggctgctaaaaacggcaacgaaaaggaagttaaagaatatgcccaggtgtttagggagcacgccaataaattgatcgaagtcgctaacctagcctgctccatctcaaacaatgaggagggggtgaagctggtgcgcatgtctgcatctcaactcgaggccctatgcccccaggtgataaacgcagcactggcattagcagccaagccacaaagcaagctggctcaggagaacatggacctgtttaaggaacagtgggaaaagcaggtgcgcgtcctgaccgacgcggtagacgacatcacctcaatcgatgactttttggcggtgagtgaaaatcatatcttggaggacgttaacaagtgtgtcatcgccctgcaagagaaggatgtcgacggtctggaccgcacggcaggcgctatcagaggaagggcggccagggtgatccacgtggtgacttccgagatggataactatgaaccaggagtctatacagagaaggttctggaagcaaccaagctgttgtccaataccgtcatgccaaggtttaccgagcaggtagaggccgctgtggaggctctcagtagtgaccctgcccagcctatggatgagaatgagtttatagatgctagcagactggtctatgatggtatcagggatatccggaaagcagtcctcatgatacgtactccagaagagctggacgacagcgatttcgagacagaggattttgacgtgcgatcgcgaacgtctgtccagacagaggatgatcagctgattgctgggcagagtgctcgggctatcatggcccagctgccacaggagcaaaaggcaaaaatcgctgaacaggtcgcatcattccaggaggagaagtccaaacttgatgcggaggtaagcaaatgggatgatagtggcaatgatattatagtgctggcaaaacagatgtgcatgattatgatggaaatgacggattttacccggggaaaaggacccctgaaaaacactagtgacgtaatttcggcagctaagaagatcgccgaagcaggtagccggatggacaaacttggtagaaccattgcggaccattgtccggacagcgcctgtaagcaagacttactggcttaccttcaaaggatcgctctctattgtcaccagctcaacatctgttccaaagtgaaagccgaggtgcagaacctaggcggagagctggtcgtcagtggcgtcgacagcgcaatgagcttgatccaagccgccaaaaacttgatgaatgctgtggtgcagacagtgaaggcctcatacgtcgccagcactaagtatcagaaaagccaaggcatggcctctctgaacctgccagctgtttcctggaaaatgaaagccccggagaagaagccgttagtgaaaagagagaagcaagacgaaactcaaactaagattaaacgcgccagtcaaaagaagcatgtgaaccccgtgcaggcccttagtgaatttaaggcaatggattccatttag

SEQ ID NO: 109296 - DNA, 1611 bp, Artificial Sequence
  derived and/or modified sequence
atgaccaagaagacccgggacctgcggcggcagctgaggaaggctgtgatggaccacgtgtctgacagcttcctggagaccaacgtgcccctgctggtgctgattgaagctgccaagaatggaaatgagaaggaggtgaaggagtatgcccaggtgttccgggagcacgccaacaagctgattgaggtggccaacctggcctgcagcatcagcaacaatgaggagggcgtgaagctggtgaggatgtctgccagccagctggaggccctgtgcccccaggtgatcaatgctgccctggccctggccgccaagccccagagcaagctggcccaggagaacatggacctcttcaaggagcagtgggagaagcaggtgcgggtgctgacagatgctgtggatgacatcaccagcattgatgacttcctggccgtgtctgagaaccacatcctggaggatgtgaacaagtgtgtgattgccctgcaggagaaggatgtggatggcctggacagaacagctggggccatccggggccgggccgcccgggtcatccacgtggtgaccagcgagatggacaactatgagcccggggtgtacacagagaaggtgctggaggccaccaagctgctgagcaacacagtgatgccccgcttcacagagcaggtggaggccgctgtggaggccctgagcagtgaccctgcccagcccatggatgaaaatgagttcattgatgccagccggctggtgtatgatggcatccgggacatcaggaaggctgtgctgatgatccgcaccccagaggagctggatgacagcgactttgaaacagaggactttgatgtgcgcagcaggacctctgtgcagacagaagatgaccagctgattgctggccagagcgcccgggccatcatggcccagctgccccaggagcagaaggccaagattgctgagcaggtggccagcttccaggaggagaagagcaagctggatgctgaggtgtccaagtgggatgacagcggaaatgacatcatcgtgctggccaagcagatgtgcatgatcatgatggagatgacagacttcacccggggcaagggccccctgaagaacaccagtgatgtgatctctgctgccaagaagattgctgaggccggcagcaggatggacaagctgggccgcaccatcgctgaccactgcccagacagcgcctgcaagcaggacctgctggcctacctgcagagaattgccctgtactgccaccagctgaacatctgcagcaaggtgaaggccgaggtgcagaacctgggcggggagctggtggtgtctggagtggacagcgccatgagcctcatccaggccgccaagaacctgatgaatgctgtggtgcagacagtgaaggccagctatgtggccagcaccaagtaccagaagagccagggcatggccagcctgaacctgcctgctgtgtcctggaagatgaaggcccctgagaagaagcccctggtgaagcgggagaagcaggatgagacccagaccaagatcaagagggccagccagaagaagcacgtgaaccctgtgcaggccctgtctgagttcaaggccatggacagcatctag

SEQ ID NO: 109297 - DNA, 1611 bp, Artificial Sequence
  derived and/or modified sequence
atgaccaagaagacccgggacctgcggcggcagctgcggaaggccgtcatggaccatgtctctgattcgtttctcgaaactaatgttccactactggtactgatcgaggctgctaaaaatggcaacgaaaaagaggtgaaagagtatgcccaagtatttagagaacacgccaacaagctgatagaggtggccaacctggcctgcagcatttcaaataatgaggagggtgttaaactggtacgcatgagcgcgtctcagctggaagccctatgccctcaggtgattaatgctgctctggccttagctgcaaaaccacagtccaaactggctcaggagaatatggatttgtttaaggagcagtgggagaagcaggtccgagtgctgactgacgctgtagacgatattaccagcatcgatgacttcctagccgtgagcgagaaccatatacttgaagacgtaaacaagtgcgtcattgctttacaggagaaggatgttgacggcctggataggacagccggggcaattagaggccgcgctgcgagagtaatccatgttgtgacgtccgagatggacaactacgagccaggcgtttacacagaaaaagtgctcgaagctacgaaactcctttccaacactgtcatgccaaggttcactgagcaggtcgaagctgccgtagaggcactatcatcagaccctgctcaacctatggacgagaacgagttcatagatgcttctcggttagtctacgatggaatacgagacatccgcaaggccgtcctgatgatccgaacacctgaagagctcgatgattcagatttcgaaacagaagactttgacgttcgatcgagaacttctgtacagactgaggatgaccagctgatagctgggcagtctgctcgggccataatggctcagctcccgcaggagcagaaagcgaagatcgcggagcaagtggcctcattccaggaggaaaagagcaagttagacgcggaggtgtcgaagtgggatgacagcggtaacgatatcatcgtgctcgctaaacagatgtgtatgatcatgatggagatgactgattttaccaggggaaaggggcccctgaaaaatacgagcgatgttattagcgccgcaaagaaaatcgctgaggccggatcccgtatggacaaactgggtagaacaattgccgaccattgtcctgacagcgcctgtaagcaggacctgcttgcgtacctgcagcgcattgctctgtattgccaccagctgaacatttgctcgaaagtgaaggctgaggtgcagaatctgggtggcgaactggtggtttccggagtggactccgctatgtccctcatccaggcagcaaaaaacctaatgaacgccgtagtgcagactgttaaggcatcctatgttgctagcacaaaatatcaaaagagtcagggcatggcttctctgaatttaccggccgtgtcttggaaaatgaaggcacctgagaagaagccacttgtcaagcgcgaaaagcaggatgagacgcagacgaagattaagagggcttcacagaagaaacacgtgaaccccgtacaggctctgtccgagtttaaggcaatggactcaatctag

SEQ ID NO: 109298 - DNA, 1611 bp, Artificial Sequence
  derived and/or modified sequence
atgaccaagaagactcgagacttgaggcgtcagctgaggaaggcagtgatggatcatgttagcgattcttttcttgagactaacgtgcccttgctggtactcatcgaagctgcaaaaaatggaaacgagaaggaggtcaaggagtatgctcaggtgttccgagagcatgccaacaaactgattgaggtggccaatctggcttgttccattagcaacaatgaggagggtgtcaaacttgtaaggatgagcgctagtcaactcgaagcgctctgtcctcaggtcatcaatgccgctctggccctggccgcaaagccacagagcaagctggcgcaggagaatatggaccttttcaaggagcagtgggaaaagcaggtccgagtgttaaccgatgctgtggatgatattactagcatcgacgattttctagccgtcagcgaaaaccacattctcgaggatgtcaataaatgcgtcattgcactgcaggaaaaggacgtggatgggctggacagaacagccggagctatccgaggacgcgcagccagggtgatccacgtagtcacatccgaaatggataattacgaacctggagtatatacggaaaaggttctcgaggcaactaagctcttaagcaataccgtgatgcctcggttcaccgaacaggtggaagctgctgtcgaggccctgtcctcagaccccgcacagcccatggatgagaacgaattcattgatgcctccaggctggtgtacgatggcatcagagatattaggaaagcagtcctgatgatccgaacacccgaggagttagatgactccgattttgaaacagaggattttgacgtgaggtccagaacctccgtgcagaccgaggacgatcagctgatcgctgggcagtccgccagagctatcatggcccagcttccccaggagcagaaagctaagatcgccgaacaggttgccagttttcaagaagaaaaatctaaattagatgccgaagtcagcaagtgggacgactcgggtaatgatattatcgttctcgcaaaacagatgtgtatgatcatgatggagatgaccgatttcactagaggaaaaggaccgctcaagaacaccagtgacgtgatctcagccgcaaaaaagattgcagaggctggctctcggatggacaaactgggaaggacaattgcagaccactgcccagactccgcctgcaagcaggacttgcttgcctatcttcagcgaattgccctttactgccatcagcttaatatctgctctaaagtaaaggccgaggtgcagaatttgggcggagagctggtcgtaagtggagttgacagtgcgatgagcctgatacaggccgcaaaaaatctgatgaacgcagtcgtgcagacagttaaggccagctacgtcgcatctaccaaatatcagaagagccagggcatggctagcctcaatcttccggcagtctcttggaagatgaaggcgccagagaaaaagcccctagtcaaacgcgaaaagcaggacgagacccagacaaaaattaaacgggcttcccagaagaagcacgtcaatcctgtgcaggctctttcagaatttaaagcaatggactccatctag

SEQ ID NO: 109299 - DNA, 2684 bp, Artificial Sequence
  derived and/or modified sequence
ctgccgattctgcatagagagatcatctaaatgggcagaagcctgcacaatttatgaagtgctgatttaacaccagcctatgcaaggctggacgtaaagaaagaagtgatgcactcaattctgcaatagataaaatgaccaagaagaccagggacttgcgtagacagctccgcaaagctgtcatggaccacgtttcagattctttcctggaaaccaatgttccacttttggtattgattgaagctgcaaagaatggaaatgagaaagaagttaaggagtatgcccaagttttccgtgaacatgccaacaaattgattgaggttgccaacttggcctgttccatctcaaataatgaagaaggtgtaaagcttgttcgaatgtctgcaagccagttagaagccctctgtcctcaggttattaatgctgcactggctttagcagcaaaaccacagagtaaactggcccaagagaacatggatctttttaaagaacaatgggaaaaacaagtccgtgttctcacagatgctgtcgatgacattacttccattgatgacttcttggctgtctcagagaatcacattttggaagatgtgaacaaatgtgtcattgctctccaagagaaggatgtggatggcctggaccgcacagctggtgcaattcgaggccgggcagcccgggtcattcacgtagtcacctcagagatggacaactatgagccaggagtctacacagagaaggttctggaagccactaagctgctctccaacacagtcatgccacgttttactgagcaagtagaagcagccgtggaagccctcagctcggaccctgcccagcccatggatgagaatgagtttatcgatgcttcccgcctggtatatgatggcatccgggacatcaggaaagcagtgctgatgataaggacccctgaggagttggatgactctgactttgagacagaagattttgatgtcagaagcaggacgagcgtccagacagaagacgatcagctgatagctggccagagtgcccgggcgatcatggctcagcttccccaggagcaaaaagcgaagattgcggaacaggtggccagcttccaggaagaaaagagcaagctggatgctgaagtgtccaaatgggacgacagtggcaatgacatcattgtgctggccaagcagatgtgcatgattatgatggagatgacagactttacccgaggtaaaggaccactcaaaaatacatcggatgtcatcagtgctgccaagaaaattgctgaggcaggatccaggatggacaagcttggccgcaccattgcagaccattgccccgactcggcttgcaagcaggacctgctggcctacctgcaacgcatcgccctctactgccaccagctgaacatctgcagcaaggtcaaggccgaggtgcagaatctcggcggggagcttgttgtctctggggtggacagcgccatgtccctgatccaggcagccaagaacttgatgaatgctgtggtgcagacagtgaaggcatcctacgtcgcctctaccaaataccaaaagtcacagggtatggcttccctcaaccttcctgctgtgtcatggaagatgaaggcaccagagaaaaagccattggtgaagagagagaaacaggatgagacacagaccaagattaaacgggcatctcagaagaagcacgtgaacccggtgcaggccctcagcgagttcaaagctatggacagcatctaagtctgcccaggccggccgcccccacccctcggggctcctgaatatcagtcactgttcgtcactcaaatgaatttgctaaatacaacactgatactagattccacagggaaatgggcagactgaaccagtccaggtggtgaattttccaagaacatagtttaagttgattaaaaatgcttttagaatgcaggagcctacttctagctgtattttttgtatgcttaaataaaaataaaaattcataaccaaagagaatcccacattagcttgttagtaatgctctgaccaagccgagatgcccattctcttagtgatggcggcgttagggtttgagagaagggaatttggctcaacttcagttgagagggtgcagtccagacagcttgactgcttttaaatgaccaaagatgacctgtggtaagcaacctgggcatcttaggaagcagtccctggagaaggcatgttcccagaaaggtctctggagggacaaactcactcagtaaaacataatgtatcatgaagaaaactgattctctatgacatgaaatgaaaattttaatgcattgttataattactaatgtacgctgctgcaggacattaataaagttgcttttttaggctacagtgtctcgatgccataatcagaacacactttttttcctctttctcccagcttcaaatgcaaattcatcattgggctcacttctaataactgcagtgtttcccgccttgggcttgcagcagaaaaacctgacaacatagtgtttgctaaggcagtaatttagactttaccttatttgtgattactgtagtgattgattgattgattactattaactacaaggtataatttactatcaccttatttaaattttatgaattaatttgaatgttttttacactaactaacttttcccaataaagtccactatgaaacc

SEQ ID NO: 109300 - DNA, 1611 bp, Artificial Sequence
  derived and/or modified sequence
atgaccaagaagaccagagacctgagaagacagctgagaaaggccgtgatggaccacgtgagcgacagcttcctggagaccaacgtgcccctgctggtgctgatcgaggccgccaagaacggcaacgagaaggaggtgaaggagtacgcccaggtgttcagagagcacgccaacaagctgatcgaggtggccaacctggcctgcagcatcagcaacaacgaggagggcgtgaagctggtgagaatgagcgccagccagctggaggccctgtgcccccaggtgatcaacgccgccctggccctggccgccaagccccagagcaagctggcccaggagaacatggacctgttcaaggagcagtgggagaagcaggtgagagtgctgaccgacgccgtggacgacatcaccagcatcgacgacttcctggccgtgagcgagaaccacatcctggaggacgtgaacaagtgcgtgatcgccctgcaggagaaggacgtggacggcctggacagaaccgccggcgccatcagaggcagagccgccagagtgatccacgtggtgaccagcgagatggacaactacgagcccggcgtgtacaccgagaaggtgctggaggccaccaagctgctgagcaacaccgtgatgcccagattcaccgagcaggtggaggccgccgtggaggccctgagcagcgaccccgcccagcccatggacgagaacgagttcatcgacgccagcagactggtgtacgacggcatcagagacatcagaaaggccgtgctgatgatcagaacccccgaggagctggacgacagcgacttcgagaccgaggacttcgacgtgagaagcagaaccagcgtgcagaccgaggacgaccagctgatcgccggccagagcgccagagccatcatggcccagctgccccaggagcagaaggccaagatcgccgagcaggtggccagcttccaggaggagaagagcaagctggacgccgaggtgagcaagtgggacgacagcggcaacgacatcatcgtgctggccaagcagatgtgcatgatcatgatggagatgaccgacttcaccagaggcaagggccccctgaagaacaccagcgacgtgatcagcgccgccaagaagatcgccgaggccggcagcagaatggacaagctgggcagaaccatcgccgaccactgccccgacagcgcctgcaagcaggacctgctggcctacctgcagagaatcgccctgtactgccaccagctgaacatctgcagcaaggtgaaggccgaggtgcagaacctgggcggcgagctggtggtgagcggcgtggacagcgccatgagcctgatccaggccgccaagaacctgatgaacgccgtggtgcagaccgtgaaggccagctacgtggccagcaccaagtaccagaagagccagggcatggccagcctgaacctgcccgccgtgagctggaagatgaaggcccccgagaagaagcccctggtgaagagagagaagcaggacgagacccagaccaagatcaagagagccagccagaagaagcacgtgaaccccgtgcaggccctgagcgagttcaaggccatggacagcatctag

SEQ ID NO: 109301 - protein, 3048 aa, Artificial Sequence
  derived and/or modified sequence
MNLHQVLTGAVNPGDHCFSVGSIGDQRFTAYASGCDIVILGSDFERLQIIPGAKHGNIQVGCVDCSMQQGKIAASYGNVISIFEPVNLPKQKKNLELYSQWQKSGQFFLESIAHNITWDPTGSRLLTGSSYLQLWSNTNLEKPTEDENLNKTDLNFGDWKCIWHCKTASQVHLMKFSPDGEFFATAGKDDCLLKVWYNVENWRTAVTSPDGSSEKQSQGEIDFSFVYLAHPRAVNGFSWRKTSKYMPRASVCNVLLTCCKDNVCRLWVETFLPNDCLLYGGDCSHWTESINLTNNFKRNASSKERVQNALEVNLRHFRRGRRRSLALVAHTGYLPHQQDPHHVHRNTPLHANALCHFHIAASINPATDIPLLPSITSLSLNENEEKTGPFVVHWLNNKELHFTLSMEVFLQQLRKSFEQPSSEASVEDSNQADVKSDEETDDGVDDLKINPEKKELGCDKMVPNSSFTSLSSAAIDHQIEVLLSEWSKNADMLFSIHPMDGSLLVWHVDWLDEYQPGMFRQVQVSFVSRIPVAFPTGDANSLCKSIMMYACTKNVDLAIQQGKQKPSGLTRSTSMLISSGHNKSSNSLKLSIFTPNVMMISKHADGSLNQWLVSFAEESAFSTVLSISHKSRYCGHRFHLNDLACHSVLPLLLTTSHHNALRTPDVDNPEQPFDALNIEECSLTQQNKSTVDVAFQDPSAVYSELILWRVDPVGPLSFSGGVSELARINSLHVSAFSNVAWLPTLIPSYCLGAYCNSPSACFVASDGQYLRLYEAVIDAKKLLSELSNPEISKYVGEVFNIVSQQSTARPGCIIALDPITKLHGRKTQLLHVFEEDFILNNLEKKSLGKDSILSNAGSSPNGFSEKFYLIVIECTQDNRSLLHMWNLHLKSIPVSLDEKVDTKLSEAVWQPEEHYSSSPEKILSPFSQKYQACRANLQSTSRLTLFSEMVYSQELHLPEGVEIISIKPSAGHLSSSSIYPACSAPYLLATSCSDEKVRFWRCRVTDGESATSKNGKIDLAYIWEEWPLLIEDGLQSNSSITVPGRPVEVSCAHTNRLAVAYKQPASNSRSSQDFVMHVSIFECESTGGSCWVLEQTIHLDELSTVLDSGISVDSNLVAYNKQDMYLSSKENITSNTKHLVHLDWMSREDGSHILTVGIGSKLFMYGPLAGKVQDQTGKETLAFPLWESTKVVPLSKFVLLRSVDLVSSVDGSPPFPVSLSWVRDGILVVGMDCEMHVYCQWQPSSKQEPVITDSYSGSTPSITSLIKQSNSSSGLHPPKKTLTRSMTSLAQKICGKKTAFDPSVDMEDSGLFEAAHVLSPTLPQYHPLQLLELMDLGKVRRAKAILSHLVKCIAGEVVALNEAESNHERRLRSLTISASGSTTRDPQAFNKAENTDYTEIDSVPPLPLYALLAADDDSCYSSLEKSSNESTLSKSNQLSKESYDELFQTQLLMTDTHMLETDEENTKPRVIDLSQYSPTYFGPEHAQVLSGHLLHSSLPGLSRMEQMSLMALADTIATTSTDIGESRDRSQGGETLDECGLKFLLAVRLHTFLTTSLPAYRAQLLHQGLSTSHFAWAFHSVAEEELLNMLPAMQKDDPTWSELRAMGVGWWVRNTRILRKCIEKVAKAAFYRKNDPLDAAIFYLAMKKKAVIWGLYRAEKNTRMTQFFGHNFEDERWRKAALKNAFSLLGKQRFEHSAAFFLLAGCLRDAIEVCLEKLNDIQLALVIARLYESEFDTSAAYKSILRKKVLGIDSPVSELCSLNINMHHDPFLRSMAYWILEDYSGALETLIKQPIRENDDQVLSASNPTVFNFYNYLRTHPLLLRRHFGSSDTFSTHMSLTGKSGLAGTINLSERRLFFTTASAHLKAGCPMLALEVLSKMPKVIKKTRPFYRASSFLDTSKDCSPSSPLKLDAREDKSSAVDWSQSLINGFGSSSEGSSEKQSNSTLSFDWSQPSVVFQDDSLELKWDSDNDEENEDVPISMKELKPLQRKTDKKLDDISSNYTESFSTLDENDLLNPSEDIIAVQLKFRACLKILTVELRTLSTGYEIDGGKLRYQLYHWLEKEVIALQRTCDFCSDAEELQSAFGRNEDEFGLNEDAEDLPHQTKVKQLRENFQEKRQWLLKYQSLLRMFLSYCILHGSHGGGLASVRMELILLLQESQQETSEPLFSSPLSEQTSVPLLFACTANAKTVVANPLLHLSNLTHDILHAIINFDSPPHPDIQSNKVYVMHTLAASLSACIYQCLCGSHNYSSFQTNQFTGMVYQTVLLPHRPSLKTGSLDEALTPNTSPAQWPGITCLIRLLNSSGEEAQSGLTVLLCEILTAVYLSLFIHGLATHSSNELFRIVAHPLNEKMWSAVFGGGAHVPSKEQTHSKTLPVSSLVEEGEKQNKRFRPSKMSCRESAPLTPSSAPVSQESLAVKEKFIPPELSIWDYFIAKPFLPSSQSRAEYDSEESLGSDDDDNDDDDDVLASDFHLQEHSNSNSYSWSLMRLAMVQLVLNNLKTFYPFAGHDLAELPVSSPLCHAVLKTLQCWEQVLLRRLEIHGGPPQNYIASHTAEESLSAGPAILRHKALLEPTNTPFKSKHHLALSVKRLWQYLVKQEEIQETFIKNIFTKKRCLNESLEDNSETIKNSMMEEPNINKIEADLGYPGGKARIIHKESDIITAFAVNKANRNCIAIASSHDVQELDVSGILATQVYTWVDDDIEVETKGSEDFLVIHARDDLTAVQGTTPYTHSNPGTPINMPWLGSTQTGRGASVMIKKAINNVRRMTSHPTLPYYLTGAQDGSVRMFEWGHSQQITCFRSGGNSRVTRMRFNYQGNKFGIVDADGYLSLYQTNWKCCPVTGSMPKPYLTWQCHNKTANDFVFVSSSSLIATAGLSTDNRNVCLWDTLVAPANSLVHAFTCHDSGATVLAYAPKHQLLISGGRKGFTYVFDLCQRQQRQLFQSHDSPVKAVAVDPTEEYFVTGSAEGNIKIWSLSTFGLLHTFVSEHARQSIFRNIGTGVMQIETGPANHIFSCGADGTMKMRILPDQFSPLNEVLKNDVKFML

SEQ ID NO: 109302 - DNA, 9147 bp, Artificial Sequence
  derived and/or modified sequence
atgaaccttcatcaggtcttaactggcgccgtcaatccgggagaccactgtttttcagtgggttcaattggagaccagcggtttaccgcctacgcttcggggtgtgacattgtcattcttggaagcgattttgagcggctgcagatcattcccggtgcaaagcacgggaatatccaagtgggatgcgtggactgtagtatgcagcagggcaagatcgccgcctcctacggtaatgtaatatccattttcgaacccgttaacctacccaaacagaagaaaaatctggagctgtactcccaatggcaaaaatcgggacagtttttcctcgaaagtatcgcccataatattacttgggaccctaccggcagtaggctgcttacaggctcaagctatcttcagctttggtctaataccaatcttgagaagccaaccgaagacgagaatctgaataagaccgacttaaattttggggattggaagtgtatctggcactgcaaaaccgcttcccaggtgcacctcatgaaattctcgcctgatggcgagtttttcgctaccgcgggaaaagacgattgtctcctgaaagtgtggtataatgtcgagaactggcgcactgctgtgacttcgccggacggatcttcagaaaagcagagccagggggagatcgacttcagcttcgtttatctcgcccatccacgtgctgtaaacggattctcttggagaaaaacctctaagtatatgccgcgagcctctgtgtgcaacgtgctcttaacatgttgcaaggacaacgtatgcaggctgtgggtggagactttcctcccaaacgactgtcttttgtacgggggggactgctctcactggacagaaagcatcaacctgactaacaattttaaacggaatgcatcgtctaaggaacgcgtgcagaacgcactcgaggtcaatctccgacacttcagacgcggaagaaggcgttcactggctctggtcgctcacactggctatttaccccaccagcaggacccccaccacgtacaccgcaacacaccgcttcatgctaatgccctctgtcacttccatattgccgcctctattaacccagccacggatattcctctgctgccctctatcacaagtcttagcctgaacgagaatgaagaaaagaccggcccctttgtggtgcactggctgaataacaaggaactgcattttaccctgagcatggaggtttttctgcagcagctccgaaaatccttcgaacagcccagttctgaggcttcagttgaagacagcaatcaagccgacgtgaaaagcgatgaggagacagacgatggcgtagatgacctgaagattaaccctgagaagaaggagctgggatgtgacaaaatggtacctaattccagtttcaccagtttgtcatctgccgcaattgatcatcagatcgaggtgctccttagcgagtggtccaagaacgcagatatgctcttcagcatccaccccatggatgggtcgctacttgtttggcacgtggattggcttgatgagtaccagccaggaatgtttcgtcaggtgcaggtttcttttgtgtctaggatccccgtggcgtttcctacaggagatgccaatagcctttgcaaaagcatcatgatgtatgcatgtactaagaacgtcgatctggctatccagcaagggaaacaaaaaccatcaggcctgacgcggagtacctcaatgttaatatcaagcggacataataaatcttcaaactcattgaagttgagcatattcacaccaaatgtcatgatgatcagtaagcacgccgacggaagcctgaatcagtggctagtcagttttgccgaagaatccgccttctcaacggtgttatcaatatcccataagtctcgatattgcggtcacagattccacctcaatgacctggcctgccattctgttctcccactgcttctcacgacttcgcaccacaacgccctgcgaactccagacgtagataatccagagcagccttttgatgctcttaatatagaagagtgtagtctcacccagcagaacaaatccacagtggatgttgcatttcaggacccctccgcagtttattctgagctcatcctgtggcgagtggaccccgtcggcccactctcctttagtggaggggtgagcgagcttgcccgcataaattcgctccatgtgtccgccttcagtaatgtggcctggctccccactttgatacccagctattgcctgggcgcctattgcaactctccatcagcctgttttgttgcctcagatggtcagtatctgcggttgtatgaggcagtgattgacgccaagaaactgctcagtgaactgtccaacccagagatcagtaaatacgtgggcgaggttttcaatatcgtttcccagcagagcacagcaagaccaggctgcatcattgccttagatccaattaccaagcttcatggacggaaaacccagctcctccacgtgttcgaggaggattttattctgaataacctcgaaaagaaatccctgggcaaagattccattctatccaatgcaggatcctctccaaacgggttctccgaaaaattttacttgatcgtgattgaatgcacacaggacaatcggtctctgctgcatatgtggaacctccatctgaaatccattcctgtctcacttgacgaaaaggttgatactaaactgagtgaggctgtatggcagcccgaagaacactacagcagtagccctgagaaaatcttatctcccttctcccagaagtaccaggcttgcagggccaacctgcagtctacaagccgtctgaccctgttcagcgaaatggtctattctcaggagctccatctgcctgagggggttgaaatcataagtattaaaccaagcgctggacacctctcttctagcagcatctatccggcttgttctgctccctacctgctggcgacaagctgttctgatgagaaggtaagattttggagatgccgcgtgaccgatggtgaatcggcgacttctaagaacggcaagatcgatcttgcctatatttgggaggaatggccactattgattgaagatggtctgcagtctaattcttctattacagtgcccggcagacccgtggaagtttcctgtgctcacacaaacagacttgccgtggcttataaacagcccgccagtaattcaagatcttcacaggactttgtgatgcacgtaagcatcttcgaatgcgagtccacaggaggctcctgttgggtactggaacagactatccacttagacgagctgtctacagtccttgattctggcatcagcgttgatagcaacttagttgcgtataacaagcaagatatgtatctgtcctctaaggaaaatattaccagcaataccaagcatcttgttcacctggattggatgagccgtgaggatgggagtcatattctcaccgtcgggatagggtcaaagctctttatgtatggccctttggccggaaaagtgcaagaccagaccggcaaggagaccctggccttcccactgtgggaatccaccaaagtcgtacccctgtcaaagttcgtgttgctgaggagtgtagatttggtttcatccgtcgatggaagccctcctttccctgtcagcttgagctgggtccgcgatgggattctagtcgtaggaatggattgcgaaatgcacgtatactgtcagtggcagccatcatcaaaacaggagcccgtgatcacagacagctacagtggtagcacaccaagtatcaccagcctgattaaacaatccaactcatcgagcggcctacatccgccgaagaaaaccctgactagatctatgacttcgttagcccagaagatctgcgggaagaagacagcttttgaccctagtgtcgatatggaggactcaggccttttcgaagctgcccatgtgctcagccctacgctgcctcagtatcatcccttacagctgctagaacttatggatttggggaaagttcgcagggcaaaggccatccttagccatctggttaagtgcatcgccggcgaggtagtcgctttgaatgaggctgagagcaatcatgagaggaggctgaggtccctcacaatttctgcgtctgggtccaccacaagagatccacaggcatttaacaaggctgagaataccgactacacagaaattgattcagtcccaccgttgccactatatgcccttctggcagccgacgatgattcctgttattcaagcttggaaaaatccagtaatgagagcacattaagcaagtccaaccagttgtccaaggagtcctacgatgagctgttccaaacacaattactcatgactgacacgcacatgctggaaaccgacgaggagaacaccaagccacgggtgatcgacttatcccagtattccccaacgtatttcggcccagagcacgcccaggtattaagcggacacctgttgcacagctcactgccagggctttccaggatggagcagatgtcattgatggccctagcagatactatcgcaaccacatctaccgacattggggagagccgagatagaagccaggggggggagaccctggacgagtgtggtctaaaattcctgctggcagtgcggcttcatacttttcttactacatctttgccagcttacagggcacaactgctgcaccaggggctatctacaagccactttgcatgggcctttcatagtgtcgctgaggaggagctgctgaacatgctccccgcaatgcagaaagatgacccgacgtggtccgagttaagagccatgggggtcggctggtgggtaaggaatacccggatactcagaaagtgcatagagaaggtcgctaaagcagcgttctacaggaagaacgaccccctggacgcagctattttctacctggccatgaaaaaaaaggccgtgatatggggcctctacagggcggaaaaaaacacgaggatgacccaattttttgggcacaactttgaggacgaacggtggagaaaagccgccctaaaaaacgccttttctctactgggtaaacagagattcgagcattctgcagcattcttcttgctggccgggtgtttacgggacgcgattgaagtctgtttggaaaagctaaatgacattcagctggctttggtcatagcgagactgtatgaaagcgagttcgatacctccgcggcctataaatcgattctcagaaagaaagtcttaggcattgattcgccggttagtgagctctgtagcttgaacatcaatatgcaccacgaccccttcctgcggtccatggcatattggatcctggaggattacagcggcgccctggagacattgataaagcaacccattcgtgaaaacgacgaccaagtgttatcggcatcgaatccgacagtcttcaacttttataactacctacggacacaccctcttctccttcgtagacacttcgggtcctccgatactttctccacacatatgtcactcacaggtaaatccggtctggccgggacaattaacctgagcgagagacgcctgttttttacaactgcgagcgcccacctgaaagcaggctgtcctatgcttgcactcgaggtgctgtccaagatgcctaaagtcataaaaaaaacaagaccattctaccgggcctcttctttcttggataccagtaaggactgtagtcccagctcacctttgaagctcgatgcccgcgaggacaaatcaagtgcggttgattggtcgcaatctctcatcaacgggtttggcagcagtagtgaaggctctagcgaaaaacagagcaacagcactctgagttttgactggtctcagccaagcgttgtgttccaggacgatagcttggaactgaagtgggactcagataacgacgaggagaatgaggatgtgcctatctccatgaaagaacttaagcctctgcagcggaaaacagacaaaaagctcgacgatatatcctctaactacaccgaaagcttcagcactctggatgagaatgatctactcaatcctagtgaagacatcatcgccgtgcagctgaaatttcgagcctgtttgaagattctcaccgtggaactacggactctgtctacaggatatgaaatcgacggcggaaagctgcggtaccagctctaccactggctggaaaaggaggtgatcgccctgcagcggacctgtgatttttgctcggacgcagaggaactacaaagtgcatttgggcggaatgaggacgaatttggtctaaatgaggatgccgaggacctgccccaccaaacaaaagttaaacaactgcgagaaaactttcaggaaaaacgacagtggctgcttaagtatcaaagcctattgcgcatgttcttgagctattgtattttgcacgggtcgcatggcggtgggctcgcttctgtgcgtatggaattgattctgctcctgcaagaaagccaacaggagacctccgagcctttgtttagctcccctcttagcgagcaaacctccgttccactcctcttcgcctgtacagcaaatgcgaaaaccgttgtggcgaatcctcttcttcacctcagcaatttgacgcatgacatcttgcacgcaatcattaatttcgacagcccgccccatccagatatccagtctaataaggtgtacgtaatgcacacactcgccgcttccctgtccgcatgcatctaccagtgtctttgcggctctcataattactcgtcatttcaaacgaaccagttcactggcatggtgtatcagaccgtcttgctgcctcacagaccctcactgaaaacgggatctttggatgaagccttgactccaaacacctctcccgcacagtggcctggcataacatgcttaatcagacttctcaatagcagtggcgaggaagcgcagtcaggacttaccgtactgctctgtgaaattcttaccgcagtttatctctctctctttatccacggtctggcaacacatagctcgaatgaactttttcggattgtggcccacccactgaacgaaaaaatgtggagcgctgttttcggcgggggggctcatgttccaagcaaagaacagacccacagtaaaaccttgcccgtgagttcactggtggaggagggggaaaaacagaataaacgttttagaccatccaagatgtcttgcagggaatccgctcctttgacgccgtctagcgcgcccgtttcccaggagagcctggccgtaaaagagaaattcattccaccagagctgtcaatctgggactattttatcgctaaaccctttctgccctcatcacagtctcgcgctgagtacgatagcgaagagagtttggggtctgatgatgatgacaatgatgatgatgatgatgtcttagcaagcgattttcatctccaggaacactcaaattccaacagctactcttggagcctaatgcgactggccatggtgcagctcgtgctcaacaatctgaaaaccttctatccctttgctgggcatgatttagccgagttgccggtgtcatcacccctctgtcatgctgtgctgaagactctccagtgctgggaacaggtcttgcttaggcgacttgaaattcacggaggtcctccccaaaattatatagcttctcacactgcagaggagagcctgagtgcggggccagccatacttaggcacaaagccctcctggagcctacgaatacaccattcaaatccaaacaccatttggccctgtctgtcaaacgcttatggcaatatctcgtcaagcaggaggaaatacaggaaaccttcattaaaaacattttcaccaaaaaaaggtgcctgaacgaatctcttgaggacaactccgaaacaattaagaatagtatgatggaggagcccaatatcaataaaatcgaggccgacctgggctatcctggggggaaggctcgaatcatccacaaagaaagtgacatcatcaccgcctttgcggttaacaaggccaacagaaattgtattgcgatcgcctcctcgcacgatgtgcaggagctggacgtctctggcatcctggcaactcaggtttacacctgggtcgacgacgatatagaggttgagaccaaaggttcggaggacttcctggttatccatgcccgcgatgatctgacggccgtgcagggaacaaccccgtatacccacagtaacccaggtacacctatcaacatgccgtggctgggttccacccagacaggccggggtgcctcagtcatgattaagaaggctatcaacaacgtcagacgcatgacttcccacccgaccttgccttactacctgacaggagcacaggacggcagcgtccgcatgtttgagtggggccattctcaacaaataacgtgctttcgctccgggggaaacagcagggttacccggatgcgctttaactaccaggggaacaaattcggtatcgtggatgctgatggctacttgagcctgtatcaaaccaattggaagtgttgtccagtcaccggatcaatgccaaagccttacttaacttggcagtgccataataaaacagctaacgactttgtgtttgtgagcagctccagtcttatcgccactgctggtctgagcactgacaaccgcaatgtgtgtttatgggacacactggtggcccccgctaatagtctcgtgcacgcctttacgtgccatgactctggtgccaccgtactggcttacgcccccaagcatcaattactgatcagtggcgggaggaagggctttacctatgtgttcgacttgtgtcagcgacagcagcgtcaactatttcagagccacgatagcccagtgaaggccgtggcggtagaccccacagaggaatactttgttacaggctccgcggagggtaacattaaaatctggtcgctatccacttttgggctcctccatacctttgtgtcggagcatgccaggcaaagcatcttccggaacatagggactggggttatgcaaatcgaaactggtccagccaatcatattttcagttgtggcgctgatggcaccatgaagatgcgaattctgcccgaccagttttcacctctgaatgaggtgcttaaaaacgacgtgaagttcatgctgtag

SEQ ID NO: 109303 - DNA, 9147 bp, Artificial Sequence
  derived and/or modified sequence
atgaacctgcaccaggtgctgaccggggctgtgaaccctggggaccactgcttctctgtgggcagcattggagaccagcgcttcaccgcctatgccagcggctgtgacatcgtcatcctgggcagtgactttgagcggctgcagatcatccctggggccaagcacggcaacatccaggtgggctgtgtggactgcagcatgcagcagggcaagattgctgccagctatggaaatgtcatcagcatctttgagcctgtgaacctgcccaagcagaagaagaacctggagctgtacagccagtggcagaagagcggccagttcttcctggagagcatcgcccacaacatcacctgggaccccaccggcagccggctgctgaccggcagcagctacctgcagctgtggagcaacaccaacctggagaagcccacagaagatgagaacctgaacaagacagacctgaactttggagactggaagtgcatctggcactgcaagacagccagccaggtgcacctgatgaagttctccccagatggagagttctttgccacagctgggaaggatgactgcctgctgaaggtgtggtacaacgtggagaactggaggacagctgtgaccagcccagatggcagcagcgagaagcagagccagggcgagattgacttctcctttgtgtacctggcccaccccagggctgtgaatggcttctcctggaggaagaccagcaagtacatgccccgggcctctgtgtgcaatgtgctgctgacctgctgcaaggacaacgtgtgccgcctgtgggtggagaccttcctgcccaatgactgcctgctgtatggaggagactgcagccactggacagagagcatcaacctgaccaacaacttcaagagaaatgccagcagcaaggagcgggtgcagaatgccctggaggtgaacctgcggcacttccggcggggcagaagaagaagcctggccctggtggcccacacaggctacctgccccaccagcaggacccccaccacgtgcacaggaacacccccctgcacgccaatgccctgtgccacttccacatcgccgccagcatcaacccagccacagacatccccctgctgcccagcatcaccagcctgagcctgaatgaaaatgaggagaagacaggcccctttgtggtgcactggctgaacaacaaggagctgcacttcaccctgtccatggaggtgttcctgcagcagctgaggaagagctttgagcagcccagcagcgaggcctctgtggaggacagcaaccaggctgatgtgaagagtgatgaggagacagatgatggagtggatgacctgaagatcaaccctgagaagaaggagctgggctgtgacaagatggtgcccaacagcagcttcaccagcctgagcagcgctgccatcgaccaccagatcgaggtgctgctgtctgagtggagcaagaatgctgacatgctgttcagcatccaccccatggatggcagcctgctggtgtggcacgtggactggctggatgagtaccagcccggcatgttccggcaggtgcaggtgtcctttgtgagccgcatccctgtggccttccccactggagatgccaacagcctgtgcaagagcatcatgatgtatgcctgcaccaagaatgtggacctggccatccagcagggcaagcagaagcccagcggcctgaccaggagcacctccatgctgatcagcagcggccacaacaagagcagcaacagcctgaagctgagcatcttcacccccaacgtgatgatgatcagcaagcatgctgatggcagcctgaaccagtggctggtgtcctttgctgaggagagcgccttcagcacagtgctgagcatcagccacaagagccgctactgcggccaccgcttccacctgaatgacctggcctgccacagcgtgctgcccctgctgctgaccaccagccaccacaatgccctgcggaccccagatgtggacaaccctgagcagccctttgatgccctgaacatcgaggagtgcagcctgacccagcagaacaagagcacagtggatgtggccttccaggaccccagcgctgtgtacagcgagctgatcctgtggagggtggaccctgtgggccccctgtccttctctggaggagtgtctgagctggcccgcatcaacagcctgcacgtgtctgccttcagcaatgtggcctggctgcccaccctcatccccagctactgcctgggcgcctactgcaacagccccagcgcctgctttgtggccagtgatggccagtacctgcggctgtatgaagctgtgattgatgccaagaagctgctgtctgagctgagcaaccctgagatcagcaaatatgtgggggaggtgttcaacatcgtgtcccagcagagcacagcccggcccggctgcatcatcgccctggaccccatcaccaagctgcacggcaggaagacccagctgctgcacgtgtttgaggaggacttcatcctgaacaacctggagaagaagagcctgggcaaggacagcatcctgagcaatgccggcagcagccccaacggcttcagcgagaagttctacctgattgtgattgaatgtacccaggacaacagaagcctgctgcacatgtggaacctgcacctgaagagcatccctgtgtccctggatgagaaggtggacaccaagctgtctgaggccgtgtggcagcctgaggagcactacagcagcagccctgagaagatcctgagccccttcagccagaagtaccaggcctgccgggccaacctgcagagcaccagccggctgaccctcttcagcgagatggtgtacagccaggagctgcacctgcctgagggcgtggagatcatcagcatcaagcccagcgctggccacctgagcagcagcagcatctacccagcctgcagcgccccctacctgctggccaccagctgcagtgatgagaaggtgcgcttctggcgctgccgggtgacagatggagagagcgccaccagcaagaatggcaagattgacctggcctacatctgggaggagtggcccctgctgattgaagatggcctgcagagcaacagcagcatcaccgtgcccggccggcctgtggaggtgtcctgtgcccacaccaaccggctggccgtggcctacaagcagcctgccagcaacagccgcagcagccaggactttgtgatgcacgtgtccatctttgaatgtgagagcactggaggcagctgctgggtgctggagcagaccatccacctggatgagctgagcacagtgctggacagcggcatctctgtggacagcaacctggtggcctacaacaagcaggacatgtacctgagcagcaaggagaacatcaccagcaacaccaagcacctggtgcacctggactggatgagccgggaggatggcagccacatcctgactgtgggcatcggcagcaagctgttcatgtatggccccctggccggcaaggtgcaggaccagacaggcaaggagaccctggccttccccctgtgggagagcaccaaggtggtgcccctgagcaagtttgtgctgctgcggtctgtggacctggtgtcctctgtggatggcagcccccccttccctgtgtccctgtcctgggtgagagatggcatcctggtggtgggcatggactgtgagatgcacgtgtactgccagtggcagcccagcagcaagcaggagcctgtgatcacagacagctacagcggcagcacccccagcatcaccagcctcatcaagcagagcaacagcagcagcggcctgcacccccccaagaagaccctgaccaggtccatgaccagcctggcccagaagatctgtgggaagaagacagcctttgaccccagcgtggacatggaggacagcggcctgtttgaggccgcccacgtgctgagccccaccctgccccagtaccaccccctgcagctgctggagctgatggacctgggcaaggtgcggcgggccaaggccatcctgagccacctggtgaagtgcatcgccggggaggtggtggccctgaatgaagctgagagcaaccatgaaagaaggctgcggagcctgaccatcagcgccagcggcagcaccacccgggacccccaggccttcaacaaggcagaaaatacagactacacagaaattgacagcgtgccccccctgcccctgtatgccctgctggccgcagatgatgacagctgctacagcagcctggagaagagcagcaatgaaagcaccctgagcaagagcaaccagctgagcaaggagagctatgatgagctgttccagacccagctgctgatgacagacacccacatgctggagacagatgaggagaacaccaagccccgggtgattgacctgagccagtacagccccacctactttggacctgagcacgcccaggtgctgagcggccacctgctgcacagcagcctgcccggcctgagcaggatggagcagatgagcctgatggccctggccgacaccatcgccaccaccagcacagacattggagagagccgggacaggagccagggcggggagaccctggatgaatgtggcctgaagttcctgctggccgtgcggctgcacaccttcctgaccaccagcctgcctgcctaccgggcccagctgctgcaccagggcctgagcaccagccactttgcctgggccttccacagcgtggccgaggaggagctgctgaacatgctgcctgccatgcagaaggatgaccccacctggagcgagctgcgggccatgggcgtgggctggtgggtgaggaacacccgcatcctgaggaagtgcatcgagaaggtggccaaggccgccttctacaggaagaatgaccccctggatgctgccatcttctacctggccatgaagaagaaggccgtcatctggggcctgtacagagctgagaagaacaccaggatgacccagttcttcggccacaactttgaagatgagcgctggaggaaggccgccctgaagaatgccttcagcctgctgggcaagcagagatttgagcacagcgctgccttcttcctgctggccggctgcctgagagatgccatcgaggtgtgcctggagaagctgaatgacatccagctggccctggtgattgcccggctgtatgaaagtgaatttgacaccagcgctgcctacaagagcatcctgaggaagaaggtgctgggcatcgacagccctgtgtctgagctgtgcagcctgaacatcaacatgcaccacgaccccttcctgcgctccatggcctactggatcctggaggactacagcggggccctggagaccctcatcaagcagcccatcagagaaaatgatgaccaggtgctgagcgccagcaaccccaccgtcttcaacttctacaactacctgcggacccaccccctgctgctgcggcggcacttcggcagcagtgacaccttcagcacccacatgagcctgaccgggaagagcggcctggccggcaccatcaacctgtctgaaagaagactcttcttcaccacagccagcgcccacctgaaggccggctgccccatgctggccctggaggtgctgagcaagatgcccaaggtgatcaagaagacccggcccttctaccgggccagcagcttcctggacaccagcaaggactgcagccccagcagccccctgaagctggatgcccgggaggacaagagcagcgctgtggactggagccagagcctcatcaatggcttcggcagcagcagcgagggcagcagcgagaagcagagcaacagcaccctgagctttgactggagccagcccagcgtggtgttccaggatgacagcctggagctgaagtgggacagcgacaatgatgaagaaaatgaagatgtgcccatctccatgaaggagctgaagcccctgcagaggaagacagacaagaagctggatgacatcagcagcaactacacagagagcttcagcaccctggatgaaaatgacctgctgaaccccagcgaggacatcatcgctgtgcagctgaagttccgggcctgcctgaagatcctgactgtggagctgcggaccctgagcacaggctatgaaattgatggcggcaagctgcgctaccagctgtaccactggctggagaaggaggtgattgccctgcagaggacctgtgacttctgcagtgatgctgaggagctgcagagcgcctttggaagaaatgaagatgaatttggcctgaatgaagatgctgaggacctgccccaccagaccaaggtgaagcagctgcgggagaacttccaggagaagaggcagtggctgctgaagtaccagagcctgctgaggatgttcctgagctactgcatcctgcacggcagccatggaggcggcctggcctctgtgaggatggagctgatcctgctgctgcaggagagccagcaggagaccagcgagcccctcttcagcagccccctgtctgagcagacctctgtgcccctgctgtttgcctgcacagccaatgccaagacagtggtggccaaccccctgctgcacctgagcaacctgacccatgacatcctgcacgccatcatcaactttgacagccccccccacccagacatccagagcaacaaggtgtatgtgatgcacaccctggccgccagcctgagcgcctgcatctaccagtgcctgtgtggcagccacaactacagcagcttccagaccaaccagttcaccggcatggtgtaccagacagtgctgctgccccaccggcccagcctgaagacaggcagcctggatgaggccctgacccccaacaccagccctgcccagtggccaggcatcacctgcctgatccggctgctgaacagcagtggagaggaggcccagagcggcctgactgtgctgctgtgtgagatcctgacagctgtgtacctgagcctcttcatccacggcctggccacccacagcagcaatgaactcttccgcatcgtggcccaccccctgaatgagaagatgtggagcgctgtgtttggaggaggagcccacgtgcccagcaaggagcagacccacagcaagaccctgcctgtgagcagcctggtggaggagggggagaagcagaacaagcgcttccggcccagcaagatgagctgccgggagagcgcccccctgacccccagcagcgcccctgtgtcccaggagagcctggccgtgaaggagaagttcatccccccagagctgagcatctgggactacttcatcgccaagcccttcctgcccagcagccagagcagagcagaatatgacagcgaggagagcctgggcagtgatgatgatgacaatgatgatgatgatgatgtgctggccagtgacttccacctgcaggagcacagcaacagcaacagctacagctggagcctgatgaggctggccatggtgcagctggtgctgaacaacctgaagaccttctacccctttgctggccatgacctggccgagctgcctgtgagcagccccctgtgccacgctgtgctgaagaccctgcagtgctgggagcaggtgctgctgcggcggctggagatccacggcggccccccccagaactacatcgccagccacacagctgaggagagcctgtctgctggccctgccatcctgcggcacaaggccctgctggagcccaccaacacccccttcaagagcaagcaccacctggccctgtctgtgaagaggctgtggcagtacctggtgaagcaggaggagatccaggagaccttcatcaagaacatcttcaccaagaagcgctgcctgaatgaaagcctggaggacaacagcgagaccatcaagaacagcatgatggaggagcccaacatcaacaagattgaagctgacctgggctacccaggcggcaaggcccgcatcatccacaaggagagtgacatcatcacagcctttgctgtgaacaaggccaacagaaactgcatcgccatcgccagcagccatgatgtgcaggagctggatgtgtctggcatcctggccacccaggtgtacacctgggtggatgatgacatcgaggtggagaccaagggcagcgaggacttcctggtgatccacgccagagatgacctgacagctgtgcagggcaccaccccctacacccacagcaaccctggcacccccatcaacatgccctggctgggcagcacccagacaggccgcggggcctctgtgatgatcaagaaggccatcaacaacgtgcggaggatgaccagccaccccaccctgccctactacctgaccggggcccaggacggctctgtgaggatgtttgagtggggccacagccagcagatcacctgcttccgcagcggcggcaacagccgggtgaccaggatgaggttcaactaccagggcaacaagtttggaattgtggatgctgatggctacctgagcctgtaccagaccaactggaagtgctgccctgtgacaggctccatgcccaagccctacctgacctggcagtgccacaacaagacagccaatgactttgtgtttgtgagcagcagcagcctcatcgccacagctggcctgagcacagacaacagaaatgtgtgcctgtgggacaccctggtggccccagccaacagcctggtgcacgccttcacctgccacgacagcggggccaccgtgctggcctatgcccccaagcaccagctgctgatcagcggcggcaggaagggcttcacctacgtgtttgacctgtgccagaggcagcagaggcagctgttccagagccatgacagccctgtgaaggctgtggccgtggaccccacagaggagtactttgtgacaggcagcgctgagggcaacatcaagatctggagcctgagcaccttcggcctgctgcacacctttgtgtctgaacatgcccggcagagcatcttcaggaacatcggcaccggggtgatgcagattgaaacaggccctgccaaccacatcttcagctgtggggctgatggcaccatgaagatgaggatcctgcctgaccagttcagccccctgaatgaggtgctgaagaatgatgtgaagttcatgctgtag

SEQ ID NO: 109304 - DNA, 9147 bp, Artificial Sequence
  derived and/or modified sequence
atgaacctgcaccaggtgctgaccggcgccgtgaaccccggcgaccattgctttagtgtgggcagcattggcgaccaacgatttaccgcctatgcttccgggtgtgatatcgttatattggggtcagacttcgaaaggctccagatcatcccgggcgcgaaacacggcaatatccaggtgggttgcgttgattgtagtatgcagcaaggtaagatagccgcttcttacggaaacgttatcagtatctttgaacccgtgaacctgccaaagcagaagaagaacctggagctgtattctcaatggcagaaaagcggacagttcttcctggaaagcattgcccacaatatcacctgggatcccacagggtctcgcttgctaacaggctcatcctatttgcagctgtggtcaaatactaatcttgagaaacctactgaagacgaaaatttgaataagactgacctgaatttcggggattggaagtgcatctggcactgcaagactgcttcccaagtgcacttaatgaaattttctcctgatggggagttttttgccaccgctggaaaagacgattgtctgctgaaagtgtggtataatgtcgagaactggcgcacagccgtgacgtcacccgatggatcttccgaaaagcaatcccagggagaaattgattttagttttgtgtatctggcccacccacgggctgtcaacgggtttagctggaggaaaacatctaagtatatgcctagagcttcagtgtgtaacgtgcttctgacatgctgcaaagacaacgtctgtagactttgggtcgaaaccttcttacccaacgattgcctcctctacggtggcgactgctctcactggaccgaatcaataaacttgaccaataactttaaaagaaacgccagcagtaaggaacgtgtccaaaatgcactggaagtcaacttaagacactttagacgtgggagacggagatcacttgcactggtcgcccacaccgggtacctgccacatcaacaggatcctcatcacgtgcataggaacacccccctgcatgccaatgccctctgccacttccacatcgcggcctccattaacccggcaactgatatccccctcctgccaagtatcacctccctaagcttaaatgagaatgaagaaaagaccggacccttcgtagtccactggctgaataacaaagaattgcatttcactctgtctatggaggtgttcctgcagcagttaagaaagagttttgagcaaccatcgagcgaggcatctgtggaggatagtaatcaggctgacgtgaaatccgacgaggaaactgacgatggggtcgacgacctcaagataaaccctgaaaaaaaagagctcggctgcgataaaatggtccctaacagttctttcactagcctctcctccgcagcgatcgatcaccagatcgaggtgctgcttagtgaatggtctaaaaacgctgacatgttattttcaatacaccccatggatggcagcctactggtctggcacgtcgactggctggatgagtaccaaccaggtatgttcaggcaggtccaagtgtcttttgtaagccgcattccggtggcatttcccaccggggatgcaaacagcctctgcaaaagtatcatgatgtacgcatgtactaaaaacgtagatctcgccatccagcagggtaagcagaagccatctgggcttaccaggagcacttctatgctcatttcaagcgggcacaacaagtcctctaactccctgaagcttagcatcttcacacctaacgttatgatgatatctaaacatgcagacgggagcttaaatcagtggctagtgagcttcgctgaagaatccgctttctccaccgtcctgtccatctcacataaatctcgatattgcggccaccgctttcatctgaatgacttggcctgtcatagtgtgctgccgctgctcctgacgacttcccatcacaatgccttacgaactccggatgtggataatccggagcaaccattcgatgcccttaatattgaggagtgctcacttacacagcaaaataagtctactgtcgatgtcgcctttcaggaccccagcgcggtgtacagtgagctgattctctggagggtggatccagtcggaccacttagtttctccggcggagtcagcgagcttgctcgtattaactccttacatgtttccgccttcagcaatgtggcttggctccccaccttaattccttcgtattgccttggagcttactgcaactcacctagcgcctgctttgtcgcgagcgacggccagtatcttcggctttacgaggcagtgatcgatgcaaagaaattgttatcagaactctcaaatcccgagatatccaagtatgttggtgaggtgtttaatatcgtgtcgcagcagagtaccgcccgacccgggtgtatcatcgcactcgacccaatcacaaaactacatggacgcaagacacagctgctccacgtatttgaagaggacttcatcctaaataacctggagaaaaagagtctgggcaaggacagtatcctgtctaacgccggatcttcccccaatggcttctcagagaagttctacctgattgtgatcgagtgcactcaagacaatcgatccctattacacatgtggaacctgcacttaaagagcataccagtgtctcttgatgaaaaagtggatactaaactttctgaagctgtgtggcagcctgaggagcattattcatcttcccccgagaaaattttgagtccattctcccagaagtaccaagcctgccgcgctaatctccaaagcacaagccgtctgactttatttagtgagatggtgtacagtcaagagctccaccttcccgaaggcgtggagatcatctccattaagcccagcgctggacacttgtcgtcttccagcatataccccgcctgctccgcgccttacctgttagccacatcttgcagtgatgagaaggtgaggttttggcgctgccgagtcaccgacggtgagagcgccacatcaaagaatggcaaaatcgatttggcgtacatatgggaagaatggcctctattgatcgaagatggtctccagtctaattcctcaattactgtgcctgggaggccagtggaagtcagctgcgctcatacaaaccgattggcagtggcctacaaacagcctgcatcgaactcccgcagtagtcaagactttgtcatgcacgtctcgatttttgagtgcgagagtactggtggttcttgttgggtgcttgaacagaccattcacctcgacgaactgtcaacggtgcttgatagtggtattagtgtggattcgaacctcgtagcatataataagcaggacatgtacctctcatccaaggagaatattacttccaatacgaaacacttagtgcacctggattggatgagtcgggaggacggttcccacattctcacggtgggaattgggtcgaagctgtttatgtatggccccctagccggtaaagtgcaggaccagacagggaaggaaacactggcattccccctttgggaaagcacgaaagtggtgcccctcagcaaattcgtgttactgaggtccgtagaccttgtttcatctgtggacgggtccccgccctttcctgtctccctgagctgggtgagggatggaattctggtcgtcggcatggactgcgaaatgcacgtatattgtcaatggcagcccagttctaagcaggagcctgtaattactgactcttacagcggatcaacgcctagtatcacgtccctgatcaagcagtccaactccagcagcggccttcatccaccaaagaaaacgttaaccagatcaatgaccagcctcgcgcaaaagatttgtggtaagaaaaccgcctttgatcccagcgtagacatggaagattcaggactttttgaggcagcgcatgtgctatcacctacactccctcaataccatccattacagctgttagagcttatggatctcggcaaggtgcggcgtgcaaaagcaatactgtctcacttggtgaaatgcatcgcaggagaggtagtcgcccttaatgaggccgagtcaaatcatgagaggaggctccggagtctgacaatctcagcttctgggtccacgacgagggacccccaggccttcaataaagccgagaacacagactatacagaaattgactcagtgccccctctgccgctttatgcccttctggcagccgatgacgattcctgctattcatccttagagaagtctagcaacgaaagtacgctgtctaagtcgaatcaattgagcaaagaaagttatgacgagctctttcaaactcagctcctgatgacggatactcatatgctggagactgacgaagagaacacaaaacctcgtgtgattgacttatctcagtactcccctacttacttcggacctgaacacgctcaggtgcttagcggacacctgctccattcaagtctgcctggcctgtcaaggatggaacagatgtctctgatggcactagctgatacaatcgcgaccactagcacggacataggcgaatcccgagaccgaagccaggggggggagacgctggacgagtgtggattaaagtttttgctggccgtgaggttgcacacctttttgacgacgtcattaccggcgtaccgtgcacagctgctccatcaggggctttccacatcccactttgcttgggccttccattctgtcgcagaagaggagctgctgaacatgttgccagctatgcaaaaggacgaccccacctggtccgagttgcgcgcgatgggagtcggttggtgggtgcgcaacacccggattttgaggaaatgtattgaaaaagtggccaaggccgcattttatcggaagaacgatccactcgacgccgccatcttttacctggccatgaaaaagaaagccgttatatggggtctgtaccgggcagagaaaaacactcggatgacgcagtttttcggacataatttcgaggatgaaagatggcgcaaagcagcattaaagaacgccttcagcctgctgggcaagcaaaggtttgagcactcagcggcattcttcctccttgccggctgtctcagagacgccattgaagtttgtttggagaaattaaacgacattcagttagcactggttattgctaggctgtacgagagcgaattcgatacatcggcagcttataagtccattctgagaaagaaagtcctgggtatagacagtcccgtttcagagctttgttccttgaacattaatatgcaccacgaccctttcctccgctccatggcctactggatcctcgaggactatagcggcgcactagaaacactaatcaaacagccaatccgggagaatgatgatcaagtgctgtcagcgagtaaccccaccgtcttcaacttttacaactacctccgtacccaccctctactcttgagacgccattttggatcatccgacaccttctcaacccatatgtcgctgaccggtaagtccgggcttgccggaaccatcaatcttagtgagcgcagactcttctttacaaccgctagcgcccacttgaaggctgggtgccctatgctggctttggaggtactttctaagatgcctaaggtcatcaaaaaaacccggccgttctacagggcctcgagcttcctggacacttctaaggactgcagcccaagttcccctctgaaactggatgcccgcgaagataaatctagcgcagtggattggagccagagcctgattaatgggttcggctctagtagtgagggatcttctgagaaacaaagcaactctactctgagttttgactggtctcagccctctgtcgtcttccaggacgattccctcgagctcaagtgggatagcgataacgacgaagaaaatgaggatgtgcccatcagcatgaaagagctcaagccccttcagcgcaagactgataagaaactggacgatatcagctcgaactacactgagagcttctcaactttggacgaaaatgatcttttaaatccttcagaagatatcattgccgttcagctgaagtttagagcttgtctgaaaattcttaccgttgaattgcgcaccctaagcaccggctatgaaatagacgggggaaagcttcggtaccaactgtatcactggcttgaaaaagaagttatagctcttcagcggacctgcgacttctgctctgatgcagaagaactgcagtctgctttcggacgaaatgaggacgaattcggcctaaacgaggatgccgaggatctccctcatcaaaccaaggtgaagcagttgagggaaaactttcaagaaaaaagacagtggctcttaaagtatcagtccctcctgcgcatgttcctctcctattgtatccttcacggaagccacgggggagggttagccagcgtgagaatggagttgatattgttgctacaagagtctcaacaggaaacatcggagcccctgttttcttcccctctgtccgagcagacctcagtgccactcctattcgcctgtaccgctaatgccaagacagtggttgcaaacccgctcctgcacctctcaaacttgacccacgacattctgcatgctatcattaactttgacagtccaccccatccagacattcagagcaacaaagtgtacgtaatgcacactcttgcagctagtttgagtgcctgcatctaccagtgcctgtgtgggagtcataattattcctcgttccagaccaatcagttcacaggcatggtctatcagactgttctgctgcctcatcgtcctagtctgaaaacagggtctttggatgaggctctgacacccaacactagccccgcacagtggccgggaatcacttgtttaatccggcttctgaactcgtctggagaggaggctcagtccgggctgactgtgctgttatgtgagatcttgactgcagtttatctgagcctctttattcatggcctggccacacacagctcaaatgaactgtttaggatcgtggcacatcccctcaacgaaaagatgtggagcgcggtctttgggggtggcgctcacgtcccctctaaagagcagacccattctaaaactttaccggtctcctctcttgtggaggaaggcgagaagcaaaataaacggttcaggccctctaaaatgtcctgccgggagtctgctcccctaaccccatcatcagcccccgtgtcacaagaatcactggccgttaaggaaaagtttattcctcccgaactgagtatttgggactactttatagcaaaaccgttcctgccttcatcccagtctagggctgagtacgattccgaggaatctctcggcagcgacgatgacgacaacgacgacgacgacgatgtgctggcctcagactttcacctgcaagaacacagcaactcaaattcgtattcttggtcgcttatgcggctggccatggtccaacttgttctaaataacctcaagaccttctacccgttcgcggggcatgaccttgccgagttacccgtgagctctcctctatgtcatgcagtgcttaagacacttcagtgttgggaacaagtacttttgaggcgcctggagatacacgggggacccccacagaattacattgcttcccataccgccgaagaatctctttcggctgggcctgcaatcctcaggcataaggccttactcgaaccaactaataccccttttaaatctaagcatcatctggccctctccgttaaacgtttatggcagtacctcgttaagcaagaagaaattcaggaaacatttatcaaaaacatttttacgaaaaaacgctgtctcaatgaaagcttggaggataactcagagaccatcaagaactctatgatggaggaacccaatattaataaaatagaggcagatctgggctaccctggaggcaaggcccgcatcatacataaagaaagtgatatcatcacggcatttgctgttaataaggctaatcggaattgcatcgcaattgcgtcttctcacgatgtgcaggaactggacgtctctggcatattggctacccaggtgtacacttgggtggacgatgacattgaggtggagacaaaaggctccgaggactttctcgtgatccatgcgagggacgatctgacagccgtgcaggggactactccatatactcacagcaacccagggacacccatcaatatgccctggcttggtagcacacaaaccgggagaggcgcaagtgtgatgatcaagaaggctattaacaatgtcagacggatgacgtctcacccgacacttccatattacctcactggcgcacaggacggatctgtccgcatgttcgagtggggccactctcaacagatcacgtgctttagatctggcggaaatagtcgtgtgacccgcatgcgcttcaattaccagggtaacaaatttggtatcgtcgacgctgacggttacctgagcctgtaccagacaaattggaagtgctgccccgtgacagggagcatgccaaaaccttacctgacctggcagtgccataataagaccgccaatgacttcgtgtttgttagctctagctcccttattgctaccgctggactctcaacagacaaccggaacgtctgtctgtgggatactctcgtggcgcctgcgaacagcctggtccacgccttcacatgtcacgatagtggcgcgaccgtgctggcctacgcccccaagcaccagctgctgatcagcggcggtaggaaagggttcacatacgtatttgatctctgtcagcgacagcagaggcagctctttcagtcgcatgatagcccagtgaaggctgtggctgtggacccaaccgaggagtacttcgtgactggctccgctgagggaaatatcaaaatctggagcctaagtacttttgggctccttcacacatttgtcagtgagcacgctcggcaatcgatctttagaaatatcggtacaggggttatgcagatagaaacgggccctgccaaccatattttctcctgcggtgctgacggaaccatgaagatgaggattctcccggatcagtttagccctttgaacgaagtcctgaagaatgacgtgaagtttatgctttag

SEQ ID NO: 109305 - DNA, 9146 bp, Artificial Sequence
  derived and/or modified sequence
atgaacctgcatcaggtccttaccggcgcagttaatcctggcgaccattgtttttcggtgggcagcattggcgatcagcgcttcactgcctacgcgagcggttgtgacattgtgatcttggggtcggacttcgaacgactgcagattatacccggagcgaagcatggaaatatccaggtgggctgcgtggactgctcgatgcagcagggcaagattgcagcctcttatggaaacgttatttccatcttcgaaccagtgaatctgccaaagcaaaaaaaaaacctggagctgtattcacagtggcaaaagagcggacaattttttctcgagagcatagcgcataatatcacgtgggatcccactggttcacgccttctgaccgggtcttcatatctgcagttgtggtccaacactaatttagaaaaaccgacagaagatgaaaacctgaacaaaacagatctgaattttggggattggaagtgcatttggcattgcaagactgcgagccaggtgcacctgatgaagttctcccccgatggggagttcttcgctaccgcgggaaaagatgattgtttattgaaagtgtggtacaatgtcgagaattggaggaccgccgtgacttcacctgacggaagcagcgagaagcagtcacagggggagatcgacttctcctttgtttatcttgcccatccgagggcagttaacggcttctcttggcggaagaccagcaagtatatgcccagagctagcgtatgcaacgtccttcttacatgctgtaaggacaatgtgtgccggctctgggtcgaaactttcctgccaaatgattgcctgctatacggaggagactgctcccattggaccgagtcaatcaacttaacgaacaattttaaaaggaatgcatcaagcaaagaacgcgtgcagaatgccttggaggtgaatctccgtcatttcagaagagggcgtagacggagcttggctctagtagcccacaccggttatctccctcaccaacaggatccgcaccacgtccatagaaacacccctctgcatgccaacgccctctgtcacttccacatagccgcttccatcaatcctgccacagatatcccactactgccttctatcaccagcctctccttaaatgagaatgaggagaagacaggaccctttgttgtacattggctcaataacaaagagttgcactttactctatcgatggaggtatttctgcagcagctgcggaagtcttttgaacaaccctcgtcagaggcatctgtagaggattccaatcaggcggacgtaaagtccgacgaagagacagatgatggcgttgacgacctgaagatcaaccctgagaagaaggagctggggtgcgataagatggttcccaatagctccttcacctctttatcgtcagccgctattgaccaccagatcgaggtgctgctgtcggaatggtcaaaaaatgctgatatgttgttctcaatccatcctatggacggttctctcctggtgtggcacgtagactggctcgatgagtaccagcctgggatgtttcgccaggtgcaggtgtcttttgtgagcaggattcctgtcgcgttccccaccggggacgctaattcgctttgtaagagcataatgatgtacgcctgcaccaagaacgtggatttagcaatccagcaggggaagcagaaaccttctggccttacaagatcgacctccatgctgatttcgtccggacacaataaatcaagcaactcccttaagctctctatattcacaccaaatgtaatgatgatatccaagcatgcagacggatcattgaatcagtggcttgtgagttttgcagaggaatcagcctttagcaccgtgctgagcatcagtcataaaagcagatactgtgggcatcggttccacctgaacgacttggcctgtcatagcgtgcttcccctgctgcttactacatctcatcacaacgccttgcggacacctgacgtagataatccggagcaaccctttgacgcgctcaatatcgaggaatgtagtctgactcagcagaataagtctacagttgatgtagcctttcaggacccctctgctgtttactctgaattgattctgtggcgggtggaccccgtgggccctctgagctttagcggcggtgtttctgagctggcacggatcaactccctccacgtgtctgctttcagcaacgtagcctggctgccaaccctgatcccatcctactgccttggcgcttattgcaacagcccaagcgcgtgctttgtagcctccgacggacagtaccttcgactatacgaagcagtgattgatgccaagaagttactgtcagagctttccaaccccgagatctctaaatatgtgggagaagtcttcaacatagtgtctcagcagtcaacggccagacctgggtgcataatcgcgctcgaccccatcactaaactgcacggcaggaagacacagttattgcacgttttcgaagaggacttcattctaaataacctggagaagaaaagtcttggcaaggattcgatcctctcaaacgccggatcctcccccaacggtttctccgagaagttctacttaatagtaatcgaatgcacccaggacaacaggagcctgctacatatgtggaacttgcacctgaagtctattcctgtgtctctggatgagaaggtggacaccaagttatctgaagcagtgtggcagccagaagagcactatagtagcagcccagagaagatcttgtctcccttctcacaaaaatatcaggcatgccgtgccaacctccagtcgactagcaggctgaccctcttttccgagatggtctattctcaggagctgcatctgcctgaaggggtcgagatcatatctattaagccttctgcgggtcacctgagtagcagctctatctatccagcttgctcagctccctatctgctcgcgacttcctgcagtgatgagaaggtgcggttctggcggtgccgcgtgacagacggtgagagcgccaccagtaaaaacggcaaaattgacctggcctacatatgggaggaatggcccctactaattgaagacgggcttcagagtaattcctctattactgtgccaggccgacctgttgaagtctcctgcgcccatacaaatcgtctggccgttgcatataagcagccagcttctaacagtcgcagttcacaggattttgtgatgcacgtttccatctttgagtgtgagtccaccggaggatcttgctgggtgctcgaacagaccatccacttggacgagttgagcacagtactagattctggtatttcagtggactcaaatctggttgcctacaacaaacaggacatgtacctgtcatcaaaagaaaacatcaccagtaacacaaagcatctggtgcatctggattggatgtcccgcgaagatggttctcatatcttgacggtcggaattggaagtaagttgtttatgtacgggcctcttgccggaaaggtgcaagaccagacaggtaaggagacactggccttcccactttgggagagcactaaagtggtgccactcagcaagtttgtgttactgaggtctgtggacttggttagcagcgtggacggaagccccccattccccgttagcctgtcctgggtgagagacgggattctcgtggtgggtatggactgtgagatgcatgtttactgtcagtggcagcccagtagcaagcaggagccagtgattacagactcttacagtggatccaccccctctattacttcgctgatcaagcagtccaattccagtagtgggctccacccgcctaagaaaacactgactcgatccatgactagtctggcacaaaaaatctgcgggaagaagactgcctttgatcccagtgtcgacatggaagactccggcctgtttgaggctgcacatgtattgtctcctaccctgcctcagtaccatccgctacagctgctggagctgatggatttaggtaaggttaggagagccaaggccattctgtcacacctagtgaaatgcatagcaggggaagtcgtagcactgaatgaagctgaatctaaccacgagcgccgtctgcggtccctgaccatttctgcaagtggctctacaacccgcgacccccaagccttcaataaggcagagaatacagactacacagagatcgatagcgtacctcctctgcccctatacgccctgctggcagccgacgatgattcctgttacagctccttggagaaaagctctaacgagtcaacattatcgaagtccaaccagctgtccaaagaaagctacgatgagctgtttcagactcagctgctaatgacagacactcatatgctggagacagatgaagaaaacactaagccaagagtcatcgacctgtcacagtatagtcccacttatttcggacctgaacatgcacaggtcttatcggggcacctcctgcatagtagcctgccaggtctgtcccggatggagcagatgagtctaatggccctggccgatacaatagccaccacaagcacagatattggagaatccagagatagatcccaggggggagagacacttgacgaatgtggactgaaatttctcctggctgtccgcctgcatacttttttaacaacttctttacctgcatatcgggctcagctgctgcaccaaggtctgagcaccagtcacttcgcttgggccttccatagtgtagccgaggaggagctcttaaatatgttgcccgctatgcagaaggacgatccaacttggtctgaattgagggcaatgggggtggggtggtgggtgcgaaatacaaggattctccggaaatgcattgagaaagtggcgaaggcagccttctatagaaagaacgaccccctggacgctgcaatcttttacctagcgatgaagaagaaggcagtgatatgggggctgtaccgcgctgagaagaacacgaggatgactcaattttttggtcacaatttcgaagacgaaaggtggaggaaggcagccttaaaaaacgcatttagtctgctgggcaagcaacgtttcgaacattcagccgcatttttcctcctggccggatgtttaagggatgctatcgaagtttgtcttgagaagctgaatgatatccaactggctctcgtaattgcgaggttgtacgagtccgagtttgacactagcgcggcttacaagagcatcttgcgaaaaaaggtcctagggattgacagccctgtgtctgaactatgttctctcaatatcaacatgcatcatgaccctttcctgcgtagtatggcctattggatcctagaagactactctggggcactggagacactgataaaacagcctattcgagagaatgatgaccaagtgctgtccgcttctaatccaacagtgttcaacttctataattacctgaggacacatcccttattgctgagaaggcactttggcagctctgataccttctccacacacatgagtcttacgggaaaatcaggcctcgctggcactatcaacctgtcagaacgaagactgttctttacgaccgctagtgcgcacctaaaagctggctgcccaatgctggcactggaagtcctgtccaagatgcccaaggtgataaagaagaccaggccattctaccgcgcaagcagcttcctcgatacttctaaggactgctcaccctctagcccccttaaactggacgcacgggaggacaaaagcagtgcagttgactggtcccagtccctgatcaatggcttcggcagttcctctgagggatcaagcgagaagcagtcaaactcaaccttgagcttcgactggagccagccttccgtggtgttccaggacgactctcttgaactgaagtgggatagtgacaacgacgaagagaacgaagacgtgccgattagcatgaaagagctaaagccacttcagaggaagacagataaaaaactggatgacattagttcgaattatacggaatcattcagtaccctggacgaaaacgacctgttgaacccgtccgaagatattatcgccgtccagctgaaatttcgcgcatgtttaaagatcctgactgttgagctcagaactcttagtaccgggtacgaaattgacgggggtaagctgcgctaccagctttaccactggctggagaaggaggtcattgctctgcaacggacctgcgatttttgttccgacgccgaggaactgcagagtgcgttcggaagaaatgaagatgaatttgggctaaacgaagacgcggaggatctcccccatcagaccaaagtcaagcagctgagagaaaattttcaggagaagaggcaatggctgctgaagtatcagagtctgctaaggatgttcctgagctattgtatcctgcacggaagccacggcggaggcctagccagcgtccgcatggaactcatcctgctgctgcaggagtcccagcaggagaccagcgagcctctcttttctagcccgttgagcgagcaaacgtcagttcccctcctgttcgcctgcactgccaatgccaagaccgtggttgctaaccctctcttgcacctcagtaaccttacacatgacatcctgcacgctataatcaactttgattccccaccccaccctgacatccagtcgaataaggtctacgttatgcatactctggcagcttccttgagtgcttgcatataccagtgcctgtgtggcagccataactattccagctttcagacaaaccagtttacaggtatggtttaccaaaccgtcctattgccacaccgtccatccctgaaaacaggatctctggacgaagccctcacccctaatacctctcctgcacagtggccaggcattacatgcctgattcgactgctgaacagctcaggtgaagaagctcagtccggattaaccgtgctgctttgtgaaattttaacagccgtttatctgagccttttcattcacggactggctacccacagttccaacgaactattccggattgttgcccatccacttaacgaaaagatgtggtctgcagtgtttggaggtggtgcccatgtcccatctaaggagcagactcattctaagaccctaccggtgagttctctggtcgaggagggcgagaagcagaataagcggttcagaccaagcaaaatgtcttgcagggagtccgcaccccttaccccatcaagcgctcctgtgtctcaagaatctcttgccgtgaaagagaagttcataccccctgagctgtccatctgggactacttcatcgccaaaccatttcttccttccagtcagtctagagccgagtacgacagtgaggaatccctggggagcgatgacgacgataacgatgacgacgacgacgtgctggcatccgacttccacctccaggagcattcaaacagcaacagctattcttggtctctgatgcgcttagctatggtgcagttggtccttaataatctgaagactttctacccattcgccggtcatgacctggcagagcttcccgtcagcagtcccctatgtcatgctgtgctgaagaccctgcagtgctgggaacaagtattgctgaggagactcgaaatccatggcggacccccacaaaactatatcgcctctcacactgcagaggagtccctgtccgccggtcccgcaatcctgcggcacaaggcccttctcgagcccaccaatactccatttaaatccaagcaccacttagccttgtcagtgaagagattgtggcaatatctggtcaagcaggaagaaatccaggaaacatttattaaaaacatcttcactaagaaaaggtgtctgaacgagtcacttgaagataactccgaaacgattaagaattccatgatggaagagcccaatattaataagatcgaagccgacctagggtatcctgggggtaaggcacgcatcattcacaaagagagtgacatcataactgcttttgcagtgaacaaagcaaataggaactgcatagctatcgcctctagtcatgatgtgcaggaattagacgtgtctggaatactggctacgcaagtttacacctgggtggatgatgacattgaggtggagactaaaggatctgaagatttcctggtcattcatgctagggacgatctcacagccgtgcaggggactaccccatacactcatagtaatcctggaacacccatcaatatgccctggctcgggtcaacgcagacgggcagaggggcttctgtcatgatcaaaaaggccattaacaacgtccgaagaatgacctcccaccctactttaccatactacctcaccggcgcacaggacgggagcgtccgcatgtttgaatggggacatagtcaacagataacttgctttagaagtggtggtaactcaagagtaacacggatgcgctttaattatcagggaaacaaattcggcatcgtggatgcagacggttatttgtcactctatcaaacaaattggaaatgctgtccagtgacaggctctatgccgaagccatatttaacctggcagtgtcacaacaagacagccaatgatttcgtgtttgtgagttcctcctccctgattgcaacagctggactttccacagataaccgcaacgtctgtctttgggacacattggtcgctcctgcgaatagcctggtccatgcctttacctgtcacgactcaggtgcaaccgtcctggcttatgcacctaagcaccagctgctgatatccggaggcaggaaagggttcacctatgttttcgacctatgccagcggcagcagcgacagctcttccagagtcatgattctccagttaaagccgtcgcggtagatcctaccgaggagtacttcgtaacaggctcagccgaaggtaacattaaaatctggtctctttccacttttggcctcctgcacacatttgtcagcgaacacgctcgtcagagcatctttaggaacatcggcacaggcgttatgcaaatcgaaactggacctgctaatcatatcttctcgtgtggtgcagacggaaccatgaagatgaggatcctgcccgaccagtttagtcccctgaatgaggttctgaaaaacgatgttaagtttatgctgta

SEQ ID NO: 109306 - DNA, 9147 bp, Artificial Sequence
  derived and/or modified sequence
atgaacctgcaccaggtgctgaccggcgccgtgaaccccggcgaccactgcttcagcgtgggcagcatcggcgaccagagattcaccgcctacgccagcggctgcgacatcgtgatcctgggcagcgacttcgagagactgcagatcatccccggcgccaagcacggcaacatccaggtgggctgcgtggactgcagcatgcagcagggcaagatcgccgccagctacggcaacgtgatcagcatcttcgagcccgtgaacctgcccaagcagaagaagaacctggagctgtacagccagtggcagaagagcggccagttcttcctggagagcatcgcccacaacatcacctgggaccccaccggcagcagactgctgaccggcagcagctacctgcagctgtggagcaacaccaacctggagaagcccaccgaggacgagaacctgaacaagaccgacctgaacttcggcgactggaagtgcatctggcactgcaagaccgccagccaggtgcacctgatgaagttcagccccgacggcgagttcttcgccaccgccggcaaggacgactgcctgctgaaggtgtggtacaacgtggagaactggagaaccgccgtgaccagccccgacggcagcagcgagaagcagagccagggcgagatcgacttcagcttcgtgtacctggcccaccccagagccgtgaacggcttcagctggagaaagaccagcaagtacatgcccagagccagcgtgtgcaacgtgctgctgacctgctgcaaggacaacgtgtgcagactgtgggtggagaccttcctgcccaacgactgcctgctgtacggcggcgactgcagccactggaccgagagcatcaacctgaccaacaacttcaagagaaacgccagcagcaaggagagagtgcagaacgccctggaggtgaacctgagacacttcagaagaggcagaagaagaagcctggccctggtggcccacaccggctacctgccccaccagcaggacccccaccacgtgcacagaaacacccccctgcacgccaacgccctgtgccacttccacatcgccgccagcatcaaccccgccaccgacatccccctgctgcccagcatcaccagcctgagcctgaacgagaacgaggagaagaccggccccttcgtggtgcactggctgaacaacaaggagctgcacttcaccctgagcatggaggtgttcctgcagcagctgagaaagagcttcgagcagcccagcagcgaggccagcgtggaggacagcaaccaggccgacgtgaagagcgacgaggagaccgacgacggcgtggacgacctgaagatcaaccccgagaagaaggagctgggctgcgacaagatggtgcccaacagcagcttcaccagcctgagcagcgccgccatcgaccaccagatcgaggtgctgctgagcgagtggagcaagaacgccgacatgctgttcagcatccaccccatggacggcagcctgctggtgtggcacgtggactggctggacgagtaccagcccggcatgttcagacaggtgcaggtgagcttcgtgagcagaatccccgtggccttccccaccggcgacgccaacagcctgtgcaagagcatcatgatgtacgcctgcaccaagaacgtggacctggccatccagcagggcaagcagaagcccagcggcctgaccagaagcaccagcatgctgatcagcagcggccacaacaagagcagcaacagcctgaagctgagcatcttcacccccaacgtgatgatgatcagcaagcacgccgacggcagcctgaaccagtggctggtgagcttcgccgaggagagcgccttcagcaccgtgctgagcatcagccacaagagcagatactgcggccacagattccacctgaacgacctggcctgccacagcgtgctgcccctgctgctgaccaccagccaccacaacgccctgagaacccccgacgtggacaaccccgagcagcccttcgacgccctgaacatcgaggagtgcagcctgacccagcagaacaagagcaccgtggacgtggccttccaggaccccagcgccgtgtacagcgagctgatcctgtggagagtggaccccgtgggccccctgagcttcagcggcggcgtgagcgagctggccagaatcaacagcctgcacgtgagcgccttcagcaacgtggcctggctgcccaccctgatccccagctactgcctgggcgcctactgcaacagccccagcgcctgcttcgtggccagcgacggccagtacctgagactgtacgaggccgtgatcgacgccaagaagctgctgagcgagctgagcaaccccgagatcagcaagtacgtgggcgaggtgttcaacatcgtgagccagcagagcaccgccagacccggctgcatcatcgccctggaccccatcaccaagctgcacggcagaaagacccagctgctgcacgtgttcgaggaggacttcatcctgaacaacctggagaagaagagcctgggcaaggacagcatcctgagcaacgccggcagcagccccaacggcttcagcgagaagttctacctgatcgtgatcgagtgcacccaggacaacagaagcctgctgcacatgtggaacctgcacctgaagagcatccccgtgagcctggacgagaaggtggacaccaagctgagcgaggccgtgtggcagcccgaggagcactacagcagcagccccgagaagatcctgagccccttcagccagaagtaccaggcctgcagagccaacctgcagagcaccagcagactgaccctgttcagcgagatggtgtacagccaggagctgcacctgcccgagggcgtggagatcatcagcatcaagcccagcgccggccacctgagcagcagcagcatctaccccgcctgcagcgccccctacctgctggccaccagctgcagcgacgagaaggtgagattctggagatgcagagtgaccgacggcgagagcgccaccagcaagaacggcaagatcgacctggcctacatctgggaggagtggcccctgctgatcgaggacggcctgcagagcaacagcagcatcaccgtgcccggcagacccgtggaggtgagctgcgcccacaccaacagactggccgtggcctacaagcagcccgccagcaacagcagaagcagccaggacttcgtgatgcacgtgagcatcttcgagtgcgagagcaccggcggcagctgctgggtgctggagcagaccatccacctggacgagctgagcaccgtgctggacagcggcatcagcgtggacagcaacctggtggcctacaacaagcaggacatgtacctgagcagcaaggagaacatcaccagcaacaccaagcacctggtgcacctggactggatgagcagagaggacggcagccacatcctgaccgtgggcatcggcagcaagctgttcatgtacggccccctggccggcaaggtgcaggaccagaccggcaaggagaccctggccttccccctgtgggagagcaccaaggtggtgcccctgagcaagttcgtgctgctgagaagcgtggacctggtgagcagcgtggacggcagcccccccttccccgtgagcctgagctgggtgagagacggcatcctggtggtgggcatggactgcgagatgcacgtgtactgccagtggcagcccagcagcaagcaggagcccgtgatcaccgacagctacagcggcagcacccccagcatcaccagcctgatcaagcagagcaacagcagcagcggcctgcacccccccaagaagaccctgaccagaagcatgaccagcctggcccagaagatctgcggcaagaagaccgccttcgaccccagcgtggacatggaggacagcggcctgttcgaggccgcccacgtgctgagccccaccctgccccagtaccaccccctgcagctgctggagctgatggacctgggcaaggtgagaagagccaaggccatcctgagccacctggtgaagtgcatcgccggcgaggtggtggccctgaacgaggccgagagcaaccacgagagaagactgagaagcctgaccatcagcgccagcggcagcaccaccagagacccccaggccttcaacaaggccgagaacaccgactacaccgagatcgacagcgtgccccccctgcccctgtacgccctgctggccgccgacgacgacagctgctacagcagcctggagaagagcagcaacgagagcaccctgagcaagagcaaccagctgagcaaggagagctacgacgagctgttccagacccagctgctgatgaccgacacccacatgctggagaccgacgaggagaacaccaagcccagagtgatcgacctgagccagtacagccccacctacttcggccccgagcacgcccaggtgctgagcggccacctgctgcacagcagcctgcccggcctgagcagaatggagcagatgagcctgatggccctggccgacaccatcgccaccaccagcaccgacatcggcgagagcagagacagaagccagggcggcgagaccctggacgagtgcggcctgaagttcctgctggccgtgagactgcacaccttcctgaccaccagcctgcccgcctacagagcccagctgctgcaccagggcctgagcaccagccacttcgcctgggccttccacagcgtggccgaggaggagctgctgaacatgctgcccgccatgcagaaggacgaccccacctggagcgagctgagagccatgggcgtgggctggtgggtgagaaacaccagaatcctgagaaagtgcatcgagaaggtggccaaggccgccttctacagaaagaacgaccccctggacgccgccatcttctacctggccatgaagaagaaggccgtgatctggggcctgtacagagccgagaagaacaccagaatgacccagttcttcggccacaacttcgaggacgagagatggagaaaggccgccctgaagaacgccttcagcctgctgggcaagcagagattcgagcacagcgccgccttcttcctgctggccggctgcctgagagacgccatcgaggtgtgcctggagaagctgaacgacatccagctggccctggtgatcgccagactgtacgagagcgagttcgacaccagcgccgcctacaagagcatcctgagaaagaaggtgctgggcatcgacagccccgtgagcgagctgtgcagcctgaacatcaacatgcaccacgaccccttcctgagaagcatggcctactggatcctggaggactacagcggcgccctggagaccctgatcaagcagcccatcagagagaacgacgaccaggtgctgagcgccagcaaccccaccgtgttcaacttctacaactacctgagaacccaccccctgctgctgagaagacacttcggcagcagcgacaccttcagcacccacatgagcctgaccggcaagagcggcctggccggcaccatcaacctgagcgagagaagactgttcttcaccaccgccagcgcccacctgaaggccggctgccccatgctggccctggaggtgctgagcaagatgcccaaggtgatcaagaagaccagacccttctacagagccagcagcttcctggacaccagcaaggactgcagccccagcagccccctgaagctggacgccagagaggacaagagcagcgccgtggactggagccagagcctgatcaacggcttcggcagcagcagcgagggcagcagcgagaagcagagcaacagcaccctgagcttcgactggagccagcccagcgtggtgttccaggacgacagcctggagctgaagtgggacagcgacaacgacgaggagaacgaggacgtgcccatcagcatgaaggagctgaagcccctgcagagaaagaccgacaagaagctggacgacatcagcagcaactacaccgagagcttcagcaccctggacgagaacgacctgctgaaccccagcgaggacatcatcgccgtgcagctgaagttcagagcctgcctgaagatcctgaccgtggagctgagaaccctgagcaccggctacgagatcgacggcggcaagctgagataccagctgtaccactggctggagaaggaggtgatcgccctgcagagaacctgcgacttctgcagcgacgccgaggagctgcagagcgccttcggcagaaacgaggacgagttcggcctgaacgaggacgccgaggacctgccccaccagaccaaggtgaagcagctgagagagaacttccaggagaagagacagtggctgctgaagtaccagagcctgctgagaatgttcctgagctactgcatcctgcacggcagccacggcggcggcctggccagcgtgagaatggagctgatcctgctgctgcaggagagccagcaggagaccagcgagcccctgttcagcagccccctgagcgagcagaccagcgtgcccctgctgttcgcctgcaccgccaacgccaagaccgtggtggccaaccccctgctgcacctgagcaacctgacccacgacatcctgcacgccatcatcaacttcgacagccccccccaccccgacatccagagcaacaaggtgtacgtgatgcacaccctggccgccagcctgagcgcctgcatctaccagtgcctgtgcggcagccacaactacagcagcttccagaccaaccagttcaccggcatggtgtaccagaccgtgctgctgccccacagacccagcctgaagaccggcagcctggacgaggccctgacccccaacaccagccccgcccagtggcccggcatcacctgcctgatcagactgctgaacagcagcggcgaggaggcccagagcggcctgaccgtgctgctgtgcgagatcctgaccgccgtgtacctgagcctgttcatccacggcctggccacccacagcagcaacgagctgttcagaatcgtggcccaccccctgaacgagaagatgtggagcgccgtgttcggcggcggcgcccacgtgcccagcaaggagcagacccacagcaagaccctgcccgtgagcagcctggtggaggagggcgagaagcagaacaagagattcagacccagcaagatgagctgcagagagagcgcccccctgacccccagcagcgcccccgtgagccaggagagcctggccgtgaaggagaagttcatcccccccgagctgagcatctgggactacttcatcgccaagcccttcctgcccagcagccagagcagagccgagtacgacagcgaggagagcctgggcagcgacgacgacgacaacgacgacgacgacgacgtgctggccagcgacttccacctgcaggagcacagcaacagcaacagctacagctggagcctgatgagactggccatggtgcagctggtgctgaacaacctgaagaccttctaccccttcgccggccacgacctggccgagctgcccgtgagcagccccctgtgccacgccgtgctgaagaccctgcagtgctgggagcaggtgctgctgagaagactggagatccacggcggccccccccagaactacatcgccagccacaccgccgaggagagcctgagcgccggccccgccatcctgagacacaaggccctgctggagcccaccaacacccccttcaagagcaagcaccacctggccctgagcgtgaagagactgtggcagtacctggtgaagcaggaggagatccaggagaccttcatcaagaacatcttcaccaagaagagatgcctgaacgagagcctggaggacaacagcgagaccatcaagaacagcatgatggaggagcccaacatcaacaagatcgaggccgacctgggctaccccggcggcaaggccagaatcatccacaaggagagcgacatcatcaccgccttcgccgtgaacaaggccaacagaaactgcatcgccatcgccagcagccacgacgtgcaggagctggacgtgagcggcatcctggccacccaggtgtacacctgggtggacgacgacatcgaggtggagaccaagggcagcgaggacttcctggtgatccacgccagagacgacctgaccgccgtgcagggcaccaccccctacacccacagcaaccccggcacccccatcaacatgccctggctgggcagcacccagaccggcagaggcgccagcgtgatgatcaagaaggccatcaacaacgtgagaagaatgaccagccaccccaccctgccctactacctgaccggcgcccaggacggcagcgtgagaatgttcgagtggggccacagccagcagatcacctgcttcagaagcggcggcaacagcagagtgaccagaatgagattcaactaccagggcaacaagttcggcatcgtggacgccgacggctacctgagcctgtaccagaccaactggaagtgctgccccgtgaccggcagcatgcccaagccctacctgacctggcagtgccacaacaagaccgccaacgacttcgtgttcgtgagcagcagcagcctgatcgccaccgccggcctgagcaccgacaacagaaacgtgtgcctgtgggacaccctggtggcccccgccaacagcctggtgcacgccttcacctgccacgacagcggcgccaccgtgctggcctacgcccccaagcaccagctgctgatcagcggcggcagaaagggcttcacctacgtgttcgacctgtgccagagacagcagagacagctgttccagagccacgacagccccgtgaaggccgtggccgtggaccccaccgaggagtacttcgtgaccggcagcgccgagggcaacatcaagatctggagcctgagcaccttcggcctgctgcacaccttcgtgagcgagcacgccagacagagcatcttcagaaacatcggcaccggcgtgatgcagatcgagaccggccccgccaaccacatcttcagctgcggcgccgacggcaccatgaagatgagaatcctgcccgaccagttcagccccctgaacgaggtgctgaagaacgacgtgaagttcatgctgtag

SEQ ID NO: 109307 - DNA, 9319 bp, Artificial Sequence
  derived and/or modified sequence
gtccgttgcaggactagggcgccgacatgaacctgcaccaggtgctgaccggggctgtgaaccctggcgaccactgcttctccgtgggcagcattggcgaccagcgcttcacggcttatgcatctggatgtgacattgtaatactgggaagcgattttgaaagattacagataatcccaggagctaaacatggaaatattcaagtgggatgtgtagactgttcaatgcaacaaggcaagattgcagcgtcttatggaaatgttatctccatttttgaaccagttaacctaccaaaacaaaagaaaaatttggaattatatagtcagtggcagaaaagtggccaattttttctggaatcaatagcacacaatataacctgggatcccacaggcagtcgtcttttaactggttccagctatttgcaactctggtccaatactaacttggagaagccaactgaagatgaaaatttaaataaaacagatcttaactttggagattggaaatgcatttggcattgcaaaactgcttcccaagttcatttaatgaaattttcaccagatggagaattttttgccactgctgggaaggatgactgtcttttgaaggtttggtataatgtagaaaactggcggacagctgttacttctccagatggaagttcagaaaaacaatcccaaggagaaattgacttttcttttgtgtatctggcccatcctcgagcagtaaatggattttcctggcgtaaaacaagcaaatatatgcctagggcttctgtatgtaatgtactgttgacttgctgcaaagataatgtgtgtcgtctttgggtagagacatttttaccaaatgattgtttgctatacggaggtgactgcagccattggactgaatcaattaatttaacaaataacttcaagagaaatgcttccagtaaagaacgagttcaaaatgctttagaagtaaatctgagacattttcgtagaggtcggaggagatcacttgctcttgtagcacatacgggatatctaccacatcagcaggatcctcatcatgttcacaggaacactccactgcatgccaatgcactttgccactttcatattgcagccagcatcaacccagccacagacattccacttcttccatctattacatctctgagtctaaatgaaaatgaagagaagaccggaccttttgttgtacactggctaaacaataaagaactgcattttactttgtccatggaagtttttttacagcaacttagaaaaagttttgaacaaccatcttctgaggccagtgtagaagattctaatcaggcagatgtaaaatctgatgaagaaactgatgatggtgttgatgatctgaaaataaatcccgaaaagaaggaattaggctgtgataaaatggtaccaaactcaagttttacatcattatcgtcagctgccattgatcatcagattgaagtacttctgtctgaatggagtaaaaatgcagatatgctatttagtattcatcccatggatggttctttgctagtttggcatgtggattggctggatgaataccagcctggtatgtttcgtcaagtacaggtgtcctttgtttccagaattccagtagctttccccacaggtgatgcaaactctctctgtaaaagcataatgatgtatgcctgtaccaagaatgttgacttggctattcagcaggggaaacaaaaaccttctggcctcacccgttccacatcaatgcttatttcttctggtcacaataaatcatctaatagtttaaaattaagtatttttacgcctaatgttatgatgatatcaaaacatgctgatggttctctgaatcagtggctggtcagttttgccgaggaatctgctttttctactgttctcagtatttcccacaaatccagatattgtggtcatcgttttcatcttaatgatttagcttgccactcagtattaccattattgctgacaacatcacaccataatgcattaaggacaccagatgttgataacccagagcaaccttttgatgctctaaatattgaagaatgctctttgacacaacaaaataaaagcactgttgacgtggcatttcaggatcccagtgcagtttacagtgagcttattctgtggagggttgacccagttgggccattgtctttttctggaggagtttctgagcttgcccggattaattctcttcatgtttctgccttttccaatgtggcatggctgcccactcttatacccagttattgtctgggtgcatactgcaactctcctagtgcatgctttgtagccagtgatggacaatatctgagattatatgaagcagttattgatgctaagaaacttttatctgagctttctaaccctgaaatttctaaatatgttggtgaagtctttaacatcgtcagtcaacaatcaacagccaggccaggatgcattattgcattagatcccattaccaaacttcatggcagaaaaacccaactgcttcatgtttttgaagaagacttcattttgaataaccttgagaagaaaagccttggcaaagacagcattttatctaatgcaggcagctcacctaatggattttctgagaagttctacctaattgtaatagaatgcactcaagacaaccgttcactgttacacatgtggaatttacatctaaagtcaattcctgtctcattagatgaaaaagtagatacaaaattatccgaagcggtttggcagccagaagaacattattcttcttctccagagaagatcctatctcctttttcacaaaagtatcaggcttgcagagcaaatctccagagtaccagcaggttgactctgttttcagaaatggtttatagccaagaattgcatttaccagaaggagttgagataataagtattaagccatcagcaggacatctgagttcatcttctatatatcctgcatgcagtgctccttatttattggcaacttcatgttcagatgagaaagtaagattctggagatgcagagtaacagatggagaatctgccacgtcaaagaatggaaaaattgatcttgcatacatttgggaagaatggccattacttattgaagatggacttcagagcaatagtagtataactgtacctggtaggcctgtagaagttagctgtgcacatacaaatcgtttagcagtagcttataagcagcctgcatctaatagtagatcttcccaggactttgtgatgcatgtaagtatttttgaatgtgagtcaacaggaggttcatgttgggtccttgagcagacaattcatttagatgagttaagcacagtattggattctggcattagtgttgatagcaatttagtggcctataataaacaagacatgtatttatctagtaaagagaatatcacatcaaacacaaagcatttagttcacttagattggatgtctagagaagacggttctcatatcctgactgtaggaattggatcaaaactttttatgtatggacccctggctggcaaggtacaagaccaaactggtaaggaaaccctggcatttcctctctgggagagtaccaaagttgtgcccctttctaaatttgtactattacgaagtgtggacctagtttcttctgtagatggctccccaccttttcctgtttctttatcgtgggtccgggatggcatccttgtggtaggaatggactgtgaaatgcatgtgtattgccaatggcaaccatcttctaaacaagaacctgttataacagattcgtacagtgggagcactccatctataacaagtttaataaaacagagtaactccagttctgggttacatcctccaaagaaaactctgactcgatccatgaccagtcttgcacagaaaatctgtggaaagaaaactgcattcgatccttcagtggatatggaagattcaggtctttttgaagcagctcatgtactttccccgactctacctcagtatcatcccttgcagcttttggaactcatggatcttggtaaagttcggagagccaaggccatcttgtcccatcttgttaagtgcattgctggggaagttgtggctctgaatgaagctgaatctaatcatgaacgccgccttaggtctctcacaatcagtgctagtggaagcactaccagagacccccaggcattcaacaaggctgaaaatacagattacacagaaatagattctgttcctccacttcctttatatgccttacttgcagcagatgatgatagctgttactcatctttggagaaatctagtaatgagagtacgttaagtaaatcaaaccaattatctaaagaaagttatgatgagctttttcagactcaacttctaatgactgatactcatatgttagagacagatgaagaaaatacaaagcctagagttattgacctttcacagtacagtccgacttactttggacctgagcatgctcaggttctttctggccacttacttcattctagtttaccaggactcagccggatggagcagatgtctttgatggccttagcagatacaattgcaactacaagcactgatattggagaaagccgagacagaagccaaggtggagaaactcttgatgaatgtgggttaaaatttcttttggctgttcgactccatacctttcttacaacttcccttccagcctatcgagctcaactccttcaccaaggcctgtctacaagtcattttgcttgggcatttcactcagtagcagaagaagaactgctgaacatgttgccagccatgcagaaagatgatcccacttggtctgaactaagagctatgggtgtggggtggtgggtccggaatacccgcatcttacgcaaatgcatagaaaaagtagctaaagcagccttttatagaaagaatgatcctttagatgctgccattttttaccttgcaatgaaaaagaaagctgtgatttggggattatatagagctgaaaaaaacaccaggatgacacagttttttggacacaattttgaggatgagaggtggcgtaaagcagctttaaagaatgctttttctttgctaggcaaacaaagatttgaacattctgcagcattttttcttttagctggttgcctcagagatgcaattgaggtatgtcttgagaaattgaatgacattcagttggctcttgtaatagcaagactctatgagtctgaatttgatacatctgcagcatataaatctattttacgtaaaaaagttttgggaatcgattctcctgtcagtgaactgtgttcattgaacataaatatgcatcatgatccttttcttcggagcatggcatattggattttggaagattatagtggtgctctggaaacattaataaagcaacctatcagagagaatgatgatcaagttttatcagccagtaatcctacagtttttaatttctacaattatctaagaacacatcctcttttgctgagacgtcattttggatcatctgatacattttccacacatatgagcctaacaggaaaaagtggactggcaggaacaattaatttaagtgaaagacgtttattttttaccactgccagtgctcatttaaaagctggctgcccaatgttggctttggaagtattatcaaagatgcctaaagtcatcaagaaaacaagacctttttatagggcttctagttttctggatactagtaaagactgttctccttcttctccattaaagttggatgcaagggaagataagtcttctgctgttgattggtcacagtcactgataaatggttttggatcttcttcagagggttcctcagagaagcaatcaaactccactctttcttttgactggagccaaccaagtgttgtgtttcaggatgactctttagagttaaaatgggacagtgataatgatgaagaaaatgaggatgtccctatttcaatgaaagaactaaaacctttacagagaaaaacagataaaaagttggatgacataagttctaactacacagaatctttcagcacactagatgaaaatgaccttttaaatccatcagaagatataattgcagttcagttaaaatttagagcatgtttaaagattctcacagtagaacttcgtactttatctactggctatgaaatagatggtggaaaattgcgttaccaactataccactggcttgaaaaagaggtgatagctcttcagaggacttgtgacttttgctcagatgctgaagaactacagtctgcatttggcagaaatgaagatgaatttggattaaatgaggatgctgaagatttgcctcaccaaacaaaagtgaaacaactgagagaaaattttcaggaaaaaagacagtggctcttgaagtatcagtcacttttgagaatgtttcttagttactgcatacttcatggatcccatggtgggggtcttgcatctgtaagaatggaattgattttgcttttgcaagaatctcagcaggaaacatcagaaccactattttctagccctctgtcagagcaaacctcagtgcctctcctctttgcttgtacagccaatgccaaaacagtagttgccaatccattattgcaccttagtaatctgacacatgatattctccatgccataataaactttgattcaccaccccaccctgatatccaaagcaataaagtgtatgtaatgcatactttagcagcttcactttctgcttgtatttatcagtgcctttgtggtagtcataactacagttcatttcagacgaatcagtttactggaatggtatatcagacagtactgcttcctcatcgaccttctttgaaaacaggaagcttagatgaagcattaactcccaatacgtcaccagctcaatggccaggaataacttgtctaattcgacttttgaattcttctggcgaggaagcccagtcagggcttacagtcttgctctgtgagattctcacagcagtgtatcttagtctcttcatccatggcctggccacacattcaagtaatgagctatttcggattgtggcccatcctctaaatgagaaaatgtggtctgctgtgtttggtggaggtgcacatgttcctagcaaagaacagacacattcaaaaactttacctgtttcttcactagttgaagaaggagaaaaacagaacaaacgttttaggccgtcaaaaatgtcttgcagagaatctgccccactgaccccttcctcggcaccagtaagccaggagtcactggcggttaaagaaaagttcatcccacctgagctcagtatctgggactatttcatagctaagccttttctaccctcttctcaaagtagagccgaatatgattcagaggagagtctgggaagtgatgatgatgacaatgatgatgatgatgatgttttagcatcagatttccatctccaggaacattctaattcaaattcatatagttggtccttgatgcggttggcgatggtgcaattggtgctcaacaatttgaagactttttatcccttcgcaggtcatgatcttgcagagcttccagttagttcacctctttgtcatgcggttctaaaaactcttcaatgttgggaacaagttcttctccgacgacttgaaatccatggtgggccacctcaaaattatatcgcaagtcataccgccgaagagagtttgtctgcaggtcctgcaattcttcgccacaaagctttactggaacctacaaacactcctttcaaatccaaacaccatctggcactgtctgtgaagaggctttggcagtatttggtgaagcaggaagaaattcaggaaacctttatcaaaaatatattcacaaagaaacggtgtctaaatgagtcattagaggacaacagtgaaaccatcaaaaattctatgatggaggagccaaacatcaataagatagaagcagatttgggatatcctggaggtaaagcaagaattattcataaggaatctgatatcattactgcgtttgctgttaataaggcaaatagaaactgcatagcaatcgcttccagtcatgatgttcaagaactggatgtttctggaattctggccacacaggtctacacttgggtagatgatgatatagaagtggaaaccaaaggatcagaagatttcttggttatacatgctcgtgatgatttaacagctgttcaaggtacaactccatatacacatagcaatcctggcactccaatcaacatgccatggcttggtagtacacagactggcagaggagcatctgtgatgattaagaaagccattaataatgttagaagaatgacttctcatccaactcttccttactatctgacaggagctcaagatggaagtgtcagaatgtttgaatggggccattctcaacaaataacctgttttcgatctggtggcaattcaagagttacaagaatgagatttaactatcagggaaataagtttggaatagttgatgctgatggatatttaagtttgtatcaaacaaactggaaatgttgtccagttactggaagcatgcctaagccatacctgacttggcagtgtcataacaaaacagccaatgattttgtcttcgttagttcctcctctctgatagctacagctggtctttcaactgacaatagaaacgtatgtttgtgggatactcttgtagcacctgccaatagtttagtccatgcatttacctgccatgacagtggagccacagttttagcatatgctccaaaacatcagctactaatatcaggtggcagaaaaggttttacatatgtatttgacctttgtcaacgacaacagaggcagcttttccagagccatgattctcctgttaaagccgttgctgttgatccaactgaagagtactttgttacaggatctgccgaaggcaatataaagatttggagtctctctacctttggtcttctccatacttttgtcagtgaacatgctcggcagtccatttttagaaatattggaactggagtgatgcaaattgagacagggcctgcaaatcacattttctcctgtggagctgatggaacaatgaaaatgagaatactgccagatcagtttagccctttaaatgaagtgttgaaaaatgatgtgaaatttatgctataacatttttacaataagatgtacaatttattacctatatggaagtggccaacagatataatatacagtgatcattctctatgccacaaattagctaatgctttcttgtttttatatttattttatggagctttgcccttgatgcactg

SEQ ID NO: 109308 - protein, 383 aa, Artificial Sequence
  derived and/or modified sequence
MFWTFKEWFWLERFWLPPTIKWSDLEDHDGLVFVKPSHLYVTIPYAFLLLIIRRVFEKFVASPLAKSFGIKETVRKVTPNTVLENFFKHSTRQPLQTDIYGLAKKCNLTERQVERWFRSRRNQERPSRLKKFQEACWRFAFYLMITVAGIAFLYDKPWLYDLWEVWNGYPKQPLLPSQYWYYILEMSFYWSLLFRLGFDVKRKDFLAHIIHHLAAISLMSFSWCANYIRSGTLVMIVHDVADIWLESAKMFSYAGWTQTCNTLFFIFSTIFFISRLIVFPFWILYCTLILPMYHLEPFFSYIFLNLQLMILQVLHLYWGYYILKMLNRCIFMKSIQDVRSDDEDYEEEEEEEEEEATKGKEMDCLKNGLRAERHLIPNGQHGH

SEQ ID NO: 109309 - protein, 155 aa, Artificial Sequence
  derived and/or modified sequence
MFWTFKEWFWLERFWLPPTIKWSDLEDHDGLVFVKPSHLYVTIPYAFLLLIIRRVFEKFVASPLAKSFGIKETVRKVTPNTVLENFFKHSTRQPLQTDIYGLAKKCNLTERQVERWFRSRRNQERPSRLKKFQEACWRFAFYLMITVAGIAFLYD

SEQ ID NO: 109310 - protein, 15 aa, Artificial Sequence
  derived and/or modified sequence
MFWTFKEWFWLERFW

SEQ ID NO: 109311 - protein, 57 aa, Artificial Sequence
  derived and/or modified sequence
MFWTFKEWFWLERFWLPPTIKWSDLEDHDGLVFVKPSHLYVTIPYAFLLLIIRRVFE

SEQ ID NO: 109312 - DNA, 48 bp, Artificial Sequence
  derived and/or modified sequence
atgttctggaccttcaaggagtggttctggctggagagattctggtag

SEQ ID NO: 109313 - DNA, 48 bp, Artificial Sequence
  derived and/or modified sequence
atgttttggaccttcaaggaatggttctggctggaacgattttggtag

SEQ ID NO: 109314 - DNA, 48 bp, Artificial Sequence
  derived and/or modified sequence
atgttctggaccttcaaggagtggttctggctggagcgcttctggtag

SEQ ID NO: 109315 - DNA, 48 bp, Artificial Sequence
  derived and/or modified sequence
atgttctggaccttcaaggagtggttctggctggagcggttctggtag

SEQ ID NO: 109316 - DNA, 48 bp, Artificial Sequence
  derived and/or modified sequence
atgttttggaccttcaaagagtggttttggctcgagaggttctggtag

SEQ ID NO: 109317 - DNA, 3894 bp, Artificial Sequence
  derived and/or modified sequence
cgggatgcaccgctgcggggaccccccgcccggcctcgcggacccgcctcggcccaggacggaggaggaggtggtgaaacaggaagcaacatcccatcaggaagaacctgagggtgccatccagtagcttcgcctcacgtcactgactgccctcagtcagaaatcttgactcgcaactttggagggtgggtctctgaaggaatttcaggtcttacacagagatgagttgtgctgctctctgaggagaacgaagctggttggaacgttggaagctgctctctgactacacttcacaagcaaggggcaccttttgtggactgacatttcagaaagggatgttgtgaaacaaaagctgacatttatatatatatacatatatacagtatttgagttcctcagtagaaagctatcatatatactcagaatgttttggacgtttaaagaatggttctggttggaaagattctggcttcctccaacaataaagtggtcagatcttgaggatcacgatggactcgtctttgtaaaaccttctcatttatacgtgacaattccatatgcttttctcttgctgattatcagacgtgtatttgaaaaatttgttgcttcacctctagcaaaatcatttggcattaaagagacagttcgaaaggttacaccaaatactgtcttagagaattttttcaaacattccacaaggcaaccattgcaaactgatatttatggactggcaaagaagtgtaacttgacggagcgccaggtggaaagatggtttaggagtcggcggaatcaagagaggccttccaggctgaagaaattccaggaagcttgctggagatttgcattttacttaatgatcactgttgctggaattgcgtttctttatgataaaccttggctatatgacttatgggaggtttggaatggctatcccaaacagcccctgctgccatcccagtactggtactacattttagaaatgagtttttattggtctctgttatttagacttggctttgatgtcaagagaaaggattttctagctcatatcatccaccacctggctgctattagtctgatgagcttctcttggtgtgctaattatattcgcagtgggaccctcgtgatgattgtacacgatgtggctgacatttggctggagtctgctaagatgttttcttatgctggatggacgcagacctgtaacaccctgtttttcatcttctccaccatatttttcatcagccgcctcattgtttttcctttctggattttatattgcacgctgatcttgcctatgtatcacctcgagcctttcttttcatacatcttcctcaacctacagctcatgatcttgcaggtccttcacctttactggggttattacatcttgaagatgctcaacagatgtatattcatgaagagcatccaggatgtgaggagtgatgacgaggattatgaagaggaagaggaagaggaagaagaagaggctaccaaaggcaaagagatggattgtttaaagaacggcctcagggctgagaggcacctcattcccaatggccagcatggccattagctggaagcctacaggactcccatggcacagcatgctgcaagtactgttggcagcctggcttccaggccccacaccgaccccacattctgcccttccctctttctcaccaccgccttccctcccacctaagatgtgtttaccaaaatgttgttaacttgtgttaaaatgttaaatataagcatgcccatggatttttactgcagttaggactcagactggtcaaagatttcaaagatttctccacagaaccgtctcagttctaattgcactccctcatgcatgtcactttctcaggggctcgctttgttatagaccctttcgcctcgccaccttgcctgtcctcaggacgctttcacaggtgctaagtgatctcatttttcccaggtgtgtttggccacaaagagcagcttctttctcaaaatgagttagaagtggcagtgggacaggagcggaaggaccacaccaggagacacttccatcctgaagcttaggtgcctcatctccacagggcggtggcagtccctgcctgccaccccacagggttacagcaaggattaagtgagatcacagaagtttaagtacacactgtcaaccgtggggtcatcgtgaaccaacccactttgcactgtttgggagacagaaacctggctaaacatggcactgcaatgggcctgaacaaaaggcagaatctttaaaaattcctcttaaatgactctggagatacctggaaatgaaagtgccaagaaaggtgttccattttatttgctaactatttatgcattagctccccaagggtcattctcagattctcctggaattcttctccctcaggacccatggttcaaggaaggaagcttaggccctgttccttcctgtcctttgctggtctttcccttttttcctttctaggagggaagcttctgtgctgctgccctgagcccttccttcaggccagcacagtacctggggacctccacgggggaatgggatccaggccaggttgcttgctgagcctcatcacccaggaggcctgagcctctggggagggcacgcatgtacactgccagacccaggggagatcttgggaacagaggatgctacgtgatttcctctggcttccaacccaatcagcctgcatcacagtgaaacacaacacaaaaggccataaaaggcatacccctgagaaatgtttaagggcaggtgctagagtcagtgccagctccctgggaggagggatagggacgggcagatcagtagccagcttgtcctcaccctccggaagggagcaccggagaagacttgcacacgtccctgcctcccttgcggccttgtcaccagagggacacatctcctgggcacaatgtgcagggctgacctgggagacttctcaggtggctgctggctgaggagaggccaggccttcccaaggaagaccctgagtaaaatctgcatctgtcctcaccacctggcacagtctctcataacggtcagattttgtatgttcatcctatttattcaggggctcgtactagaaagccacaggagaggtcggcttgtagggactggaaaatcagccccaagcagagcagctgcagggcccctggagccggaaggacactgcacagaacagactgcgttattgttatttttaaataaaaatatacatttgaaaccttaaggctaaacaaaaataaacaaaaaatcctttagaattctttccacaacaatatctctttctgagaaattgttacaaacaaggtcagattttctctgtataacatttgcttttatgaggacaatatcatatgcattatatgcataatatgatattataaatcaaaatgcctgcacccactttagggtatagctattgacttattattaatattatattattattattttgctggaagaaggtcacactaagatataattttttatgttttcagttaacggtatgctttcttctttgcttatttggtttttgtctctgtaccaaatatcttcttgcttaaggtagaaaagtatttgtttacctctatctccagttttttttcttatttgaatgttgaaggtaaaattgatataccaattttaactatttctgatacagctgaaagcactaaactacttcataagaagtagatactcatttttgtaacactatttagggcttttgtggttaattttaaaggaaaccactctttctacaggaaacaagggctcaggattcttcagatgaccttataaaaatgcagtccacagtgctatcaatattgtaacagtaatgactacaataaagccaaaagtccagtgta

SEQ ID NO: 109318 - DNA, 2045 bp, Artificial Sequence
  derived and/or modified sequence
gagggcccgtgtccccgcggaggtcaaggccgagagagggcccgtgtccccgcgcaggtcaaggcccagagtccccgtgctcgcacagatggtgtcctggggcccagtcgcgctccccgctcgcggcagcccccgtgtactgggccttgcaaagtccgttaggagcgctccagggcgacagtgcccagcggttaacaagtggtgaaacaggaagcaacatcccatcaggaagaacctgagggtgccatccagtagcttcgcctcacgtcactgactgccctcagtcagaaatcttgactcgcaactttggagggtgggtctctgaaggaatttcaggtcttacacagagatgagttgtgctgctctctgaggagaacgaagctggttggaacgttggaagctgctctctgactacacttcacaagcaaggggcaccttttgtggactgacatttcagaaagggatgttgtgaaacaaaagctgacatttatatatatatacatatatacagtatttgagttcctcagtagaaagctatcatatatactcagatggcgttattccctctggtccccactgctctggccaaaccttctctctgctgactgcatctattgctgtgagctgattgtcctctagtttctccatctcctgaggcatgcttcacaccactgccagaagagctgccagaatgttttggacgtttaaagaatggttctggttggaaagattctggcttcctccaacaataaagtggtcagatcttgaggatcacgatggactcgtctttgtaaaaccttctcatttatacgtgacaattccatatgcttttctcttgctgattatcagacgtgtatttgaaaaatttgttgcttcacctctagcaaaatcatttggcattaaagagacagttcgaaaggttacaccaaatactgtcttagagaattttttcaaacattccacaaggcaaccattgcaaactgatatttatggactggcaaagaagtgtaacttgacggagcgccaggtggaaagatggtttaggagtcggcggaatcaagagaggccttccaggctgaagaaattccaggaagcttgctggagatttgcattttacttaatgatcactgttgctggaattgcgtttctttatgataaaccttggctatatgacttatgggaggtttggaatggctatcccaaacagcccctgctgccatcccagtactggtactacattttagaaatgagtttttattggtctctgttatttagacttggctttgatgtcaagagaaaggattttctagctcatatcatccaccacctggctgctattagtctgatgagcttctcttggtgtgctaattatattcgcagtgggaccctcgtgatgattgtacacgatgtggctgacatttggctggagtctgctaagatgttttcttatgctggatggacgcagacctgtaacaccctgtttttcatcttctccaccatatttttcatcagccgcctcattgtttttcctttctggattttatattgcacgctgatcttgcctatgtatcacctcgagcctttcttttcatacatcttcctcaacctacagctcatgatcttgcaggtccttcacctttactggggttattacatcttgaagatgctcaacagatgtatattcatgaagagcatccaggatgtgaggagtgatgacgaggattatgaagaggaagaggaagaggaagaagaagaggctaccaaaggcaaagagatggattgtttaaagaacggcctcagggctgagaggcacctcattcccaatggccagcatggccattagctggaagcctacaggactcccatggcacagcatgctgcaagtactgttggcagcctggcttccaggccccacaccgaccccacattctgcccttccctctttctcaccaccgccttccctcccacctaagatgtgtttaccaaaatgttgttaacttgtgttaaaatgttaaatataagcatgcccatggatttttactgca

SEQ ID NO: 109319 - DNA, 1856 bp, Artificial Sequence
  derived and/or modified sequence
ggccttgcaaagtccgttaggagcgctccagggcgacagtgcccagcggttaacaagtttgtaattactttcgtgggtttctacgttgcaaattgagaagagggttgctgggttgggcccccctcctctggacgctaaccccacccaggtggtgaaacaggaagcaacatcccatcaggaagaacctgagggtgccatccagtagcttcgcctcacgtcactgactgccctcagtcagaaatcttgactcgcaactttggagggtgggtctctgaaggaatttcaggtcttacacagagatgagttgtgctgctctctgaggagaacgaagctggttggaacgttggaagctgctctctgactacacttcacaagcaaggggcaccttttgtggactgacatttcagaaagggatgttgtgaaacaaaagctgacatttatatatatatacatatatacagtatttgagttcctcagtagaaagctatcatatatactcagaatgttttggacgtttaaagaatggttctggttggaaagattctggcttcctccaacaataaagtggtcagatcttgaggatcacgatggactcgtctttgtaaaaccttctcatttatacgtgacaattccatatgcttttctcttgctgattatcagacgtgtatttgaaaaatttgttgcttcacctctagcaaaatcatttggcattaaagagacagttcgaaaggttacaccaaatactgtcttagagaattttttcaaacattccacaaggcaaccattgcaaactgatatttatggactggcaaagaagtgtaacttgacggagcgccaggtggaaagatggtttaggagtcggcggaatcaagagaggccttccaggctgaagaaattccaggaagcttgctggagatttgcattttacttaatgatcactgttgctggaattgcgtttctttatgataaaccttggctatatgacttatgggaggtttggaatggctatcccaaacagcccctgctgccatcccagtactggtactacattttagaaatgagtttttattggtctctgttatttagacttggctttgatgtcaagagaaaggattttctagctcatatcatccaccacctggctgctattagtctgatgagcttctcttggtgtgctaattatattcgcagtgggaccctcgtgatgattgtacacgatgtggctgacatttggctggagtctgctaagatgttttcttatgctggatggacgcagacctgtaacaccctgtttttcatcttctccaccatatttttcatcagccgcctcattgtttttcctttctggattttatattgcacgctgatcttgcctatgtatcacctcgagcctttcttttcatacatcttcctcaacctacagctcatgatcttgcaggtccttcacctttactggggttattacatcttgaagatgctcaacagatgtatattcatgaagagcatccaggatgtgaggagtgatgacgaggattatgaagaggaagaggaagaggaagaagaagaggctaccaaaggcaaagagatggattgtttaaagaacggcctcagggctgagaggcacctcattcccaatggccagcatggccattagctggaagcctacaggactcccatggcacagcatgctgcaagtactgttggcagcctggcttccaggccccacaccgaccccacattctgcccttccctctttctcaccaccgccttccctcccacctaagatgtgtttaccaaaatgttgttaacttgtgttaaaatgttaaatataagcatgcccatggatttttactgca

SEQ ID NO: 109320 - DNA, 897 bp, Artificial Sequence
  derived and/or modified sequence
tcgcggcagcccccgtgtactgggccttgcaaagtccgttaggagcgctccagggcgacagtgcccagcggttaacaagtggtgaaacaggaagcaacatcccatcaggaagaacctgagggtgccatccagtagcttcgcctcacgtcactgactgccctcagtcagaaatcttgactcgcaactttggagggtgggtctctgaaggaatttcaggtcttacacagagatgagttgtgctgctctctgaggagaacgaagctggttggaacgttggaagctgctctctgactacacttcacaagcaaggggcaccttttgtggactgacatttcagaaagggatgttgtgaaacaaaagctgacatttatatatatatacatatatacagtatttgagttcctcagtagaaagctatcatatatactcagaatgttttggacgtttaaagaatggttctggttggaaagattctggcttcctccaacaataaagtggtcagatcttgaggatcacgatggactcgtctttgtaaaaccttctcatttatacgtgacaattccatatgcttttctcttgctgattatcagacgtgtatttgaaaaatttgttgcttcacctctagcaaaatcatttggcattaaagagacagttcgaaaggttacaccaaatactgtcttagagaattttttcaaacattccacaaggcaaccattgcaaactgatatttatggactggcaaagaagtgtaacttgacggagcgccaggtggaaagatggtttaggagtcggcggaatcaagagaggccttccaggctgaagaaattccaggaagcttgctggagatttgcattttacttaatgatcactgttgctggaattgcgtttctttatgat

SEQ ID NO: 109321 - DNA, 432 bp, Artificial Sequence
  derived and/or modified sequence
gtgtactgggccttgcaaagtccgttaggagcgctccagggcgacagtgcccagcggttaacaagtttgtaattactttcgtgggtttctacgttgcaaattgagaagagggttgctgggttgggcccccctcctctggacgctaaccccacccagggatgttgtgaaacaaaagctgacatttatatatatatacatatatacagtatttgagttcctcagtagaaagctatcatatatactcagatggcgttattccctctggtccccactgctctggccaaaccttctctctgctgactgcatctattgctgtgagctgattgtcctctagtttctccatctcctgaggcatgcttcacaccactgccagaagagctgccagaatgttttggacgtttaaagaatggttctggttggaaagattctggc

SEQ ID NO: 109322 - DNA, 638 bp, Artificial Sequence
  derived and/or modified sequence
gatggtgtcctggggcccagtcgcgctccccgctcgcggcagcccccgtgtactgggccttgcaaagtccgttaggagcgctccagggcgacagtgcccagcggttaacaagtggtgaaacaggaagcaacatcccatcaggaagaacctgagggtgccatccagtagcttcgcctcacgtcactgactgccctcagtcagaaatcttgactcgcaactttggagggtgggtctctgaaggaatttcaggtcttacacagagatgagttgtgctgctctctgaggagaacgaagctggttggaacgttggaagctgctctctgactacacttcacaagcaaggggcaccttttgtggactgacatttcagaaagggatgttgtgaaacaaaagctgacatttatatatatatacatatatacagtatttgagttcctcagtagaaagctatcatatatactcagaatgttttggacgtttaaagaatggttctggttggaaagattctggcttcctccaacaataaagtggtcagatcttgaggatcacgatggactcgtctttgtaaaaccttctcatttatacgtgacaattccatatgcttttctcttgctgattatcagacgtgtatttgaaaa

SEQ ID NO: 109323 - protein, 1429 aa, Artificial Sequence
  derived and/or modified sequence
MDSQFHMAGEASQSWLKAKEKQRGTSYMVAVIEWEIERSLLSSEDREQGATVFLREIQDLHKHILEDCALRMVDRLADGCLDADAQNLLSSLKSHITDMHPGVLKTHRLPWSRDLVNPKNKTHACYLKELGEQFVVRANHQVLTRLRELDTAGQELAWLYQEIRHHLWQSSEVIQTFCGRQELLARLGQQLRHDDSKQHTPLVLFGPPGIGKTALMCKLAEQMPRLLGHKTVTVLRLLGTSQMSSDARGLLKSICFQVCLAYGLPLPPAQVLDAHTRVVQFFHTLLHTVSCRNFESLVLLLDAMDDLDSVRHARRVPWLPLNCPPRVHLILSACSGALGVLDTLQRVLLDPEAYWEVKPLSGNQGQQMIQLLLAAARRTLSPVHTDLLWASLPECGNPGRLRLAFEEARKWASFTVPVPLATTAEEATHQLCTRLEQTHGQLLVAHVLGYIVSSRHGLSEAELKDVLSLDDEVLQDVYRDWTPPSKELLRFPPLLWVRLRRDLGYYLARRPVDGFTLLAIAHRQLVEVVRERYLSGSERAKRHGVLADFFSGTWSQGTKKLITLPLVGKPLNLDRKVAPQPLWFSHTVANLRKLKELPYHLLHSGRLEELKQEVLGSMSWISCRGISGGIEDLLDDFDLCAPHLDSPEVGLVREALQLCRPAVELRGMERSLLYTELLARLHFFATSHPALVGQLCQQAQSWFQLCAHPVLVPLGGFLQPPGGPLRATLSGCHKGITAMAWGVEEKLLVIGTQDGIMAVWDMEEQHVIHMLTGHTGEVRCVKIFAKGTLANSASKDYTLHLWNLLSGQEKFTIWDGGSKNPAEPQIWNLHVDEAHKVVYSASGSKINAWNLETAEPVFHILGDASDPWMCMAVLASQATLLTVSRDGVVSLWSSATGKLQGKQHMSSIKEETPTCAVSVQKQGKLVTGFSNGSISLVSSKGDRLLEKLPDAVRFLVVSEDESLLAAGFGRSVRIFLADSRGFRRFMAMDLEHEDMVETAVFGTENNLIITGSLDALIQVWSLSEQGTLLDILEGVGAPVSLLARGGALVASASPQSSSFKVWDLSDAHRSRVPAPFLDRTGLTAVSHNGSYVYFPKIGDKNKVTIWDLAEGEEQDSLDTSSEIRCLEVAEQRKLLFTGLVSGVVLVFPLNSRQDVICIPPPEARKAINCMSLSKCEDRLAIAYDNIVLVLDITSGDPCPVIDGPRYTFYTQLPETLSSVAILTDYRVVYSMTNGDLFLYECATSKAFPLETHRSRVACVEVSHKEQLVVSGSEDALLCLWDLQARKWKFEMSYTSSYCRGVQCACFSKDDKYVYVGLKDRSILVWSVLDGTLLTVQFVHAVVNRIIPTTSGFIAPTRHGYLIRENFQCLSAKASPQDPLKNFKKAMWMVKSRQREELVAAAGAPQDLESESAQGNETKSNKCSQVCLIV

SEQ ID NO: 109324 - protein, 1358 aa, Artificial Sequence
  derived and/or modified sequence
MVDRLADGCLDADAQNLLSSLKSHITDMHPGVLKTHRLPWSRDLVNPKNKTHACYLKELGEQFVVRANHQVLTRLRELDTAGQELAWLYQEIRHHLWQSSEVIQTFCGRQELLARLGQQLRHDDSKQHTPLVLFGPPGIGKTALMCKLAEQMPRLLGHKTVTVLRLLGTSQMSSDARGLLKSICFQVCLAYGLPLPPAQVLDAHTRVVQFFHTLLHTVSCRNFESLVLLLDAMDDLDSVRHARRVPWLPLNCPPRVHLILSACSGALGVLDTLQRVLLDPEAYWEVKPLSGNQGQQMIQLLLAAARRTLSPVHTDLLWASLPECGNPGRLRLAFEEARKWASFTVPVPLATTAEEATHQLCTRLEQTHGQLLVAHVLGYIVSSRHGLSEAELKDVLSLDDEVLQDVYRDWTPPSKELLRFPPLLWVRLRRDLGYYLARRPVDGFTLLAIAHRQLVEVVRERYLSGSERAKRHGVLADFFSGTWSQGTKKLITLPLVGKPLNLDRKVAPQPLWFSHTVANLRKLKELPYHLLHSGRLEELKQEVLGSMSWISCRGISGGIEDLLDDFDLCAPHLDSPEVGLVREALQLCRPAVELRGMERSLLYTELLARLHFFATSHPALVGQLCQQAQSWFQLCAHPVLVPLGGFLQPPGGPLRATLSGCHKGITAMAWGVEEKLLVIGTQDGIMAVWDMEEQHVIHMLTGHTGEVRCVKIFAKGTLANSASKDYTLHLWNLLSGQEKFTIWDGGSKNPAEPQIWNLHVDEAHKVVYSASGSKINAWNLETAEPVFHILGDASDPWMCMAVLASQATLLTVSRDGVVSLWSSATGKLQGKQHMSSIKEETPTCAVSVQKQGKLVTGFSNGSISLVSSKGDRLLEKLPDAVRFLVVSEDESLLAAGFGRSVRIFLADSRGFRRFMAMDLEHEDMVETAVFGTENNLIITGSLDALIQVWSLSEQGTLLDILEGVGAPVSLLARGGALVASASPQSSSFKVWDLSDAHRSRVPAPFLDRTGLTAVSHNGSYVYFPKIGDKNKVTIWDLAEGEEQDSLDTSSEIRCLEVAEQRKLLFTGLVSGVVLVFPLNSRQDVICIPPPEARKAINCMSLSKCEDRLAIAYDNIVLVLDITSGDPCPVIDGPRYTFYTQLPETLSSVAILTDYRVVYSMTNGDLFLYECATSKAFPLETHRSRVACVEVSHKEQLVVSGSEDALLCLWDLQARKWKFEMSYTSSYCRGVQCACFSKDDKYVYVGLKDRSILVWSVLDGTLLTVQFVHAVVNRIIPTTSGFIAPTRHGYLIRENFQCLSAKASPQDPLKNFKKAMWMVKSRQREELVAAAGAPQDLESESAQGNETKSNKCSQVCLIV

SEQ ID NO: 109325 - DNA, 4290 bp, Artificial Sequence
  derived and/or modified sequence
atggacagccagttccacatggccggcgaggccagccagagctggctgaaggccaaggagaagcagagaggcaccagctacatggtggccgtgatcgagtgggagatcgagagaagcctgctgagcagcgaggacagagagcagggcgccaccgtgttcctgagagagatccaggacctgcacaagcacatcctggaggactgcgccctgagaatggtggacagactggccgacggctgcctggacgccgacgcccagaacctgctgagcagcctgaagagccacatcaccgacatgcaccccggcgtgctgaagacccacagactgccctggagcagagacctggtgaaccccaagaacaagacccacgcctgctacctgaaggagctgggcgagcagttcgtggtgagagccaaccaccaggtgctgaccagactgagagagctggacaccgccggccaggagctggcctggctgtaccaggagatcagacaccacctgtggcagagcagcgaggtgatccagaccttctgcggcagacaggagctgctggccagactgggccagcagctgagacacgacgacagcaagcagcacacccccctggtgctgttcggcccccccggcatcggcaagaccgccctgatgtgcaagctggccgagcagatgcccagactgctgggccacaagaccgtgaccgtgctgagactgctgggcaccagccagatgagcagcgacgccagaggcctgctgaagagcatctgcttccaggtgtgcctggcctacggcctgcccctgccccccgcccaggtgctggacgcccacaccagagtggtgcagttcttccacaccctgctgcacaccgtgagctgcagaaacttcgagagcctggtgctgctgctggacgccatggacgacctggacagcgtgagacacgccagaagagtgccctggctgcccctgaactgcccccccagagtgcacctgatcctgagcgcctgcagcggcgccctgggcgtgctggacaccctgcagagagtgctgctggaccccgaggcctactgggaggtgaagcccctgagcggcaaccagggccagcagatgatccagctgctgctggccgccgccagaagaaccctgagccccgtgcacaccgacctgctgtgggccagcctgcccgagtgcggcaaccccggcagactgagactggccttcgaggaggccagaaagtgggccagcttcaccgtgcccgtgcccctggccaccaccgccgaggaggccacccaccagctgtgcaccagactggagcagacccacggccagctgctggtggcccacgtgctgggctacatcgtgagcagcagacacggcctgagcgaggccgagctgaaggacgtgctgagcctggacgacgaggtgctgcaggacgtgtacagagactggaccccccccagcaaggagctgctgagattcccccccctgctgtgggtgagactgagaagagacctgggctactacctggccagaagacccgtggacggcttcaccctgctggccatcgcccacagacagctggtggaggtggtgagagagagatacctgagcggcagcgagagagccaagagacacggcgtgctggccgacttcttcagcggcacctggagccagggcaccaagaagctgatcaccctgcccctggtgggcaagcccctgaacctggacagaaaggtggccccccagcccctgtggttcagccacaccgtggccaacctgagaaagctgaaggagctgccctaccacctgctgcacagcggcagactggaggagctgaagcaggaggtgctgggcagcatgagctggatcagctgcagaggcatcagcggcggcatcgaggacctgctggacgacttcgacctgtgcgccccccacctggacagccccgaggtgggcctggtgagagaggccctgcagctgtgcagacccgccgtggagctgagaggcatggagagaagcctgctgtacaccgagctgctggccagactgcacttcttcgccaccagccaccccgccctggtgggccagctgtgccagcaggcccagagctggttccagctgtgcgcccaccccgtgctggtgcccctgggcggcttcctgcagccccccggcggccccctgagagccaccctgagcggctgccacaagggcatcaccgccatggcctggggcgtggaggagaagctgctggtgatcggcacccaggacggcatcatggccgtgtgggacatggaggagcagcacgtgatccacatgctgaccggccacaccggcgaggtgagatgcgtgaagatcttcgccaagggcaccctggccaacagcgccagcaaggactacaccctgcacctgtggaacctgctgagcggccaggagaagttcaccatctgggacggcggcagcaagaaccccgccgagccccagatctggaacctgcacgtggacgaggcccacaaggtggtgtacagcgccagcggcagcaagatcaacgcctggaacctggagaccgccgagcccgtgttccacatcctgggcgacgccagcgacccctggatgtgcatggccgtgctggccagccaggccaccctgctgaccgtgagcagagacggcgtggtgagcctgtggagcagcgccaccggcaagctgcagggcaagcagcacatgagcagcatcaaggaggagacccccacctgcgccgtgagcgtgcagaagcagggcaagctggtgaccggcttcagcaacggcagcatcagcctggtgagcagcaagggcgacagactgctggagaagctgcccgacgccgtgagattcctggtggtgagcgaggacgagagcctgctggccgccggcttcggcagaagcgtgagaatcttcctggccgacagcagaggcttcagaagattcatggccatggacctggagcacgaggacatggtggagaccgccgtgttcggcaccgagaacaacctgatcatcaccggcagcctggacgccctgatccaggtgtggagcctgagcgagcagggcaccctgctggacatcctggagggcgtgggcgcccccgtgagcctgctggccagaggcggcgccctggtggccagcgccagcccccagagcagcagcttcaaggtgtgggacctgagcgacgcccacagaagcagagtgcccgcccccttcctggacagaaccggcctgaccgccgtgagccacaacggcagctacgtgtacttccccaagatcggcgacaagaacaaggtgaccatctgggacctggccgagggcgaggagcaggacagcctggacaccagcagcgagatcagatgcctggaggtggccgagcagagaaagctgctgttcaccggcctggtgagcggcgtggtgctggtgttccccctgaacagcagacaggacgtgatctgcatccccccccccgaggccagaaaggccatcaactgcatgagcctgagcaagtgcgaggacagactggccatcgcctacgacaacatcgtgctggtgctggacatcaccagcggcgacccctgccccgtgatcgacggccccagatacaccttctacacccagctgcccgagaccctgagcagcgtggccatcctgaccgactacagagtggtgtacagcatgaccaacggcgacctgttcctgtacgagtgcgccaccagcaaggccttccccctggagacccacagaagcagagtggcctgcgtggaggtgagccacaaggagcagctggtggtgagcggcagcgaggacgccctgctgtgcctgtgggacctgcaggccagaaagtggaagttcgagatgagctacaccagcagctactgcagaggcgtgcagtgcgcctgcttcagcaaggacgacaagtacgtgtacgtgggcctgaaggacagaagcatcctggtgtggagcgtgctggacggcaccctgctgaccgtgcagttcgtgcacgccgtggtgaacagaatcatccccaccaccagcggcttcatcgcccccaccagacacggctacctgatcagagagaacttccagtgcctgagcgccaaggccagcccccaggaccccctgaagaacttcaagaaggccatgtggatggtgaagagcagacagagagaggagctggtggccgccgccggcgccccccaggacctggagagcgagagcgcccagggcaacgagaccaagagcaacaagtgcagccaggtgtgcctgatcgtgtag

SEQ ID NO: 109326 - DNA, 4077 bp, Artificial Sequence
  derived and/or modified sequence
atggtggacagactggccgacggctgcctggacgccgacgcccagaacctgctgagcagcctgaagagccacatcaccgacatgcaccccggcgtgctgaagacccacagactgccctggagcagagacctggtgaaccccaagaacaagacccacgcctgctacctgaaggagctgggcgagcagttcgtggtgagagccaaccaccaggtgctgaccagactgagagagctggacaccgccggccaggagctggcctggctgtaccaggagatcagacaccacctgtggcagagcagcgaggtgatccagaccttctgcggcagacaggagctgctggccagactgggccagcagctgagacacgacgacagcaagcagcacacccccctggtgctgttcggcccccccggcatcggcaagaccgccctgatgtgcaagctggccgagcagatgcccagactgctgggccacaagaccgtgaccgtgctgagactgctgggcaccagccagatgagcagcgacgccagaggcctgctgaagagcatctgcttccaggtgtgcctggcctacggcctgcccctgccccccgcccaggtgctggacgcccacaccagagtggtgcagttcttccacaccctgctgcacaccgtgagctgcagaaacttcgagagcctggtgctgctgctggacgccatggacgacctggacagcgtgagacacgccagaagagtgccctggctgcccctgaactgcccccccagagtgcacctgatcctgagcgcctgcagcggcgccctgggcgtgctggacaccctgcagagagtgctgctggaccccgaggcctactgggaggtgaagcccctgagcggcaaccagggccagcagatgatccagctgctgctggccgccgccagaagaaccctgagccccgtgcacaccgacctgctgtgggccagcctgcccgagtgcggcaaccccggcagactgagactggccttcgaggaggccagaaagtgggccagcttcaccgtgcccgtgcccctggccaccaccgccgaggaggccacccaccagctgtgcaccagactggagcagacccacggccagctgctggtggcccacgtgctgggctacatcgtgagcagcagacacggcctgagcgaggccgagctgaaggacgtgctgagcctggacgacgaggtgctgcaggacgtgtacagagactggaccccccccagcaaggagctgctgagattcccccccctgctgtgggtgagactgagaagagacctgggctactacctggccagaagacccgtggacggcttcaccctgctggccatcgcccacagacagctggtggaggtggtgagagagagatacctgagcggcagcgagagagccaagagacacggcgtgctggccgacttcttcagcggcacctggagccagggcaccaagaagctgatcaccctgcccctggtgggcaagcccctgaacctggacagaaaggtggccccccagcccctgtggttcagccacaccgtggccaacctgagaaagctgaaggagctgccctaccacctgctgcacagcggcagactggaggagctgaagcaggaggtgctgggcagcatgagctggatcagctgcagaggcatcagcggcggcatcgaggacctgctggacgacttcgacctgtgcgccccccacctggacagccccgaggtgggcctggtgagagaggccctgcagctgtgcagacccgccgtggagctgagaggcatggagagaagcctgctgtacaccgagctgctggccagactgcacttcttcgccaccagccaccccgccctggtgggccagctgtgccagcaggcccagagctggttccagctgtgcgcccaccccgtgctggtgcccctgggcggcttcctgcagccccccggcggccccctgagagccaccctgagcggctgccacaagggcatcaccgccatggcctggggcgtggaggagaagctgctggtgatcggcacccaggacggcatcatggccgtgtgggacatggaggagcagcacgtgatccacatgctgaccggccacaccggcgaggtgagatgcgtgaagatcttcgccaagggcaccctggccaacagcgccagcaaggactacaccctgcacctgtggaacctgctgagcggccaggagaagttcaccatctgggacggcggcagcaagaaccccgccgagccccagatctggaacctgcacgtggacgaggcccacaaggtggtgtacagcgccagcggcagcaagatcaacgcctggaacctggagaccgccgagcccgtgttccacatcctgggcgacgccagcgacccctggatgtgcatggccgtgctggccagccaggccaccctgctgaccgtgagcagagacggcgtggtgagcctgtggagcagcgccaccggcaagctgcagggcaagcagcacatgagcagcatcaaggaggagacccccacctgcgccgtgagcgtgcagaagcagggcaagctggtgaccggcttcagcaacggcagcatcagcctggtgagcagcaagggcgacagactgctggagaagctgcccgacgccgtgagattcctggtggtgagcgaggacgagagcctgctggccgccggcttcggcagaagcgtgagaatcttcctggccgacagcagaggcttcagaagattcatggccatggacctggagcacgaggacatggtggagaccgccgtgttcggcaccgagaacaacctgatcatcaccggcagcctggacgccctgatccaggtgtggagcctgagcgagcagggcaccctgctggacatcctggagggcgtgggcgcccccgtgagcctgctggccagaggcggcgccctggtggccagcgccagcccccagagcagcagcttcaaggtgtgggacctgagcgacgcccacagaagcagagtgcccgcccccttcctggacagaaccggcctgaccgccgtgagccacaacggcagctacgtgtacttccccaagatcggcgacaagaacaaggtgaccatctgggacctggccgagggcgaggagcaggacagcctggacaccagcagcgagatcagatgcctggaggtggccgagcagagaaagctgctgttcaccggcctggtgagcggcgtggtgctggtgttccccctgaacagcagacaggacgtgatctgcatccccccccccgaggccagaaaggccatcaactgcatgagcctgagcaagtgcgaggacagactggccatcgcctacgacaacatcgtgctggtgctggacatcaccagcggcgacccctgccccgtgatcgacggccccagatacaccttctacacccagctgcccgagaccctgagcagcgtggccatcctgaccgactacagagtggtgtacagcatgaccaacggcgacctgttcctgtacgagtgcgccaccagcaaggccttccccctggagacccacagaagcagagtggcctgcgtggaggtgagccacaaggagcagctggtggtgagcggcagcgaggacgccctgctgtgcctgtgggacctgcaggccagaaagtggaagttcgagatgagctacaccagcagctactgcagaggcgtgcagtgcgcctgcttcagcaaggacgacaagtacgtgtacgtgggcctgaaggacagaagcatcctggtgtggagcgtgctggacggcaccctgctgaccgtgcagttcgtgcacgccgtggtgaacagaatcatccccaccaccagcggcttcatcgcccccaccagacacggctacctgatcagagagaacttccagtgcctgagcgccaaggccagcccccaggaccccctgaagaacttcaagaaggccatgtggatggtgaagagcagacagagagaggagctggtggccgccgccggcgccccccaggacctggagagcgagagcgcccagggcaacgagaccaagagcaacaagtgcagccaggtgtgcctgatcgtgtag

SEQ ID NO: 109327 - DNA, 4290 bp, Artificial Sequence
  derived and/or modified sequence
atggactcacagttccatatggcaggagaagcctcacagtcctggctaaaggcaaaggagaaacaacggggcacatcctacatggtggcagttatcgaatgggagatcgaacgctccctgttgtcaagcgaagatagagagcagggagccaccgtatttttgcgggagatccaagatctgcacaaacatatccttgaggattgtgccctgcgtatggttgatcgtctggctgacggttgtttagacgccgacgcacaaaacctgctctccagcctgaaatcgcatataacagacatgcaccctggcgtgctcaagacccacaggctgccctggagcagggaccttgtgaacccgaagaacaaaacacatgcctgttacctcaaggagctgggagaacagttcgttgttcgcgccaaccatcaggtgttgactagactcagagaactggatactgcgggacaagagcttgcatggctctaccaggaaatcaggcaccatttgtggcaaagctcagaggtcatccagaccttttgtggcagacaggaattgctggcgcgcctgggacagcagcttcgccatgacgattcaaaacaacataccccactcgtcctgtttggccccccaggcattgggaaaacagctctgatgtgtaaactggctgagcagatgccacgactgctaggccataagactgtcactgtactccggctattgggaacgtcacagatgtctagcgatgcccggggtttgctgaagtccatctgttttcaggtgtgcctggcgtatggtttgcctctcccaccagctcaagtgctggacgcccatactcgagtggtccagtttttccatacgcttctacataccgtgtcatgccgtaactttgaatctctcgtgctcctcctggatgctatggacgacttagactctgtccggcatgcaaggcgagtcccttggctgcccctcaattgtccccccagggtccacctcatcctcagtgcatgttcaggcgcactgggcgtgctggataccctccagcgggttctgttagatccggaggcctactgggaggtaaaacccctgtcggggaaccagggacaacaaatgatccagctcctgctagccgcagcacgacgcacactgtcccctgtgcataccgacctgttgtgggcaagtctccctgagtgtggcaacccaggtcgattgaggctagcattcgaagaagctcgtaaatgggcttcctttactgtcccagtgcctttggcaacaacagccgaggaggccacgcaccaattatgtacaagactcgagcagacacacggccaactgcttgtggctcatgtgttgggctacatcgtatcttcacggcacggcttaagtgaagcggagcttaaggacgtgttaagtctcgatgatgaggttcttcaagatgtgtatcgcgattggacccccccctcaaaggagcttctccgattcccgcctttgctgtgggtgcggttaagacgcgacctcggctactacctggcccgccggcccgtggacggattcacccttttagccattgcccatcgccagctggtggaagtagtgagggaacgctacctgtctggcagtgagcgcgcaaaacgacatggagtattggctgacttctttagtggcacatggtcccaaggtaccaagaaattaatcactctgcctttggtgggaaaacctctgaaccttgaccgtaaggtggccccacagccactttggttcagccataccgttgccaacctaaggaagcttaaagagctcccgtaccacctgctgcacagtggaaggctggaggaactaaaacaggaagtgttgggctcaatgtcttggatcagttgtcgcggtattagtggtggcatcgaagacctcctcgatgacttcgacctctgtgccccgcatctggattcacccgaggtgggccttgtcagagaggcgttgcagctctgccgcccggccgtcgagctgcgaggaatggagaggtccctcctgtatactgagctgctggccagactgcatttcttcgccacttcccatcccgcactcgtgggccagttgtgtcagcaggcccagtcttggttccagctgtgcgcgcatccagtcctggtccccctcggagggttcctccagcccccagggggaccactgagagcaaccttgtcgggttgccataagggaattacggccatggcttggggggttgaagaaaaactgctcgtcattggcacccaggacgggataatggccgtgtgggacatggaagagcaacatgtgatccatatgttaacaggtcataccggggaagtgaggtgcgtgaagatatttgctaaggggaccctggcaaactccgcctccaaggattacacactgcacctttggaatcttctgtccggccaagaaaagtttacgatctgggatgggggttcgaaaaatcccgccgagccacagatttggaaccttcacgtcgacgaggcacacaaggtggtgtatagcgccagcggcagcaagattaacgcctggaatttggagaccgccgaacccgtctttcacatactaggcgacgccagtgacccctggatgtgtatggccgttctagccagccaggcaacattattgaccgtctcaagagacggagtcgtgagcttatggtcatcggccacaggcaagcttcagggaaaacagcacatgtcaagtataaaagaagagacgccaacgtgtgctgtgtctgttcagaaacagggaaagctcgtcacaggcttcagcaacggtagcatttccttggtctctagcaagggggacagactcctggaaaaactgccggatgctgtgcggttcctggttgtgtccgaggatgagagcctgctagctgctggattcggaagaagtgttagaatcttcctggccgatagtagggggttccgccggttcatggcaatggacctggagcacgaggatatggtggagacggccgtgttcggtacagagaacaatctcatcataacaggctccttggatgccttgatccaggtttggagcctgtccgagcagggaactctgctcgacattctggaaggtgttggtgcccccgtttcactcttggccagaggtggcgccctcgtggccagtgcttccccccagagttcatcgttcaaggtgtgggatctttcagatgcccataggagccgcgttcccgcgccctttctcgaccggacaggtcttaccgctgtcagccataatgggtcctatgtctacttccccaagatcggggacaaaaataaagtgaccatatgggatctggcagaaggggaggaacaggactccctggatacgtccagtgaaattcggtgccttgaagtcgccgagcagcgtaaacttttgttcactggactggttagtggtgtggtactggtgtttccactcaactctcgacaggacgtaatttgcattcctcctcccgaagcacggaaagccattaactgtatgagtctgtctaagtgcgaggacaggctggcaatcgcctatgacaacatcgttctcgttttagacatcaccagtggcgacccctgtcctgtaatcgacgggccacggtacaccttttatacccaactccctgagacactgagctctgttgccattctgaccgattacagggtggtatattcaatgacaaatggtgatctgtttttatatgagtgtgcaacatcgaaggcgtttcctctagagacacaccgcagtagagtagcgtgtgtggaagtgagccacaaggagcaattggtagtcagcgggtcagaggatgccctgctgtgcctatgggatctacaggcaagaaagtggaaattcgagatgtcatacactagttcatattgcagaggggtgcagtgtgcgtgctttagcaaagatgacaaatacgtatatgttggactgaaggaccggtccattcttgtgtggagcgtgctagacggcacactgctgacggttcagttcgttcatgccgtcgttaaccggattatccctaccacctccggttttattgcgcccacgcgccacggatacctgatcagagaaaatttccaatgtctgagcgccaaagcctcaccgcaggatcccctgaagaattttaaaaaagctatgtggatggtgaagtcacggcagagagaggagctggtcgccgctgctggcgcgccgcaggacctcgaaagtgagtctgcgcaggggaacgagaccaaatccaataagtgtagccaggtttgtctcattgtgtag

SEQ ID NO: 109328 - DNA, 4290 bp, Artificial Sequence
  derived and/or modified sequence
atggattcacagttccacatggcaggagaggcatcacagagctggttgaaagctaaggagaagcagcgggggacatcttatatggtggcagttatcgaatgggaaattgaaagatctctgctcagcagtgaggatcgtgagcagggggctactgtcttcttgagagaaatccaggatctgcacaaacatatcctcgaggattgtgcactgaggatggttgacagactcgcggacgggtgccttgacgcagacgcccagaacctgctgtcttccctaaaatctcacattacggatatgcatccgggggtgctcaagacacacaggctaccttggagtagagatcttgtcaatcctaagaataagacccacgcatgctatctgaaggaactgggggagcagtttgtggtgagagctaaccaccaagtcttaacaaggcttcgggagctggacacagccgggcaggaattggcctggctgtaccaggagattagacaccacctgtggcagtcttccgaggtcattcaaaccttttgtggcagacaagagctgcttgctcgcctcggacagcagctacggcacgacgatagtaagcagcacacccccctggtcctctttggccctcctgggattggaaagaccgcgctgatgtgtaaattagcagagcagatgcccagactgctgggccataagacagtgaccgtcctgcggcttttggggacctctcaaatgtcctccgatgcccgtggcctcttaaagtccatttgctttcaggtatgtctggcctacggacttcccttgcccccagcacaagtgcttgacgcccatactcgagttgtccagttctttcacacgctgctccatactgtatcctgtcggaactttgagagtctcgtgttgctgctggatgcaatggacgacctggatagcgtcaggcacgctagacgtgttccatggctccccctgaactgtcctcctagagtgcatttgattttatctgcttgttctggggcacttggggtcctggacactctgcagcgagtcttgctcgacccggaagcatactgggaggttaagccattatccgggaaccaaggtcagcagatgattcagctgcttcttgccgcggctcggcgaactttgtccccagtgcacactgatttgctgtgggcttccctgcctgaatgcgggaatcctggccggctgaggctggcgtttgaggaggcccgaaaatgggcaagctttactgtgcctgtcccactggccaccaccgccgaggaagcgacacaccagttgtgcaccagactcgagcaaacccacgggcagcttctggtggcacatgttttgggttacatagtctctagccgccacggattatcagaagccgaactgaaagacgtgctgtccttggatgacgaggtcttgcaagacgtgtacagggattggactccaccctccaaggagctcctcaggttcccgccactcttgtgggtgcgactaaggagagacctcggctactacctggcgagaaggcctgtcgacgggttcacactgctggctatcgcccaccgacagctcgttgaagttgtgcgcgagagatacctgtcagggtcagagcgcgcaaaaagacacggcgtgctcgccgactttttttccgggacatggagtcagggaaccaagaagttaatcacgctcccactcgtgggaaagcctctcaaccttgataggaaagtggcacctcagcctttgtggttctcccacaccgtggccaatttacggaaattaaaggagctgccttaccaccttctccattctggacgccttgaagagcttaagcaggaggtgctgggtagcatgagttggattagctgtcggggaatctccggaggaattgaggacctgctcgatgatttcgatctgtgtgcacctcaccttgatagtccggaagtcgggctagtaagagaggcactgcagctttgccgccctgccgtggagctgcgtggaatggaacgcagcttattgtataccgagttacttgcaaggcttcacttcttcgctaccagccacccagcactggttggacagctgtgtcaacaggcacagtcctggttccagctctgcgctcatcccgtgctcgtgcctcttggaggctttctgcagcctcccgggggacccctgcgcgctactttgagcggttgtcacaaagggattaccgcaatggcctggggcgtggaagaaaaacttcttgtaataggcacccaggacggtattatggcagtatgggacatggaagaacagcatgtgatccacatgctgactgggcacactggtgaagtgagatgcgtgaaaatcttcgccaagggcaccctggccaactctgcatctaaggactacacattacatctgtggaatttactgtctggccaagaaaaattcacaatctgggacggtggctcaaaaaacccagctgagccccagatctggaatctgcatgtagacgaggctcataaagtggtctactctgcgagtggatcaaagattaatgcctggaacttagagactgctgagcccgttttccatatcttaggagatgccagcgacccttggatgtgtatggctgtcctcgcttctcaggccactctactcactgtgagccgcgatggagtggtctctctgtggagctctgccactggcaaacttcaaggtaaacaacatatgtcatcaatcaaagaggagacccccacttgtgcagtgtccgtgcagaagcaaggcaagctggtgacagggttctccaatggaagcatttctttggtgtcatcaaagggagatcgcttgctggagaagctcccagacgccgtgcgttttctggtagtctccgaggacgaatctctcttggcagcggggttcggtcgctcggtaaggatcttcctggccgacagtcggggatttcggcgcttcatggccatggatctcgagcacgaagacatggttgagactgcagtattcggtaccgaaaacaacttaatcatcaccgggtctctggatgcgcttatccaagtctggtccctctctgaacagggcaccctgttggatattctcgagggcgtgggggcaccggtgtccctgctcgccagaggaggagctttggtagccagcgctagcccgcagagtagcagcttcaaagtctgggacctgtctgatgctcaccgttcccgggtgcctgcccctttccttgaccggaccggtctgactgccgtgtcccacaatggctcgtatgtgtatttccccaaaattggagataagaataaggtaaccatctgggatctggccgagggcgaggagcaagacagcctggacacttctagcgagatcaggtgtttagaagtggccgaacagcgaaagttgttgttcacgggactggtttccggcgtcgtgctcgtgttccccctcaatagtaggcaggacgtgatctgtattcctccccccgaggcacgaaaggcaatcaactgtatgtcgctgagcaaatgcgaggaccggctcgcgatagcctatgacaatatcgttctggttttagatattacatcaggagatccctgtcccgtgattgacggtccgaggtacacattctacacacagttgcccgagacactaagcagcgtcgctatcctcaccgactacagagtggtgtattcaatgaccaatggcgacctctttctatatgagtgcgccactagcaaagccttccctctggagacgcaccgttcaagagtagcgtgcgtcgaggtttcacacaaggagcagctggttgtgagtgggtccgaggatgctctgctgtgtctgtgggacttgcaggcacgcaagtggaaattcgagatgtcctacacctcttcctattgtcggggcgtgcaatgcgcttgcttctccaaggacgacaagtacgtctacgtcggcttaaaggataggagtattctggtttggagtgtcctggacggtacccttctgaccgtacaattcgtgcatgccgtggtcaacaggataatcccaactacatccgggtttattgcccccaccaggcacgggtacttgatccgtgagaattttcagtgcctttctgcaaaggccagcccccaggacccgttaaagaattttaagaaggccatgtggatggttaagagtcggcagagggaggaactggtggctgccgctggagccccacaagatctggaatctgagagcgcacaaggtaacgaaactaagtccaacaaatgcagccaggtgtgccttattgtatag

SEQ ID NO: 109329 - DNA, 4077 bp, Artificial Sequence
  derived and/or modified sequence
atggttgatcggctcgctgatggctgcctagatgcagatgcccagaacctcctaagctccctgaagtcccatattacggacatgcatcctggggtattgaagacccaccggcttccctggagcagagacttagtcaacccaaaaaacaagacccacgcctgctacctgaaggagctgggcgagcaattcgtggtccgggctaaccaccaagtattaacaaggctgcgggagcttgatactgctggtcaggagctggcatggctttaccaggagatccgccatcatctgtggcaatcaagtgaggttatacaaactttctgtgggcgccaggagcttcttgcccggttaggtcagcagttgcgccatgacgacagtaaacaacacacccctctggtgctgttcgggccacctggcattggcaaaaccgctctgatgtgcaaattggcagaacagatgcctaggctcctcggccacaagactgtcaccgtgctacggctgcttggcacctcgcagatgagcagcgacgcccgcggacttcttaagtctatctgctttcaagtgtgtctggcttatggactgcccctgccgcccgctcaggtactcgacgcccacaccagggtggtgcagtttttccatacactgctgcacactgtgtcctgtcgcaacttcgagagcctggtgttactgttggacgcaatggatgatctcgatagcgtacgacatgcaaggcgagtcccttggctgcccctgaactgcccacctcgggttcacctgattctctcagcatgctctggcgctctcggcgtgttagataccctgcaaagggtgctactggatccggaggcgtattgggaggtaaagcccctgagtggcaaccaaggtcaacagatgatccagctcctcctggccgcagcgaggcgcaccctgtctcccgtccacactgatttgctttgggcctcactgccggagtgtggtaaccctgggaggctccggttggcttttgaagaggcgcgtaaatgggccagcttcactgtgcctgtgcccttggctacaacagctgaagaagcaacgcatcagttatgcaccagattagagcagacccatggtcagctgctggtggcgcacgtgctcgggtatatagtgtcttccaggcatgggttatccgaggccgaattgaaagacgtactatcactggatgatgaagtgcttcaagatgtgtaccgagactggaccccacctagtaaggagctgctccgtttcccccctttgctgtgggttcgcttacgtagagatttaggatactatctcgctcggcggcctgttgatggatttacgctgctggctattgcacatcggcagctggttgaggtggtgcgggaaagatacctaagcggaagcgaacgggctaaaaggcatggtgtgcttgccgactttttttctggcacatggtcccaggggaccaaaaagctcatcacattgcctctggtgggaaagccgcttaacttagatcggaaagtggcaccccagccactttggttttctcacacagtggccaatctcaggaagctcaaagaattgccttaccacctgctccattctgggagattggaagagcttaaacaagaggtgcttgggtcaatgagttggatctcgtgccgcgggatatccgggggaattgaggacctccttgatgatttcgatttgtgtgccccacatctggactcgcctgaagtgggtttggtgcgcgaagcgttacaattatgccgacctgccgtggagctgcgcggcatggagcggtctctgctgtacaccgaattgttggcacggctgcacttcttcgcgacctcacaccctgcccttgtggggcagctgtgtcaacaagcccagagttggttccagctgtgtgctcatcccgtgctggtcccattaggcggattcctgcagcctcccgggggccctctgcgcgcaaccctctcagggtgccacaagggaatcacggccatggcctggggcgttgaggagaagttgcttgtgatcggcacccaggatggtatcatggccgtgtgggatatggaggagcagcatgtcatccatatgcttacaggccatacgggggaggtgaggtgtgttaagatctttgcaaaagggacactggctaacagtgcaagcaaggactacacactgcatttgtggaacctactgtctggccaggaaaagtttacaatttgggacggcgggtctaaaaatcccgccgaacctcaaatttggaatttgcacgtggatgaggctcacaaggtggtctactccgctagcggctctaaaatcaacgcctggaatctagaaacagcagaacctgtctttcatatccttggagacgcctctgacccttggatgtgtatggccgtgctggccagtcaggctactctgctaacagtgagccgcgatggagtggtgagtctctggtccagtgcgactggcaagctgcagggaaaacaacacatgtcttctatcaaagaggagactccaacttgcgcggtgtcagtacagaaacaggggaaacttgtaacgggatttagcaacggatctatctcattggtgtcatcgaaaggagaccgactcctagaaaagctgccggatgccgttaggtttctagttgtgagcgaggacgaaagccttctggccgccggtttcggcagaagtgtgcgcattttcctggccgactctcggggttttcgacgatttatggccatggatctcgagcacgaggatatggtggagaccgcggtcttcggtaccgagaataatctgataatcacggggtcgctggatgccttgattcaggtttggtctctctccgagcaagggacattgcttgacatactcgaaggagtcggtgcaccagtgtctttgttagctcggggaggggctctcgtggctagcgctagtcctcagtcttcttccttcaaagtatgggacctgtcagacgcacacaggtctcgagtgcctgcaccctttctggacaggaccggtttgacagccgttagtcacaacgggtcgtacgtgtattttcctaagatcggcgacaagaacaaagtcaccatttgggaccttgcagaaggggaggagcaagattccttggacacgtctagtgaaatccgttgtctggaggttgccgaacagcgtaaactgttatttaccggtctggtatcaggagttgtcctggttttcccattgaacagtcgacaagatgtaatctgcatcccccctcccgaggctcggaaagctattaactgtatgagcttgagcaaatgcgaagatcgactggccatagcttatgataatatagtcctcgttctagacattacaagtggcgatccttgccctgttatcgacggtccccgctataccttttacacacagctgcctgagaccctttcgtctgtggccatactaacagattacagggtcgtttacagcatgacaaatggcgacctgtttctgtacgaatgcgctacctccaaagctttccctctggagacacaccgatcaagagtggcttgcgtcgaagtgagccacaaggaacagctggttgtgtccggttcagaggacgcactcctctgcctgtgggacctccaggctcgaaagtggaaattcgagatgtcctacaccagttcttactgccgcggcgtgcagtgtgcctgcttctcaaaggatgacaaatacgtgtacgtcggcctgaaggaccggtccatcttggtttggtcagttctggatggaacactcctgacagtgcaatttgtgcatgccgttgttaataggatcatccctactacgagtggctttatagctcccacacgccacggatatctgatcagagaaaattttcaatgtctgagcgctaaagcttcccctcaggatccactaaagaattttaagaaagcaatgtggatggttaagtctagacagagagaggagctcgtggccgccgccggagccccccaggatctcgaatcagagagcgcccaaggcaatgagacaaagtccaacaaatgtagtcaggtatgcttaatcgtctag

SEQ ID NO: 109330 - DNA, 4290 bp, Artificial Sequence
  derived and/or modified sequence
atggacagccagttccacatggccggggaggccagccagagctggctgaaggccaaggagaagcagaggggcaccagctacatggtggccgtcatcgagtgggagattgaaagaagcctgctgagcagcgaggaccgggagcagggcgccaccgtcttcctgcgggagatccaggacctgcacaagcacatcctggaggactgtgccctgaggatggtggaccggctggctgatggctgcctggatgctgatgcccagaacctgctgagcagcctgaagagccacatcacagacatgcaccctggggtgctgaagacccaccggctgccctggagccgggacctggtgaaccccaagaacaagacccacgcctgctacctgaaggagctgggggagcagtttgtggtgcgggccaaccaccaggtgctgacccggctgcgggagctggacacagctggccaggagctggcctggctgtaccaggagatccgccaccacctgtggcagagcagcgaggtgatccagaccttctgtggccggcaggagctgctggcccggctgggccagcagctgcggcatgatgacagcaagcagcacacccccctggtgctgtttggacctcctggcatcggcaagacagccctgatgtgcaagctggccgagcagatgccccggctgctgggccacaagacagtgacagtgctgcggctgctgggcaccagccagatgagcagtgatgcccggggcctgctgaagagcatctgcttccaggtgtgcctggcctacggcctgcccctgcccccagcccaggtgctggatgcccacaccagggtggtgcagttcttccacaccctgctgcacacagtgtcctgcaggaactttgagagcctggtgctgctgctggatgccatggatgacctggacagcgtgagacatgcccggcgggtgccctggctgcccctgaactgccccccccgggtgcacctgatcctgagcgcctgcagcggggccctgggcgtgctggacaccctgcagagggtgctgctggaccctgaggcctactgggaggtgaagcccctgagcggcaaccagggccagcagatgatccagctgctgctggccgccgcccggaggaccctgagccctgtgcacacagacctgctgtgggccagcctgcctgaatgtggcaaccctggccgcctgcggctggcctttgaggaggccaggaagtgggccagcttcaccgtgcctgtgcccctggccaccacagctgaggaggccacccaccagctgtgcacccggctggagcagacccacggccagctgctggtggcccacgtgctgggctacatcgtgagcagccgccacggcctgtctgaggccgagctgaaggatgtgctgagcctggatgatgaggtgctgcaggatgtgtacagagactggaccccacccagcaaggagctgctgcgcttcccccccctgctgtgggtgcggctgcggcgggacctgggctactacctggcccggcggcctgtggatggcttcaccctgctggccatcgcccaccggcagctggtggaggtggtgcgggagcgctacctgagcggcagcgagcgggccaagagacatggagtgctggccgacttcttcagcggcacctggagccagggcaccaagaagctgatcaccctgcccctggtgggcaagcccctgaacctggacaggaaggtggccccccagcccctgtggttcagccacacagtggccaacctgaggaagctgaaggagctgccctaccacctgctgcacagcggccgcctggaggagctgaagcaggaggtgctgggctccatgtcctggatcagctgccggggcatcagcggcggcatcgaggacctgctggatgactttgacctgtgtgccccccacctggacagccctgaggtgggcctggtgcgggaggccctgcagctgtgcaggcctgctgtggagctgcggggcatggagaggagcctgctgtacacagagctgctggcccggctgcacttctttgccaccagccacccagccctggtgggccagctgtgccagcaggcccagagctggttccagctgtgtgcccaccctgtgctggtgcccctgggcggcttcctgcagcccccaggcggccccctgcgggccaccctgagcggctgccacaagggcatcacagccatggcctggggcgtggaggagaagctgctggtgattggcacccaggacggcatcatggctgtgtgggacatggaggagcagcacgtgatccacatgctgaccggccacactggagaggtgcgctgtgtgaagatctttgccaagggcaccctggccaacagcgccagcaaggactacaccctgcacctgtggaacctgctgagcggccaggagaagttcaccatctgggatggcggcagcaagaacccagctgagccccagatctggaacctgcacgtggatgaggcccacaaggtggtgtacagcgccagcggcagcaagatcaatgcctggaacctggagacagctgagcccgtcttccacatcctgggagatgccagtgacccctggatgtgcatggctgtgctggccagccaggccaccctgctgactgtgtccagagatggagtggtgtccctgtggagcagcgccaccgggaagctgcagggcaagcagcacatgagcagcatcaaggaggagacccccacctgtgctgtgtctgtgcagaagcagggcaagctggtgacaggcttcagcaatggcagcatcagcctggtgagcagcaagggggaccggctgctggagaagctgcctgatgctgtgcgcttcctggtggtgtctgaagatgagagcctgctggccgccggcttcggccgctctgtgcgcatcttcctggccgacagccggggcttccgccgcttcatggccatggacctggagcacgaggacatggtggagacagctgtgtttggaacagagaacaacctgatcatcaccggcagcctggatgccctgatccaggtgtggagcctgtctgagcagggcaccctgctggacatcctggagggcgtgggcgcccctgtgtccctgctggcccggggcggggccctggtggccagcgccagcccccagagcagcagcttcaaggtgtgggacctgagtgatgcccacaggagccgggtgcctgcccccttcctggacagaacaggcctgacagctgtgagccacaacggcagctatgtgtacttccccaagattggagacaagaacaaggtgaccatctgggacctggccgagggggaggagcaggacagcctggacaccagcagcgagatccgctgcctggaggtggccgagcagaggaagctgctcttcaccggcctggtgtctggagtggtgctggtgttccccctgaacagccggcaggacgtcatctgcatccccccacctgaggccaggaaggccatcaactgcatgagcctgagcaaatgtgaggaccggctggccatcgcctatgacaacatcgtgctggtgctggacatcaccagcggggacccctgccctgtgattgatggcccccgctacaccttctacacccagctgcctgagaccctgagctctgtggccatcctgacagactacagagtggtgtacagcatgaccaatggagacctcttcctgtatgaatgtgccaccagcaaggccttccccctggagacccacaggagccgggtggcctgtgtggaggtgagccacaaggagcagctggtggtgtctggctctgaagatgccctgctgtgcctgtgggacctgcaggccaggaagtggaagtttgagatgagctacaccagcagctactgccggggcgtgcagtgtgcctgcttcagcaaggatgacaagtatgtgtatgtgggcctgaaggacaggagcatcctggtgtggagcgtgctggatggcaccctgctgactgtgcagtttgtgcatgctgtggtgaaccgcatcatccccaccaccagcggcttcatcgcccccaccaggcatggctacctgatccgggagaacttccagtgcctgagcgccaaggccagcccccaggaccccctgaagaacttcaagaaggccatgtggatggtgaagagccggcagcgggaggagctggtggccgctgctggggccccccaggacctggagagcgagagcgcccagggcaatgagaccaagagcaacaagtgcagccaggtgtgcctgattgtgtag

SEQ ID NO: 109331 - DNA, 4077 bp, Artificial Sequence
  derived and/or modified sequence
atggtggaccggctggctgatggctgcctggatgctgatgcccagaacctgctgagcagcctgaagagccacatcacagacatgcaccctggggtgctgaagacccaccggctgccctggagccgggacctggtgaaccccaagaacaagacccacgcctgctacctgaaggagctgggggagcagtttgtggtgcgggccaaccaccaggtgctgacccggctgcgggagctggacacagctggccaggagctggcctggctgtaccaggagatccgccaccacctgtggcagagcagcgaggtgatccagaccttctgtggccggcaggagctgctggcccggctgggccagcagctgcggcatgatgacagcaagcagcacacccccctggtgctgtttggccccccaggcatcggcaagacagccctgatgtgcaagctggccgagcagatgccccggctgctgggccacaagacagtgacagtgctgcggctgctgggcaccagccagatgagcagtgatgcccggggcctgctgaagagcatctgcttccaggtgtgcctggcctacggcctgcccctgcccccagcccaggtgctggatgcccacaccagggtggtgcagttcttccacaccctgctgcacacagtgtcctgcaggaactttgagagcctggtgctgctgctggatgccatggatgacctggacagcgtgagacatgccaggagagtgccctggctgcccctgaactgccccccccgggtgcacctgatcctgagcgcctgcagcggggccctgggcgtgctggacaccctgcagagggtgctgctggaccctgaggcctactgggaggtgaagcccctgagcggcaaccagggccagcagatgatccagctgctgctggccgccgcccggaggaccctgagccctgtgcacacagacctgctgtgggccagcctgcctgaatgtggcaaccctggccgcctgcggctggcctttgaggaggccaggaagtgggccagcttcaccgtgcctgtgcccctggccaccacagctgaggaggccacccaccagctgtgcacccggctggagcagacccacggccagctgctggtggcccacgtgctgggctacatcgtgagcagcagacatggcctgtctgaggccgagctgaaggatgtgctgagcctggatgatgaggtgctgcaggatgtgtacagagactggaccccacccagcaaggagctgctgcgcttcccccccctgctgtgggtgcggctgcggcgggacctgggctactacctggcccggcggcctgtggatggcttcaccctgctggccatcgcccaccggcagctggtggaggtggtgcgggagcgctacctgagcggcagcgagcgggccaagagacatggagtgctggccgacttcttcagcggcacctggagccagggcaccaagaagctgatcaccctgcccctggtgggcaagcccctgaacctggacaggaaggtggccccccagcccctgtggttcagccacacagtggccaacctgaggaagctgaaggagctgccctaccacctgctgcacagcggccgcctggaggagctgaagcaggaggtgctgggctccatgtcctggatcagctgccggggcatcagcggcggcatcgaggacctgctggatgactttgacctgtgtgccccccacctggacagccctgaggtgggcctggtgcgggaggccctgcagctgtgcaggcctgctgtggagctgcggggcatggagaggagcctgctgtacacagagctgctggcccggctgcacttctttgccaccagccacccagccctggtgggccagctgtgccagcaggcccagagctggttccagctgtgtgcccaccctgtgctggtgcccctgggcggcttcctgcagcccccaggcggccccctgcgggccaccctgagcggctgccacaagggcatcacagccatggcctggggcgtggaggagaagctgctggtgattggcacccaggacggcatcatggctgtgtgggacatggaggagcagcacgtgatccacatgctgaccggccacactggagaggtgcgctgtgtgaagatctttgccaagggcaccctggccaacagcgccagcaaggactacaccctgcacctgtggaacctgctgagcggccaggagaagttcaccatctgggatggcggcagcaagaacccagctgagccccagatctggaacctgcacgtggatgaggcccacaaggtggtgtacagcgccagcggcagcaagatcaatgcctggaacctggagacagctgagcctgtgttccacatcctgggagatgccagtgacccctggatgtgcatggctgtgctggccagccaggccaccctgctgactgtgtccagagatggagtggtgtccctgtggagcagcgccaccgggaagctgcagggcaagcagcacatgagcagcatcaaggaggagacccccacctgtgctgtgtctgtgcagaagcagggcaagctggtgacaggcttcagcaatggcagcatcagcctggtgagcagcaaaggagaccggctgctggagaagctgcctgatgctgtgcgcttcctggtggtgtctgaagatgagagcctgctggccgccggcttcggccgctctgtgcgcatcttcctggccgacagccggggcttccgccgcttcatggccatggacctggagcacgaggacatggtggagacagctgtgtttggaacagagaacaacctgatcatcaccggcagcctggatgccctgatccaggtgtggagcctgtctgagcagggcaccctgctggacatcctggagggcgtgggcgcccctgtgtccctgctggcccggggcggggccctggtggccagcgccagcccccagagcagcagcttcaaggtgtgggacctgagtgatgcccacaggagccgggtgcctgcccccttcctggacagaacaggcctgacagctgtgagccacaacggcagctatgtgtacttccccaagatcggggacaagaacaaggtgaccatctgggacctggccgagggggaggagcaggacagcctggacaccagcagcgagatccgctgcctggaggtggccgagcagaggaagctgctcttcaccggcctggtgtctggagtggtgctggtgttccccctgaacagccggcaggatgtgatctgcatccccccacctgaggccaggaaggccatcaactgcatgagcctgagcaaatgtgaagatcggctggccatcgcctatgacaacatcgtgctggtgctggacatcaccagcggggacccctgccctgtgattgatggcccccgctacaccttctacacccagctgcctgagaccctgagctctgtggccatcctgacagactacagagtggtgtacagcatgaccaacggggacctcttcctgtatgaatgtgccaccagcaaggccttccccctggagacccacaggagccgggtggcctgtgtggaggtgagccacaaggagcagctggtggtgtctggctctgaagatgccctgctgtgcctgtgggacctgcaggccaggaagtggaagtttgagatgagctacaccagcagctactgccggggcgtgcagtgtgcctgcttcagcaaggatgacaagtatgtgtatgtgggcctgaaggacaggagcatcctggtgtggagcgtgctggatggcaccctgctgactgtgcagtttgtgcatgctgtggtgaaccgcatcatccccaccaccagcggcttcatcgcccccaccaggcatggctacctgatccgggagaacttccagtgcctgagcgccaaggccagcccccaggaccccctgaagaacttcaagaaggccatgtggatggtgaagagccggcagcgggaggagctggtggccgccgccggggccccccaggacctggagagcgagagcgcccagggcaatgagaccaagagcaacaagtgcagccaggtgtgcctgattgtgtag

SEQ ID NO: 109332 - DNA, 4290 bp, Artificial Sequence
  derived and/or modified sequence
atggacagccagttccacatggccggcgaggccagccagagctggttaaaggccaaagaaaagcagcgcggcaccagttacatggtggccgttatcgagtgggagatcgagagaagtctgctatccagcgaggaccgcgagcagggagcgaccgtgttcctgcgggagatccaggacttacataagcacattctcgaggattgtgccctccgcatggtggacaggttggccgatggctgccttgatgctgacgcacaaaatctgttatctagcctgaagtctcatatcaccgacatgcatcccggcgtcctgaaaactcaccgccttccatggtcaagggacctggtgaaccccaaaaataagacacacgcctgctatctaaaagaattgggtgaacagttcgtggtgagagctaatcatcaggtgctgaccaggttgcgggagcttgacactgccggacaagagctcgcgtggctctatcaggagatcagacaccatctatggcagagtagcgaagtaattcagactttctgcgggcgacaagagctgctggctagactgggacagcagttgagacacgatgacagcaaacagcacacaccattggtgttattcgggccccctgggattgggaaaactgcactcatgtgtaaattggctgaacagatgcccaggctccttggccacaagaccgtcaccgtcctccggctgctgggaacctctcaaatgagtagtgatgcaagagggctgctgaaatcaatatgcttccaggtgtgtctcgcctatggtctcccactgccccctgcgcaggtcctggatgctcatacaagagttgttcagttttttcacacactgttgcacacggtaagctgcaggaactttgaatcactcgtcctactcttggacgctatggacgatttggactcggtgcgtcatgccaggcgggtcccatggttacctttaaactgccctccaagagttcatttgatcttgagcgcttgttcaggtgcactaggcgtcctagacacccttcagcgggtgctgctggacccagaagcatattgggaggtaaagccgttgtcaggtaaccagggacagcagatgatacagttactgctcgccgctgccaggcgcactcttagccctgtccatacggatcttttgtgggcctcgttaccagagtgcgggaaccccggacgcctgcgtttagcctttgaggaagcgcggaagtgggccagcttcactgttcctgtgcccctggccacaaccgctgaagaggcaacccaccagctgtgcactcgacttgagcagacacatggccagctgctagtcgcacatgtcctgggctatattgtttcgtcaaggcacggcctgtccgaggccgaactgaaggacgtgctgtctctggatgacgaggtgcttcaagatgtgtaccgggactggactccaccaagtaaggaactcctgaggttccccccactgctctgggtgcgtctgaggagagaccttggctactacctggctcggagacccgtcgacggattcaccctgcttgccattgcccaccggcaactagttgaggttgtcagggagcgctatttgtccgggtccgagagggccaagcgtcacggtgtgctcgccgacttctttagcggtacttggtcccagggaaccaagaaattaattacccttccactagtcggcaaacctctgaacttagaccggaaggtggcaccacagcccttgtggttctctcatacagtcgccaatctgcgtaagctgaaggaactgccttaccatcttctgcacagtggaagactagaagaactgaaacaggaggtcttgggatctatgtcctggatttcctgtaggggtataagcggaggtatcgaagacctgctggacgattttgatctgtgtgcccctcacttggattctcccgaagtaggcttagtcagggaagcgcttcaactgtgcagaccagctgtagagctgagggggatggaacgttcactcctttatactgaactgttggctcgcttgcacttcttcgcgacctcacacccagccctggtcgggcagctgtgccagcaggctcagtcatggttccagctctgtgctcatccggtattggtacctttaggcggattcttacagccaccaggaggcccccttcgggccaccctcagcgggtgtcacaaggggatcactgcaatggcttggggagtcgaagagaagctactagtcatcggaacgcaagacgggattatggcggtgtgggacatggaggagcagcatgtcatccacatgctcactggacatacaggcgaggtgcggtgtgtaaagattttcgcaaagggaacgctggcgaattcagctagtaaagactacacgctgcatctgtggaacttactgtctggtcaggaaaaatttacgatctgggacggaggtagcaaaaaccctgccgaaccacagatttggaacttgcatgtcgatgaagcacacaaggttgtgtattctgcatctggcagcaaaattaatgcctggaacttggaaacagcagaaccagtgtttcacatactcggagacgcttccgatccttggatgtgcatggccgtgctagccagccaagccactctgttgaccgtgtcgcgggatggagtggtttccctgtggtcatcggcaacaggcaagctgcagggaaaacaacatatgagttctatcaaggaggaaaccccaacatgcgcagtgagcgtgcagaagcaggggaaattggtgacaggtttctcaaacggtagcatatctcttgtctcaagcaaaggggatagacttctggaaaaactgccagacgccgtgaggtttttagtggtgtccgaagacgaaagcctgttagcggcaggctttggaagatctgtgcggatctttcttgccgatagtcgcgggttcagaaggttcatggccatggatctggagcacgaagacatggtcgagacagccgtatttgggacggagaataatctgataatcaccggatcgttggacgcattgattcaggtgtggagcctgagcgaacaggggaccttgctcgacatcctggagggggtcggcgcccctgtgtccctgctggcccgtggtggcgccctcgtggccagcgcttctcctcaaagctcttcctttaaggtatgggatctgtctgatgcccacagaagccgggtgcccgccccctttttggataggacgggactgactgctgtgtcacataatgggtcttacgtgtactttccaaagatcggggacaagaacaaagtgacaatttgggacctggccgagggagaagagcaggacagcctggacacctcttcagagattcggtgtctggaggtggcagaacaacgcaaactgctgttcaccggcctggtatcaggggtcgtgctggtattcccattgaactctcgtcaggacgtgatttgcatccccccccctgaggctagaaaggcaataaactgtatgtccttatccaagtgtgaggatagactcgccatcgcttacgataatatcgttcttgtactagatatcactagcggcgatccatgtcctgtgattgacggccccaggtacactttttatacacagctgcccgaaactttaagttccgtggcaattctgaccgactatagagtcgtctatagcatgaccaacggtgatctgttcctctacgagtgcgctactagcaaggcatttccactggaaacgcaccggtcaagggtcgcctgcgtggaggtcagtcacaaggaacagctggtggtgtccggatctgaggatgccctcctgtgtctctgggatctgcaagcaagaaagtggaaatttgaaatgagctacacttcgagctattgcaggggggtgcagtgtgcctgcttttctaaggatgataagtatgtttacgtgggtctcaaggaccggtctatccttgtgtggtcagtattagacgggaccctgctgaccgtgcagtttgtgcatgccgttgtgaatagaattattcctacaacgtctggatttattgcccccacaagacatgggtatctgatcagggaaaacttccaatgcctgagcgcgaaggcctctccccaggatcctctgaagaatttcaagaaagccatgtggatggtgaaatctcggcagcgcgaggaacttgtggctgctgccggggcacctcaggatctggagagcgaatctgcccagggaaacgagaccaaaagtaataaatgtagccaggtttgcctcattgtctag

SEQ ID NO: 109333 - DNA, 4290 bp, Artificial Sequence
  derived and/or modified sequence
atggacagccagttccacatggccggcgaggccagccagagctggttgaaagccaaggagaagcaaagagggacatcgtatatggtagctgtgattgagtgggagatagaaaggagcctcttgtctagcgaggatagggaacagggcgctaccgtgtttctgcgcgaaattcaagacctacacaagcacatcctggaagactgtgctctgaggatggttgatcgcctcgccgacgggtgcctggatgctgacgcgcaaaatctgttgtccagcctgaaaagccacatcacagacatgcaccctggcgtgctcaaaacccaccgactcccgtggtctcgggacctggtgaacccaaaaaataagacgcatgcctgctacttgaaggagctgggggagcagttcgtggttcgggctaatcaccaagttctgacccgactgcgagagctggacacagctgggcaggagttggcttggctgtaccaagagatcagacatcacctgtggcagtccagtgaggttatccaaacattttgcgggaggcaggaacttttggcacggctcggccagcagcttaggcacgacgacagtaagcaacataccccgttggttctttttggtccccccggcataggcaaaactgcgttgatgtgcaagctagcagagcagatgcctcggcttctgggtcacaaaactgtcaccgtcctgaggttactcggaacctcacagatgtctagtgacgcccggggacttctcaagtcaatctgttttcaggtttgccttgcttacgggttaccactgccgcctgcccaggttctcgatgcccacacccgagtggtccagttctttcatactcttctgcataccgtttcctgtcgcaactttgagagccttgttttgctgctggatgccatggatgatctagactcagtgcgccacgcccggagggtgccatggctgccactgaattgtcctcccagggtgcatctgattctgagtgcctgctcgggggccctcggcgttctggacacactgcagcgtgtcttgctcgatcccgaggcttactgggaagttaaaccgctgtctggtaatcagggccagcagatgattcagctgttactagcagccgcccgccgtaccctgtcgccagtgcacacagatttgctctgggcttccttacctgagtgcggcaacccaggacggctccgactggcctttgaggaggctcgcaaatgggctagctttacagtccctgtgccccttgcaactactgcggaggaggctacccaccaactctgcacaagactggagcagacccacggccagcttctcgtggcccacgtgcttggatacatagtttcatctcgccatggattatctgaggccgagcttaaggatgtgctttctctcgacgacgaggtcctgcaggatgtgtacagggactggacaccccccagcaaggaattgctgaggttcccccccctgttatgggtcaggctacggagagacctgggctactacctcgctcggaggcccgttgatggattcaccttgttggctatcgctcacaggcagctggtcgaagtggtgagggaaagatacctgagcgggtcagagcgggcaaaacgacacggcgtactcgcagacttcttctcagggacttggagccaaggtacaaaaaagctgattacacttccactagtggggaagcccctgaatctggatagaaaagtggcgccgcaaccactatggttttcccatactgtcgccaacctaagaaaacttaaagaattgccttatcacttgctgcatagcggtagactcgaagaactgaaacaagaagtgttggggtccatgtcctggatatcatgcagagggatctctggcggtatcgaagacttactggacgactttgacctgtgcgccccccacctcgacagtccggaggtgggcctggtccgcgaggcgctgcagctgtgccgccctgccgtggaacttagaggcatggagcgaagcctcctctataccgaacttctggctaggctgcatttcttcgcgacgtctcatccagccctcgtcgggcaattgtgccagcaggcgcagtcttggtttcagttgtgcgcacacccagtactggtgccactgggtggctttttgcagcctcccggcgggccattgcgtgctacactatcagggtgtcataagggaattaccgccatggcgtggggtgttgaggagaagctactcgtcattggcacgcaagacggtataatggcagtgtgggacatggaagagcagcacgtaatccatatgcttactggccacacaggagaagtgcggtgcgtgaaaatcttcgccaaaggaacactggccaattcagccagcaaggactacaccctgcacctttggaatttgctgtccggacaggagaaattcacaatctgggacggtggatccaagaatcccgccgaaccacagatatggaacttgcacgtcgatgaggcacataaggtggtctacagcgctagcggctctaaaatcaatgcatggaatctggagacagccgaacctgtcttccatatcttgggggacgctagtgacccatggatgtgcatggctgtattagcctcccaggcaacactactcacagtttctcgggacggcgtcgtgagcctttggtcctcagccaccggaaagttgcaggggaaacaacacatgagtagcattaaagaagagacccctacctgtgctgtgagtgttcagaaacagggcaagctggtgacggggttttcaaacggcagcatatctctggttagtagcaaaggggataggctgttggagaagctgccagatgccgtgcgcttcctggtagtgagcgaagatgaatccctgttggcagcaggcttcggcaggtctgtgcggatctttctggccgactccagaggcttcaggcgattcatggcgatggacctcgagcatgaggacatggtcgagaccgctgtgtttgggactgaaaacaatctcataatcaccgggagcctcgatgctcttatccaggtgtggtcactttccgaacagggcaccctcctggatatcctggaaggcgtgggtgcaccagtgagcctgctcgccagagggggtgcgctggtcgcctctgccagcccccaatcatcgagtttcaaggtatgggacttatcagatgctcacagatcccgcgtgcctgctcctttcctggatcggacgggcttaaccgctgtctcacacaatggcagttacgtatacttcccaaagattggcgacaaaaacaaggtgaccatttgggacttagccgaaggcgaagagcaggattcgctggatacatcttctgaaatcagatgtctggaagtcgcggaacagaggaagctcctattcaccgggttggtgtcaggggtggtactggtttttccactgaacagccgtcaggatgtgatatgtatacccccgcccgaggctagaaaagccataaactgtatgtctctgagtaagtgtgaagacaggctggcaattgcctacgacaacatcgtgctggttttagatataactagcggagatccatgtcccgtaatagacgggccaagatacacattctacacacagctgccagagacattatcatctgttgctattttaactgattacagagtggtgtacagcatgactaacggcgacctattcctatatgagtgcgctacgagcaaggcttttccccttgagacccaccgaagtcgagttgcgtgcgtcgaagtgtctcacaaggagcagttggtggtctccgggtcagaagacgccctgctctgcctttgggatctgcaggcacgcaaatggaagttcgagatgtcatacacttcttcctattgtaggggcgtccagtgtgcctgtttctccaaggatgataaatacgtttatgtaggtttaaaagaccggtccattctggtttggtccgtcttggacggcacgctgctcactgtacagttcgtgcacgcggtcgtgaatcgaatcattcccactacctcgggattcattgcccctacacgtcatggctatcttatacgggagaattttcagtgtctgtccgccaaagcctctccccaggatcctctgaaaaatttcaagaaggctatgtggatggttaagtctcgacaaagagaagagttggtcgcagcagcgggcgctcctcaagacctcgaatccgaaagcgcccaaggcaacgaaacaaagtctaacaagtgctcacaggtatgcttaattgtctag

SEQ ID NO: 109334 - DNA, 4077 bp, Artificial Sequence
  derived and/or modified sequence
atggtggaccggctggccgacggctgcctggacgccgacgcccagaatctgctctcctctcttaaatcccacattaccgacatgcaccccggggtgctgaagacccatcgcttgccctggagccgagacctcgtgaaccccaagaacaagactcacgcctgctatctaaaggagttgggagagcagtttgttgtcagggccaatcaccaggtgctgactcgcctgagagaactggatacagccgggcaagagcttgcttggttgtaccaagagattcgtcaccacctgtggcagagcagtgaggttattcagactttctgtggcagacaggaattgttagcacggttgggccagcagctccgccacgatgattcaaagcagcacacaccgctagtgttgttcggacctcctggcatcggaaagactgccctcatgtgcaagctggcagagcagatgcccagactacttggacacaaaaccgttactgtgcttagacttctaggaacctctcagatgagcagtgatgcgaggggcctcctcaaatccatttgcttccaagtgtgcctggcctatgggctcccacttcctcccgcccaggtcctggacgctcacacaagagtggttcaattcttccacacactcctccacaccgtgtcctgcaggaatttcgaatcccttgttctgctactggatgctatggacgaccttgattccgtgcggcacgcccgacgcgtgccttggctgcctttgaactgccctcctagagttcacttgatcctgagtgcctgcagcggcgcattgggtgtgctcgacacccttcaaagagtgctgctcgaccccgaggcctattgggaggttaaacctctgagtggaaatcaggggcaacagatgatacagctgctcctggccgccgccagacggacattatctcctgttcacactgacctgctgtgggcgtccttgccagaatgcggcaatccaggacggcttaggctggccttcgaggaagcccgcaaatgggcttcgttcacagtgcctgttcctttagcaacaaccgccgaagaagccacacaccagctgtgcacacggttggaacagacccatggacagctgctggtggctcacgtcctgggatacatcgtgagttcacgacatggactttctgaagccgaactgaaagatgtcctgtctctcgatgatgaggtcttgcaggatgtatatagagactggacccccccgagcaaggagctacttcggtttcctcccctgctgtgggtgcggctacggcgcgacctagggtattacctggcacgtcgtcccgtggatggtttcacattgctcgccattgcacatcgacagttggtggaagttgtgcgggaaagatacctgtccggatcggagcgggccaagaggcacggggttttggcagacttcttttccgggacttggtcacaaggaactaaaaaacttataaccctccccctcgtgggaaagccccttaatttggatagaaaggtcgcccctcagcctctttggttttcgcatacagtggctaacctgcgcaaactgaaggaactgccttaccatctactccattctggaagattagaggagctgaaacaagaggtcctcggcagtatgtcatggatctcatgcagaggcatctccgggggcattgaagatctgttggacgatttcgatctgtgcgctcctcatctggacagccctgaagttggcctggttagggaggccctacaattgtgtcggcctgccgtagaactcaggggcatggagaggtccctgctgtataccgaactgctggcacggctgcatttctttgcgacctcacacccagctctggtagggcagttgtgccagcaggcccagtcctggttccagctgtgcgcccaccccgtgctggtccccttaggtggcttcctgcagccccccgggggaccacttagagctacgctgagcggatgccacaagggcatcaccgctatggcatggggggttgaagagaagcttctcgtaatagggactcaggatggcattatggcagtttgggacatggaggagcagcacgttatccatatgcttacaggccacaccggcgaagtcaggtgcgtcaaaattttcgcaaagggaactctggctaacagcgcgtccaaagactacaccctgcacctttggaacttactatctggtcaggaaaagtttacaatttgggacggcgggtcaaagaacccggcagaaccccagatatggaatttacacgttgatgaggcccacaaagtcgtgtactcagccagcggcagcaaaattaacgcatggaacctggagaccgcagaacctgtctttcatatactcggagacgcctctgatccgtggatgtgcatggccgtgctggcctctcaggccaccctgctgacagtttcccgcgatggcgttgtttccttgtggagtagcgctaccgggaagctccagggaaagcagcacatgagcagtataaaggaggagactccaacttgtgctgtttccgtgcagaagcagggaaaactggttactggctttagcaacgggtcaatctccctggtgagctcaaaaggggataggctgctggaaaagctgcccgacgctgtgagatttctggtagtctccgaggacgaatcacttctcgctgcaggctttggtagaagcgtgcgcatattcctggccgactcgagaggctttcgacggttcatggctatggatctggaacacgaggacatggtggagacagctgtttttggcactgagaacaacctgatcatcacgggcagcttggacgctttgatccaagtctggagtttatccgagcagggcacacttctggatatcttggagggcgtgggagccccagtgtctctcctagctcggggtggagccctggtcgcgagcgcttccccacaatcatcttccttcaaagtgtgggacttaagtgatgcccaccgctctagggtgcccgcaccatttttggacaggactggcctgacagccgttagtcataatggctcttatgtgtacttcccaaagattggagataagaataaggtcacaatctgggatctggcagagggcgaagaacaggacagcttggatacttcaagcgaaatccggtgcctggaagtcgctgaacagcgcaaattactttttacgggactcgtgtcgggcgttgtactggttttcccactgaattcgcgccaggatgtgatctgtattccaccacctgaagctcggaaagccatcaattgcatgtctctgtctaaatgtgaggataggctcgcaatagcttatgacaacatcgtgctggtcctagacatcactagcggcgacccttgccccgtgatcgatgggccgcgatatacgttttatacacaactgcccgagactctctcctctgtcgccatcttaactgactatagagttgtttacagcatgactaatggagatttatttctatacgagtgtgcgacatcaaaggccttccctcttgagacccatagatctagagtggcatgcgtggaagtgagccacaaggagcagttagtggtgagtggctctgaggacgccctattgtgtctttgggacttgcaggctcggaagtggaagttcgagatgagctatacctctagttactgtcgcggtgttcagtgcgcctgtttttcaaaggacgacaagtacgtttacgttggactcaaagacagaagtatcctcgtctggtccgtgctagacgggacactgttgaccgtacaattcgtgcacgccgttgtaaatagaattatccccactacaagcggattcatcgcacctacacgccatgggtacctgatccgcgagaattttcagtgcctgagtgctaaggcctccccccaagatccactgaagaacttcaaaaaggcaatgtggatggtaaagtctagacagcgagaagagttggttgccgccgcaggcgcaccccaggatctagaaagtgaatcagcacaaggaaatgagactaaatcaaataagtgcagtcaggtatgtttgatcgtctag

SEQ ID NO: 109335 - DNA, 5687 bp, Artificial Sequence
  derived and/or modified sequence
atggactcacaattccacatggctggggaggcctcacaatcatggctgaaggcaaaggagaagcaaagaggcacatcttacatggtggcagtcattgagtgggagatagagcggagcctgctgagctcagaggaccgggaacagggagccaccgtcttccttagagagatccaagacctccacaaacacatccttgaagactgcgcccttaggatggtggaccggctcgcggatggctgcctggacgctgatgcccagaaccttctcagcagcctcaaaagtcacatcactgacatgcacccaggggtcctcaagacccaccgcctgccgtggagccgcgacttggtgaaccccaagaacaagactcacgcctgctacctgaaggagctgggtgagcagtttgtggtgagggccaatcaccaggtcctcacacgcctccgtgagctggatacggccggacaggagttggcgtggctctaccaagagatccgccaccacctttggcagagctcggaggtcattcagaccttctgcggacgccaggaactcctggcccggcttgggcagcagctcaggcacgatgacagcaagcagcacacccccctggtactctttgggcccccaggcattggaaagacagccctgatgtgcaagctggctgagcagatgccaaggctgctggggcacaagacagtgaccgtcctgcggctgctggggacgtcacaaatgagctcagatgcccgtggcctgctgaagagcatctgcttccaggtgtgcctggcctatgggctgcccttgccccctgcccaggttctggacgcccacaccagggtggtccagtttttccataccctcctccacactgtctcttgcagaaacttcgagtctctcgtgctcctgctggatgctatggatgacctggactctgtccgccatgctcggagggttccctggctgcctctcaactgccccccgagggtgcacctcatcctctcagcttgctcgggggcactgggggttttggacaccttgcagcgggtgctcctggacccggaggcctactgggaggtgaagcccctttccggaaaccaaggccagcagatgatccaactcctgctggcagctgcaaggaggacgctgagcccggtgcacacagatttgctctgggccagcctcccagagtgtgggaacccagggcggctgaggctggcgtttgaggaagcccggaaatgggcctctttcaccgtgcctgtcccgctggccaccaccgcagaggaagccacgcaccaactctgcacccgcctggagcagacacacgggcagctcctcgtggcccacgtgctgggctacattgtgtcttcccgacacggtctctcggaggcggagctgaaggatgttttgtccctggacgacgaggtcctgcaggatgtgtaccgagattggaccccgcccagcaaggagctgctgcgcttcccgcccctgctgtgggtgcggcttcgtcgggatctgggatactacttggcccggcggcccgtggatggcttcaccctcctggccattgcccacagacagctggtcgaggtggtccgtgagcgctacctgtcaggatccgagagagccaagaggcatggcgtcctggccgacttcttctcagggacctggagccagggtaccaagaagctcatcactctgccacttgtggggaaaccactgaacttggaccgaaaggtggccccgcagcctctgtggttctcacatacggttgcaaacctgcggaagctgaaggagttgccctatcacctgcttcactcgggccgcctggaggagctgaaacaggaggttctgggcagcatgagctggatttcctgccggggcatctctgggggcattgaagacctgctggatgactttgacctgtgtgcccctcacctggactcccctgaggttggcctggtccgtgaagccctccagctctgccgccctgctgtggagctccgaggcatggagaggagcctcctgtacacagaactgctggccagactccatttcttcgccacctcacatccagcactggtgggacagctatgccaacaggcccagagctggttccagttgtgcgcacaccctgtgctggtgcccctcggaggattcctccagcccccgggaggacccctccgggcaactctcagcggctgtcacaaaggcatcaccgccatggcatggggtgtggaggagaagctgctggtgattggcacccaggatggcatcatggctgtgtgggacatggaagagcagcatgtgatccacatgctaactggacacacaggagaggtgaggtgtgtgaaaatatttgccaaagggaccctcgccaactctgcttcaaaggattacacgctgcacttgtggaacttactctctggccaggagaaatttaccatttgggatggaggctcaaaaaatcccgctgaacctcagatctggaaccttcatgtggatgaggcacacaaagttgtgtattcagcatctggctcaaagatcaatgcttggaatctggaaactgcagagccggtattccatatcctgggagatgcctctgatccttggatgtgcatggccgtgctggcctcccaggccacactgctgacagtgtccagggatggtgtggtcagtctgtggagctcagctacgggaaaacttcaggggaagcaacatatgtccagcatcaaagaagaaacacctacctgtgccgtctcagtccagaagcaaggaaagcttgttaccgggtttagcaatggctccatctctttggtttcctccaaaggggacagattgctggagaagcttccagatgctgtgaggttcctggtggtctctgaagatgagtccctcctcgccgcaggctttggaagatcggtgcggatattcttggcggactcgaggggctttcgccgattcatggccatggatctggaacatgaagacatggtggagacggctgtttttggtactgagaacaacctgatcatcacggggtcccttgatgcgctcattcaggtgtggagtctgtcagaacaggggacccttctggacatcctggaaggcgtcggggcccccgtgagcctgctggcccgcggcggggctttggtggcatctgcttccccacagtcctcatctttcaaggtctgggatctcagcgatgctcataggtcccgggtgcctgcaccatttctggaccgcaccggcctcaccgcagtgtcccacaatggaagctacgtctacttccccaaaattggggacaaaaacaaagtcactatttgggacttggcagaaggcgaggaacaagattccctggacacctccagtgagatcaggtgtctggaggttgctgagcagcgcaagctcctatttacgggcctcgtgtcgggggtcgtccttgtgttccccctgaattccaggcaggacgtgatatgcattccccctcccgaggcccggaaagcaatcaactgcatgtccctgagcaagtgcgaggaccgcctggccatcgcctatgacaacatcgtcctggtgctggacatcacctccggggacccctgcccggtcatcgatgggccaagatacaccttttacactcagctgcccgagaccctctccagcgtggccattctgacggactaccgcgtggtctacagcatgaccaatggggacctctttctttacgagtgtgcaacttccaaagcgtttcccttggagacccacaggagccgagttgcctgtgtggaggtcagccacaaggagcagctggtggtcagcgggtctgaggatgccctgctgtgtctctgggacctgcaggcacgcaagtggaaattcgagatgagctacacgagttcttactgcagaggggtccaatgtgcttgcttctccaaggatgacaagtatgtgtacgtgggcttaaaggatcgctctatacttgtttggagtgtgctggatggcaccctgctgacagtccagtttgtccatgctgtggtaaacagaatcatcccaaccaccagtggcttcattgcccccaccaggcatggttatctgatccgagagaatttccagtgcctttcagcaaaagcctcaccgcaggaccctcttaagaacttcaagaaggcaatgtggatggtcaaatccaggcagagagaggagctagttgcagctgcaggagctccccaggacttggagtcagaaagtgcccagggaaatgaaaccaaatcaaacaaatgctcacaagtgtgcctgatagtgtaaaaaaataaaaataaaaaaaccctgtgggggtatggggctccagtgagttagccccatttaatctagttaaagcaaaaagaatacgtttgctggtgtatatctggacccatggcttcagattatggcttcagaccttgtctcttctcatctttccattattctttcctctttttcattttcattctcagacttgccacccccaggttagcaacatggtggccaatatgctgctgtctccaatttcaatagaaaagagagcttctctttcccaacagtcctagcctcaactctactggtcccaattggcccatacgcctagccctaaaccaattattatatctgggagaatgcagagctctaatcggctagactgatccaatgtccaccactgggactgagaatagaagagattactcctgagatgcaaactggagttctggtaccagatgaagggggaacggatgaatgtgagatacagcaaatcactgatgtggaccacagaacctcacagtttataaagctgtaggtgctgtcatctgatcctcatcacaactcatactttagggagggcaggagtttctgtatctattttacagatgaggaaactgagccttgcggaagtagttataatttgattcaggtcacaagtccaaggtgcaagagctctgagagtgagccttctgtcccattcctgttagacctcactccaatttcagtctgcagagcacaaccatctcttccacaggcaccacactcaaatgctcacaggagctagtgactaatctagacacttccatgcacctgggtgagcagcagggagagacagagactggacatgtggaaggcagagattgtgtctagggtgggtatgagcagcctgactgtagcccagaatcaccatggccaaacaagcccactgctgtcagtgcttccagttgtaataagcaaagccagaaatccagacttttatgcaaaaatgttctgacttttaaagttggcgattggttgaatttatatctatagtgcatttggcatgtgcgtctttggttaatgagctgacttcaggactcacgctggcagtaaaacaatcaacatgttatagttcatccctctctattccttggctcccaaacttttgggataaagatgtgggtttttaatcttaaaaactggaggctcttggaagtagaaagagctgctgatctctccctgctttgcttttgaactgtctgccttgtgcaagttcaacagtcaaactgttttcattccacttaagtggatctttcttctttgcccacagccttctaaaagcccttctcagtcttctcaggcttttactttaatgctaggatagtctaaatcttcaaggtggctatcccttctcccctccgtggaat

SEQ ID NO: 109336 - DNA, 8398 bp, Artificial Sequence
  derived and/or modified sequence
gaggagtctaaattggtcgttcaactaccagcaaaggctaaagagaggctggagcccccaggacagccagaacgctgacactgcaaagggcctctgtccttactggggaagcccagtcctgctcagctgtcttcttcagcaacaaacagaagtccagaaagagaaacagttgtggaggaagctgttgtgatgataatttactgagcacctactatgtgccaggcacgccagccttaccagacaagatccttgggctcatggaattcactttctcgtgggacagacaaacaataacatgtagaaacatatcagctgttgcaggcagtaaccaagggagcgtggccaggcgctgaagtgaattcgggtccaaggagcctgctgggacccaggaaaacgagagaaggaacagaaattgtggtggaggcaaattcaagatcagaagattggggaggaggtgctaagagaggtctggagagatgctgggacccagaactggggcctcagtgagatcagcaggctgcagctaaactgtggtatccaggtgagttgtgggaaggtggctggggggccgggctgggtttatgggggcggggtccgtggaggagaggggataccctccatgcccttccttgcagatatggatgcagagagggaagccctgcagagcactgcctaccctgaagtgccagaccttctgccagaggcacggcttgatgtttgaggtcgttgatctgaggtggggtattcggaacattgaagccactgaccacttgaccacagaactctgcttggaggaggttgaccggtgttggaaaacatccatagggccagcttttgttgccctcatcggtgatcagtacggcccctgtctgattccctcgcggatcgatgagaaggagtgggaggtattgagggaccatctgactgccaggccaagtgacctggagctggtggcacgatacttccagagggacgagaatgcgtttcctcccacctacgtcctgcaggcaccaggtactggggaggcctgtgaaccagaggaggccaccttaacttctgtcctacgctctggagcccaggaggcccggaggctggggctcatcacccaggagcagtggcagcactaccaccggtcaggtgaggccgcagggactcccctctggagacccacaagaaactgaccacgtgttcagaatatccatcccctgttggcaaaaatgcaacagtctgcatttcttgcaaatgccaaaccagtcaacctctggtccctcggctctgagaaaggctgttttactgatccaagatagttcagccatgttcctgatcaatcttggtctcaggatcttcctctcctcgctggctctttcttcttgtctcccagggaggttcctggcacaggggccgtattagtctgttctcatgccactaataaaggcatacttgaggctgggtaatttacaaaggaaagaggtttaatggactcacaattccacatggctggggaggcctcacaatcatggctgaaggcaaaggagaagcaaagaggcacatcttacatggtggcagtcattgagtgggagatagagcggagcctgctgagctcagaggaccgggaacagggagccaccgtcttccttagagagatccaagacctccacaaacacatccttgaagactgcgcccttaggatggtggaccggctcgcggatggctgcctggacgctgatgcccagaaccttctcagcagcctcaaaagtcacatcactgacatgcacccaggggtcctcaagacccaccgcctgccgtggagccgcgacttggtgaaccccaagaacaagactcacgcctgctacctgaaggagctgggtgagcagtttgtggtgagggccaatcaccaggtcctcacacgcctccgtgagctggatacggccggacaggagttggcgtggctctaccaagagatccgccaccacctttggcagagctcggaggtcattcagaccttctgcggacgccaggaactcctggcccggcttgggcagcagctcaggcacgatgacagcaagcagcacacccccctggtactctttgggcccccaggcattggaaagacagccctgatgtgcaagctggctgagcagatgccaaggctgctggggcacaagacagtgaccgtcctgcggctgctggggacgtcacaaatgagctcagatgcccgtggcctgctgaagagcatctgcttccaggtgtgcctggcctatgggctgcccttgccccctgcccaggttctggacgcccacaccagggtggtccagtttttccataccctcctccacactgtctcttgcagaaacttcgagtctctcgtgctcctgctggatgctatggatgacctggactctgtccgccatgctcggagggttccctggctgcctctcaactgccccccgagggtgcacctcatcctctcagcttgctcgggggcactgggggttttggacaccttgcagcgggtgctcctggacccggaggcctactgggaggtgaagcccctttccggaaaccaaggccagcagatgatccaactcctgctggcagctgcaaggaggacgctgagcccggtgcacacagatttgctctgggccagcctcccagagtgtgggaacccagggcggctgaggctggcgtttgaggaagcccggaaatgggcctctttcaccgtgcctgtcccgctggccaccaccgcagaggaagccacgcaccaactctgcacccgcctggagcagacacacgggcagctcctcgtggcccacgtgctgggctacattgtgtcttcccgacacggtctctcggaggcggagctgaaggatgttttgtccctggacgacgaggtcctgcaggatgtgtaccgagattggaccccgcccagcaaggagctgctgcgcttcccgcccctgctgtgggtgcggcttcgtcgggatctgggatactacttggcccggcggcccgtggatggcttcaccctcctggccattgcccacagacagctggtcgaggtggtccgtgagcgctacctgtcaggatccgagagagccaagaggcatggcgtcctggccgacttcttctcagggacctggagccagggtaccaagaagctcatcactctgccacttgtggggaaaccactgaacttggaccgaaaggtggccccgcagcctctgtggttctcacatacggttgcaaacctgcggaagctgaaggagttgccctatcacctgcttcactcgggccgcctggaggagctgaaacaggaggttctgggcagcatgagctggatttcctgccggggcatctctgggggcattgaagacctgctggatgactttgacctgtgtgcccctcacctggactcccctgaggttggcctggtccgtgaagccctccagctctgccgccctgctgtggagctccgaggcatggagaggagcctcctgtacacagaactgctggccagactccatttcttcgccacctcacatccagcactggtgggacagctatgccaacaggcccagagctggttccagttgtgcgcacaccctgtgctggtgcccctcggaggattcctccagcccccgggaggacccctccgggcaactctcagcggctgtcacaaaggcatcaccgccatggcatggggtgtggaggagaagctgctggtgattggcacccaggatggcatcatggctgtgtgggacatggaagagcagcatgtgatccacatgctaactggacacacaggagaggtgaggtgtgtgaaaatatttgccaaagggaccctcgccaactctgcttcaaaggattacacgctgcacttgtggaacttactctctggccaggagaaatttaccatttgggatggaggctcaaaaaatcccgctgaacctcagatctggaaccttcatgtggatgaggcacacaaagttgtgtattcagcatctggctcaaagatcaatgcttggaatctggaaactgcagagccggtattccatatcctgggagatgcctctgatccttggatgtgcatggccgtgctggcctcccaggccacactgctgacagtgtccagggatggtgtggtcagtctgtggagctcagctacgggaaaacttcaggggaagcaacatatgtccagcatcaaagaagaaacacctacctgtgccgtctcagtccagaagcaaggaaagcttgttaccgggtttagcaatggctccatctctttggtttcctccaaaggggacagattgctggagaagcttccagatgctgtgaggttcctggtggtctctgaagatgagtccctcctcgccgcaggctttggaagatcggtgcggatattcttggcggactcgaggggctttcgccgattcatggccatggatctggaacatgaagacatggtggagacggctgtttttggtactgagaacaacctgatcatcacggggtcccttgatgcgctcattcaggtgtggagtctgtcagaacaggggacccttctggacatcctggaaggcgtcggggcccccgtgagcctgctggcccgcggcggggctttggtggcatctgcttccccacagtcctcatctttcaaggtctgggatctcagcgatgctcataggtcccgggtgcctgcaccatttctggaccgcaccggcctcaccgcagtgtcccacaatggaagctacgtctacttccccaaaattggggacaaaaacaaagtcactatttgggacttggcagaaggcgaggaacaagattccctggacacctccagtgagatcaggtgtctggaggttgctgagcagcgcaagctcctatttacgggcctcgtgtcgggggtcgtccttgtgttccccctgaattccaggcaggacgtgatatgcattccccctcccgaggcccggaaagcaatcaactgcatgtccctgagcaagtgcgaggaccgcctggccatcgcctatgacaacatcgtcctggtgctggacatcacctccggggacccctgcccggtcatcgatgggccaagatacaccttttacactcagctgcccgagaccctctccagcgtggccattctgacggactaccgcgtggtctacagcatgaccaatggggacctctttctttacgagtgtgcaacttccaaagcgtttcccttggagacccacaggagccgagttgcctgtgtggaggtcagccacaaggagcagctggtggtcagcgggtctgaggatgccctgctgtgtctctgggacctgcaggcacgcaagtggaaattcgagatgagctacacgagttcttactgcagaggggtccaatgtgcttgcttctccaaggatgacaagtatgtgtacgtgggcttaaaggatcgctctatacttgtttggagtgtgctggatggcaccctgctgacagtccagtttgtccatgctgtggtaaacagaatcatcccaaccaccagtggcttcattgcccccaccaggcatggttatctgatccgagagaatttccagtgcctttcagcaaaagcctcaccgcaggaccctcttaagaacttcaagaaggcaatgtggatggtcaaatccaggcagagagaggagctagttgcagctgcaggagctccccaggacttggagtcagaaagtgcccagggaaatgaaaccaaatcaaacaaatgctcacaagtgtgcctgatagtgtaaaaaaataaaaataaaaaaaccctgtgggggtatggggctccagtgagttagccccatttaatctagttaaagcaaaaagaatacgtttgctggtgtatatctggacccatggcttcagattatggcttcagaccttgtctcttctcatctttccattattctttcctctttttcattttcattctcagacttgccacccccaggttagcaacatggtggccaatatgctgctgtctccaatttcaatagaaaagagagcttctctttcccaacagtcctagcctcaactctactggtcccaattggcccatacgcctagccctaaaccaattattatatctgggagaatgcagagctctaatcggctagactgatccaatgtccaccactgggactgagaatagaagagattactcctgagatgcaaactggagttctggtaccagatgaagggggaacggatgaatgtgagatacagcaaatcactgatgtggaccacagaacctcacagtttataaagctgtaggtgctgtcatctgatcctcatcacaactcatactttagggagggcaggagtttctgtatctattttacagatgaggaaactgagccttgcggaagtagttataatttgattcaggtcacaagtccaaggtgcaagagctctgagagtgagccttctgtcccattcctgttagacctcactccaatttcagtctgcagagcacaaccatctcttccacaggcaccacactcaaatgctcacaggagctagtgactaatctagacacttccatgcacctgggtgagcagcagggagagacagagactggacatgtggaaggcagagattgtgtctagggtgggtatgagcagcctgactgtagcccagaatcaccatggccaaacaagcccactgctgtcagtgcttccagttgtaataagcaaagccagaaatccagacttttatgcaaaaatgttctgacttttaaagttggcgattggttgaatttatatctatagtgcatttggcatgtgcgtctttggttaatgagctgacttcaggactcacgctggcagtaaaacaatcaacatgttatagttcatccctctctattccttggctcccaaacttttgggataaagatgtgggtttttaatcttaaaaactggaggctcttggaagtagaaagagctgctgatctctccctgctttgcttttgaactgtctgccttgtgcaagttcaacagtcaaactgttttcattccacttaagtggatctttcttctttgcccacagccttctaaaagcccttctcagtcttctcaggcttttactttaatgctaggatagtctaaatcttcaaggtggctatcccttctcccctccgtggaattcctgatagagtctcaataaaagcaaccttagaaacagaggcttttgagctgaacaagaccctactgctgtcttattcatccattttccaaaccagttttccaaggcaggttttggtagttctgcaaatgttagtgtcaaatttcatttaaaaatattttaaactgtaattttaagatgtatgcttggatgtattgggcagcagcttctaaggtgttgaagattactaaggttggtgcaaaaagtaactgtggttttcgccattaaaaatattaaaaataatggcaaaaactggctgggcacagtggctcacacctgtggtcccagctctttggaaggccgaggcaggtggatcacctgaggtcaggagtttgagaccagcctggacaacatggtgaaacccttctctactaaaaatacaaaaatcagccaggcatggtggtgagtgcctgtaatctcagttactcaggaggctgagtcaggagaatcacttgaacccgggaggcggaggttgcagtgagctgagattgtgccactgcactccagcctgggtgacagagcaagactccatctcataataataataataatggcaaaagcctcggtggctcacgcctgtaatcccagcactttgggaggctgaggcgggtggatcacttgaggccaggtgttcaagagcagcctggtcaacatggtgaaactctgtctctactcaaaaatacaaaaattagcctggtgtggtgacgtacacctgtaattccagctacttgggaggctgaggcaggagaatggcttgaacccgggaggcggaggttgcagtgagccgagatcgcaccactgcactccagcatgagtgacagagactctgtctccaaaaaaaaaaaaaaaaaaaagtaatggcaaaaaccacaattaattttgcatcaacctaataatttaggattcttctgccattttcatttaactgatttaactgaagagcccaattaaattgtgaagggagccctgaaaaaattagctactctttgccactgcttctctgtgaatcaagggcttacccaatgcagaaataaagtagatgttgagaccaattaagatttcacctacaaattctgattttaaatgcctgtgtccatctccacagcctcagtgagaattgattgttttgtagataaatcctaatttaaacattggaaatgcctttttactaataaaatgctacaacaaattattgctt

SEQ ID NO: 109337 - DNA, 4290 bp, Artificial Sequence
  derived and/or modified sequence
atggatagccaattccatatggctggtgaggcttcccagtcctggctgaaagcaaaagaaaagcaacggggaacaagctacatggttgcagtgatcgagtgggagatagagcggagtctcttgagctctgaagaccgagagcagggtgccacagtgttcttacgcgagatacaagacctccataagcacatcctggaggattgcgctctgcggatggtagatcggctggccgatggatgcctggatgctgacgcgcaaaatctgctatcgtccctgaagagccacatcactgatatgcatcctggcgttctgaagacgcataggctgccatggagcagagatctggtgaatcctaagaacaaaacccatgcatgttacttgaaagagctgggtgaacagtttgtggttagagctaaccatcaggttctcactaggctgcgggagcttgataccgctggccaagagctcgcgtggctgtaccaggagattcggcatcacctgtggcagtcgagcgaggtcatccagaccttttgcggacgacaggagttactggctcgcctcggccagcagctccgccacgacgacagtaagcagcatactccgttggtactgttcggccctcctggaattggaaagaccgccctcatgtgtaaactggcagagcagatgccacggcttttaggccacaagacggtgacagtgctgcgactcctcggcacttcccaaatgtcctctgatgcaaggggcttactgaagtccatttgctttcaagtgtgcctggcctatgggctccccctgcctcctgctcaggtcttagacgcgcataccagggtcgtccaatttttccacaccctgctacacacagtttcttgtcggaattttgagagtctcgtgttgcttttagacgcaatggatgacctagactccgtgcgtcatgccagacgagtaccatggctgcccctgaattgtccacccagggtgcacctgatactgagtgcctgtagcggggctcttggtgtgctcgatacactgcaaagagtcctactagaccccgaagcatactgggaagttaagccgctgtcagggaaccaggggcaacagatgattcagctcctgttggctgccgcacgccgtacactatcaccagtgcatacggaccttctgtgggctagtcttccggaatgcgggaatccaggcaggctgcgactggctttcgaggaggcgaggaaatgggcctctttcaccgtacccgtgcccctggccacaaccgctgaagaggcaactcaccagctctgtacaagattagaacagactcacggacaactcttagtggctcacgttctcgggtatatcgtctcctctcgccacggcttgagcgaggcagagctgaaggatgtgttaagcctggatgacgaggtcctccaggacgtctacagagattggacgcccccttctaaggagcttctgcgctttcctccacttttgtgggtcaggctcaggagagacctgggctactatctggctcgacggccagttgacggcttcactctattagcaatcgctcaccgccaactggtggaggtagtgcgagaaagatatctatccggaagcgaaagggccaagcggcacggagtgctcgccgacttttttagcggcacctggtcacaggggaccaagaaacttatcaccctgccactggttggtaaacccctcaatttggatcggaaggtcgcccctcagcctctgtggttttcccacacagtggccaaccttcgaaagctgaaggaattgccctaccacctcctgcactccggcagactggaggaactcaagcaggaggttctggggtctatgagctggatcagttgccgaggtataagcggcggtatcgaggacctcctggacgacttcgacctttgtgctccacatctggattcccctgaggtgggactcgtcagagaggctctccagctgtgtaggcctgcggtggagcttaggggcatggagcgtagccttctttacacagagcttctcgccagacttcatttcttcgccaccagccacccagccttggtgggccagctgtgccagcaggcccagagctggtttcagctttgcgcacaccctgtactggtgccgctggggggtttcttgcaacctccaggtggaccactgcgggctacgctctctggttgtcataagggaatcaccgccatggcttggggagtcgaggagaaactccttgttattggaacccaggatggaattatggctgtgtgggatatggaggagcagcatgttatccacatgctaacgggccacactggggaagttcgatgtgtaaagatcttcgcaaagggaacgctggcaaacagtgcctcaaaggattatactctgcacctttggaatttgctgtccggtcaagagaaatttacaatttgggacgggggatccaagaaccccgcagagccacagatctggaatctgcacgttgacgaggcccacaaggtcgtgtactctgcctctgggagtaaaatcaatgcatggaacctggagaccgcagagcccgttttccacatcctaggcgatgcatcagacccctggatgtgtatggccgttttggcgtctcaggctacgctgctgacagtgtctagggacggggtagtgtccctgtggtcctcagccaccggaaagctccagggtaagcagcacatgtccagtataaaagaagaaacgcccacctgtgcagtctctgtccaaaagcagggcaagctcgtaaccggcttctccaacggatcaattagccttgtatcatctaagggagaccggctgttggaaaagctccccgatgctgtccggtttttggtcgtgtctgaagacgagagcctgctcgctgccggttttggtcgatctgtgaggatttttctggcggactctcgcggttttcggcgattcatggcgatggatctcgagcatgaggacatggtagagacagccgttttcggtaccgaaaataatctgatcatcactggaagcttggacgccctgattcaggtgtggtcactgtcagaacaggggacactgcttgacatccttgagggagttggagcaccagtcagtctactggcccgtggaggagcgttagtggcttctgcaagcccacaatccagctcgtttaaggtatgggacctgagcgacgcccataggtccagggtgcctgcaccttttttggatcgcaccggtctgaccgccgtttctcacaatggcagctacgtctattttcccaaaatcggtgacaagaacaaagtgaccatttgggacctggctgagggcgaagagcaggacagccttgacacctcatccgagattcggtgcctcgaagtggccgagcagaggaaactcctgttcacagggcttgtgtccggagtcgtcctggtcttccctctgaattctaggcaggacgttatctgcataccccctccagaagccagaaaggcaataaactgcatgtccctgagtaaatgtgaagatagacttgccattgcctatgacaacattgtgcttgttctggacattacatccggagacccatgtcccgtgattgatggcccaagatataccttctatacccagctgccggaaacactgtcgagcgtcgctattctcacagattatcgagttgtgtattctatgaccaatggcgacctctttctgtacgagtgtgccacttcgaaggccttccccctcgagacacaccgatctcgagtggcctgtgtagaggttagccataaggaacagctcgtggtcagcgggtctgaagacgctctgctgtgtttgtgggatttgcaagcaaggaaatggaaattcgagatgtcatacacctcaagctactgtcggggagtgcagtgtgcctgctttagcaaggacgacaagtatgtgtacgtgggccttaaagatcgtagcattctcgtgtggtcggtgttagatggaacgctgctcaccgtccagttcgtccatgctgtggtaaacagaattattcccaccaccagcggattcattgctcccacccggcatggatatttgatacgagagaatttccagtgtttgagtgctaaagccagcccacaagatcccctgaagaacttcaagaaagcaatgtggatggtgaagagtagacagagagaagaactcgtcgcagcagccggagcaccacaagatctggagagcgaaagtgctcaggggaacgaaaccaagtccaacaagtgcagtcaagtttgtctgattgtgtag

SEQ ID NO: 109338 - DNA, 4290 bp, Artificial Sequence
  derived and/or modified sequence
atggattcccagttccatatggccggtgaggccagccagtcgtggctgaaggccaaggagaaacagcgtggtactagttacatggttgcggtgatcgagtgggaaatcgaaagaagcctattgtcctcagaagaccgcgagcaaggagctaccgtctttctgcgcgagatccaggatctgcacaagcatattctggaagattgcgccctgcgaatggttgaccgactggccgatggctgccttgacgccgatgcacagaatctcctcagcagcctaaagtcccacatcacagacatgcacccgggagtgttgaagacacaccggctaccatggagtagagatttggtcaaccccaaaaataaaacccacgcttgctatctgaaggaattaggggagcagttcgtggtccgtgcgaatcaccaggttctgactcgcttaagggaactagacactgctggacaggaactggcatggctgtatcaggagattaggcaccacctgtggcagtcttccgaggtaattcagacattctgtggacgacaggagctgctggccaggttgggccaacagctgcggcacgatgattcaaaacagcatacccccctcgttctatttgggccacctgggatcggtaaaactgccctaatgtgtaagctggccgagcagatgccgaggctcctgggacataagacagttacagtgctacgcctgcttggaacatcacagatgtccagcgacgctcggggacttctcaagtccatttgcttccaggtgtgcctggcttacggacttcccctgcctcctgcacaagtgctggacgctcataccagggtggtacagttttttcacacattactgcacacagtgagctgcaggaatttcgaatccctggtgttgctcctggatgctatggacgacttggattccgtccgacatgcaagaagagtaccctggctaccattgaattgtccccctcgagttcatcttattctgagcgcctgctcaggcgcactgggagttttggacacacttcagagggtgctgctggatcctgaggcatactgggaagtgaagcccttgtctgggaatcagggacaacagatgatccagctcctgctggccgcagcacgaagaacactgtctccagtgcacactgatcttctgtgggcctctcttcctgaatgcggcaatcctgggagactgagacttgctttcgaggaggcgagaaaatgggccagtttcacggttcctgtccctctggccaccactgcagaggaggcgacccatcagctgtgcacgcgccttgagcagactcacggccaacttctcgtggcgcacgtcctgggctatattgtaagcagccgccatggattgtctgaggccgaactgaaggacgtgctgtccctcgacgatgaagtattgcaggatgtctaccgtgattggacccctccaagtaaggagcttctgcgctttccccctctgttatgggtgagactgagaagggatctcggttattaccttgcccgacgcccagtggatggattcacactgctcgcaatcgctcacagacaactggttgaggtggtccgagaacgatatctcagcggctctgagcgggctaaaaggcacggtgtgctggccgatttcttttctgggacttggagccagggcacgaaaaagctgattacattgcccttggtgggtaagccactgaacttagatcgtaaggtggcccctcaacccctttggttctctcacactgtagccaatctccgcaagctgaaagaattgccctaccacctgctccactcaggcaggcttgaagaattgaaacaggaggtgttgggatccatgagttggatcagttgcagagggatttctggcggtattgaagacttgctcgacgatttcgacctttgtgctcctcacctcgacagcccagaagtgggccttgtccgcgaggcactccagctgtgccgaccggctgtcgagctgagaggtatggagcggagcctgttatacacggagctactggccagactgcacttcttcgcaacctcacaccctgccctggtcggtcaactgtgccaacaagctcaatcatggttccagttgtgcgcacaccctgttctggtgcctctggggggatttctccaacctcctggtggcccattgcgagccaccctttcaggctgtcacaaggggataacagccatggcttggggagtggaggagaagctcttggtgattggaacacaggatgggattatggcggtctgggacatggaggaacagcatgtgatccatatgctcacaggccacacaggggaagttaggtgtgtcaagatcttcgctaagggaactttagctaattcggcttccaaagactacaccctgcacctttggaatctgctctcagggcaggaaaagtttacaatctgggatggcggttcaaaaaacccagctgagcctcaaatctggaatttacatgtggatgaggcacacaaggtggtctacagcgcctccggcagcaagatcaatgcatggaaccttgaaacggctgagccggttttccacattctgggtgacgcctcagatccatggatgtgcatggctgttctggcatctcaggccaccctgctcacagttagtagggatggtgtagtttccctttggagtagtgctactgggaagttgcaagggaagcagcacatgtcctcaatcaaggaggaaaccccaacctgtgctgtttcagtgcagaaacagggtaagctggtaactggattctccaacggcagtatctcgctggtaagctctaagggagatcggctgttagagaaattgccagatgcagtccggtttctcgtcgtctctgaggacgaatcactcctggccgcaggctttggccgttctgttcgtatcttcttagccgactctcgcggattcaggcgctttatggcaatggacctcgaacacgaggatatggttgagacagcagtgtttggaacggaaaataatcttattattaccggaagccttgatgctttaattcaggtgtggagtttaagcgagcagggaaccctccttgatattctggaaggtgtgggcgctcccgtctcactcctcgcccgtggaggcgcattggtcgctagcgctagtccccagagctcaagtttcaaagtatgggacctgtctgacgctcacagaagcagggtgcccgcaccttttctcgaccgaacaggcctcaccgcagtgtcacacaacggatcgtatgtatacttcccgaaaattggagataagaacaaggtgaccatctgggacctagcagaaggggaagagcaggactccctggacacaagcagtgaaattcgttgcctggaggttgcagagcagcgcaagctcctgtttaccggacttgtttctggcgttgtgttggtgttccctctgaactcccgacaagatgtcatttgcataccccctcccgaggctaggaaagcaatcaattgtatgtccctgtccaagtgtgaagatagactcgcaatcgcctacgataatatagtgctagtactagacatcacttccggcgatccttgccccgtgatagatggtccaagatatacgttctatactcagctacctgaaaccctctcttccgtggccatcctaacagactaccgtgtggtgtactctatgacaaacggggacctgtttctatatgaatgcgccacctccaaggccttcccactggagacccacagaagtagagtggcatgcgtggaagtcagccataaggagcaactggtggtgtccggatcggaggacgcactgctgtgcctgtgggacctgcaagccaggaagtggaaattcgagatgtcctacacgtctagttactgccgaggcgtccagtgcgcctgcttctccaaggacgacaaatatgtatatgtagggctcaaagaccgctctatcctggtctggtccgtgttagacggcacgcttctcactgtgcaattcgtgcacgctgtggtgaatcgcattattcctaccaccagcggcttcattgcccctacacgacatggatatcttatcagagagaattttcaatgcttgtccgcgaaggctagtccccaggatccgttgaagaactttaagaaggcaatgtggatggttaaatcccgccagcgggaggagctagtagcagccgcaggggctccacaggacctggagtcagagtccgcgcaagggaatgagacaaaaagcaataaatgcagccaggtttgccttatagtgtag

SEQ ID NO: 109339 - DNA, 4077 bp, Artificial Sequence
  derived and/or modified sequence
atggtggaccggctggcggacggttgcctcgacgcagacgcccagaacctgctttcctctctgaaaagtcatataaccgatatgcaccccggtgttctgaagacccatcggcttccttggagcagagacctcgtaaatccaaagaataagacacacgcttgctacttaaaagagctgggggaacagttcgtagtgagggcaaatcaccaggtcctaactagattgcgtgagctagataccgcaggacaggagctcgcatggctgtaccaagagattcggcatcatctgtggcagagctctgaggtgatacagacattttgcggtcgacaagaacttctagcacggcttggccagcagctcaggcatgatgactccaagcaacacacacccctcgtactgttcggaccaccaggaatcggtaaaacagccctcatgtgcaaactggctgaacaaatgcccagactcctgggtcacaaaaccgtgaccgtgcttcgcctgttgggaacctcacagatgtcatctgacgctcgcggactgctgaagtccatctgttttcaggtctgcctcgcttatgggctccccctaccgccagcccaggttctggacgctcacaccagggtggtgcaattcttccatacccttctgcacactgtgagttgtaggaatttcgagagccttgtgttactgctcgacgcaatggacgaccttgattcagtgagacatgcacgtcgggtaccctggctgcccctgaattgcccccctcgggtccaccttatactgtcagcctgttctggggcattgggggtcctggacacgctccagagagtactgctcgatcccgaagcctattgggaagttaagcctctgtcaggtaatcagggacaacaaatgatccaactcctcctggctgcagccaggcgcacactgagcccagtgcacaccgacttactttgggccagcctccccgagtgcggaaaccccggtaggttacgattagcgtttgaggaggcacggaagtgggccagttttaccgtgccagttcctcttgccaccactgctgaggaggccacgcaccaattatgtactagactggaacagacacacggacagctcctggtggcacacgtgttggggtatatagtttctagtcgccacggcctgagtgaggcagagctgaaggatgtgctgagcctggatgatgaggtcctgcaggacgtgtaccgcgactggacccccccatccaaagagctgctgcggtttcctcctttactgtgggtgcgcctgagaagggatctcggttactacttagctcgcaggcccgtcgatggcttcaccctgctagcgatagcacatcgtcagttggtagaggtggtccgcgagcgatatctttccggctcagaacgcgcaaaacgccacggagtcctggccgatttcttctcgggcacatggtcccagggaacgaagaaattgatcaccctgcctctggtcggtaaacctctcaacctggacaggaaggtggctcctcagcccctgtggttctcccacacagttgccaacctgcggaagctgaaggaattaccctatcacctattgcactccggcagactcgaagaactcaaacaagaagtgctcggatcaatgagttggatctcatgcaggggaatcagcgggggaattgaggacttgctggacgattttgacttgtgtgcgcctcacttggactcccccgaggtgggtctagtgcgggaggctctgcagctctgcagaccggcagtcgaactccgcggaatggagaggagtctactctacaccgagcttctggcccgactacacttctttgctacatcacatcccgctcttgtcggccaactgtgccagcaggctcagtcctggttccagctgtgtgctcatccagtactcgttcctcttgggggtttcctgcagcctcccggaggcccattgcgggcaaccctgagtggctgtcacaagggaattactgccatggcgtggggagtggaagaaaaactactggtcattggcactcaggatggcatcatggctgtctgggatatggaagagcaacacgtgattcatatgctcacagggcacactggcgaggtgcggtgtgtcaagatatttgcaaagggcactctggcaaatagcgcatcaaaggactacactctgcatctctggaacctgctcagtggccaggagaaattcaccatatgggatgggggtagcaaaaaccctgctgagcctcaaatctggaacctacacgtggatgaggctcacaaggtcgtctactctgcaagtggtagcaagataaatgcatggaatctggagacagccgaacctgtgtttcacatactgggagatgcctcagacccttggatgtgcatggccgtactcgcttctcaggcaacactcctgactgtgtcgagagacggagtggtctcattgtggagctcagccacaggtaaattgcagggaaagcagcacatgtcatctattaaggaggagacccccacgtgtgccgtcagcgttcagaagcagggaaagctcgtaacaggctttagtaacggcagtataagtttggttagctcaaaaggagacagactcttggagaagcttcctgatgcagttcgcttcctggtggtctcggaagatgagagcctccttgccgctggattcggccgatccgtccgcattttcctggctgattcccggggtttcaggcgatttatggcaatggacctagaacacgaggatatggtcgaaaccgccgtctttggaacagaaaataacctgataataacagggtcacttgatgccctcattcaggtgtggagcctgagcgagcagggcacactattggacatccttgaaggtgtaggggcacccgtaagcctcctggccaggggcggtgccctagtggcctcagccagcccacagtcctcctcgtttaaagtatgggacctgagtgacgcccatcgttctagggtgccggctccatttcttgacaggaccggcctaactgccgtttcgcacaatggctcatatgtttattttcccaaaatcggagataagaacaaagtgaccatatgggacctggcagagggtgaagagcaggattctctggatactagcagcgaaatccgatgcctggaagtggcagagcagcgcaagctattgtttacgggtctggtctctggagtcgtgctggtgttccccctgaattctaggcaggatgtgatctgtatcccgccacccgaggccaggaaagcaattaactgtatgtcattgtccaagtgtgaagaccgcttagccattgcgtatgacaatattgtactagtgctagatatcacgagtggagacccctgcccggtgattgacggacctaggtataccttttacactcagctgccagagactctctcctcagtggcgatcctgacggactacagggtagtgtactcaatgacaaacggagacctgtttttatatgaatgcgcaacttcaaaagcttttcctctggagactcatcgcagtcgagttgcctgtgtggaggtcagccacaaggagcagcttgtagtgagtggctcagaggatgccctgctgtgcctctgggacctccaagcgcgaaagtggaagtttgaaatgagctataccagctcttactgtcgcggtgtccaatgtgcgtgcttctcaaaggacgacaagtatgtctacgtcggcctgaaagataggtccatcctggtttggtcagttctggatggcacgttgcttactgtgcagtttgtacacgccgtagtgaaccgtattataccgacgacttccggctttattgcccctacccgccatggataccttattagggagaatttccaatgtctctctgctaaagcatccccccaggatccacttaagaacttcaaaaaagcaatgtggatggtcaaaagtagacagcgagaagagcttgtggctgcagctggcgcaccccaggatttagagtcagaatctgcccaggggaacgaaaccaagtctaataagtgctcccaggtctgcctgattgtctag

SEQ ID NO: 109340 - protein, 331 aa, Artificial Sequence
  derived and/or modified sequence
MTERPPSEAARSDPQLEGRDAAEASMAPPHLVLLNGVAKETSRAAAAEPPVIELGARGGPGGGPAGGGGAARDLKGRDAATAEARHRVPTTELCRPPGPAPAPAPASVTAELPGDGRMVQLSPPALAAPAAPGRALLYSLSQPLASLGSGFFGEPDAFPMFTTNNRVKRRPSPYEMEITDGPHTKVVRRIFTNSRERWRQQNVNGAFAELRKLIPTHPPDKKLSKNEILRLAMKYINFLAKLLNDQEEEGTQRAKTGKDPVVGAGGGGGGGGGGAPPDDLLQDVLSPNSSCGSSLDGAASPDSYTEEPAPKHTARSLHPAMLPAADGAGPR

SEQ ID NO: 109341 - protein, 333 aa, Artificial Sequence
  derived and/or modified sequence
MTERPPSEAARSDPQLEGRDAAEASMAPPHLVLLNGVAKETSRAAAAEPPVIELGARGGPGGGPAGGGGAARDLKGRDAATAEARHRVPTTELCRPPGPAPAPAPASVTAELPGDGRMVQLSPPALAAPAAPGRALLYSLSQPLASLGSHSGFFGEPDAFPMFTTNNRVKRRPSPYEMEITDGPHTKVVRRIFTNSRERWRQQNVNGAFAELRKLIPTHPPDKKLSKNEILRLAMKYINFLAKLLNDQEEEGTQRAKTGKDPVVGAGGGGGGGGGGAPPDDLLQDVLSPNSSCGSSLDGAASPDSYTEEPAPKHTARSLHPAMLPAADGAGPR

SEQ ID NO: 109342 - DNA, 996 bp, Artificial Sequence
  derived and/or modified sequence
atgaccgagagaccccccagcgaggccgccagaagcgacccccagctggagggcagagacgccgccgaggccagcatggcccccccccacctggtgctgctgaacggcgtggccaaggagaccagcagagccgccgccgccgagccccccgtgatcgagctgggcgccagaggcggccccggcggcggccccgccggcggcggcggcgccgccagagacctgaagggcagagacgccgccaccgccgaggccagacacagagtgcccaccaccgagctgtgcagaccccccggccccgcccccgcccccgcccccgccagcgtgaccgccgagctgcccggcgacggcagaatggtgcagctgagcccccccgccctggccgcccccgccgcccccggcagagccctgctgtacagcctgagccagcccctggccagcctgggcagcggcttcttcggcgagcccgacgccttccccatgttcaccaccaacaacagagtgaagagaagacccagcccctacgagatggagatcaccgacggcccccacaccaaggtggtgagaagaatcttcaccaacagcagagagagatggagacagcagaacgtgaacggcgccttcgccgagctgagaaagctgatccccacccacccccccgacaagaagctgagcaagaacgagatcctgagactggccatgaagtacatcaacttcctggccaagctgctgaacgaccaggaggaggagggcacccagagagccaagaccggcaaggaccccgtggtgggcgccggcggcggcggcggcggcggcggcggcggcgccccccccgacgacctgctgcaggacgtgctgagccccaacagcagctgcggcagcagcctggacggcgccgccagccccgacagctacaccgaggagcccgcccccaagcacaccgccagaagcctgcaccccgccatgctgcccgccgccgacggcgccggccccagatag

SEQ ID NO: 109343 - DNA, 1002 bp, Artificial Sequence
  derived and/or modified sequence
atgaccgagagaccccccagcgaggccgccagaagcgacccccagctggagggcagagacgccgccgaggccagcatggcccccccccacctggtgctgctgaacggcgtggccaaggagaccagcagagccgccgccgccgagccccccgtgatcgagctgggcgccagaggcggccccggcggcggccccgccggcggcggcggcgccgccagagacctgaagggcagagacgccgccaccgccgaggccagacacagagtgcccaccaccgagctgtgcagaccccccggccccgcccccgcccccgcccccgccagcgtgaccgccgagctgcccggcgacggcagaatggtgcagctgagcccccccgccctggccgcccccgccgcccccggcagagccctgctgtacagcctgagccagcccctggccagcctgggcagccacagcggcttcttcggcgagcccgacgccttccccatgttcaccaccaacaacagagtgaagagaagacccagcccctacgagatggagatcaccgacggcccccacaccaaggtggtgagaagaatcttcaccaacagcagagagagatggagacagcagaacgtgaacggcgccttcgccgagctgagaaagctgatccccacccacccccccgacaagaagctgagcaagaacgagatcctgagactggccatgaagtacatcaacttcctggccaagctgctgaacgaccaggaggaggagggcacccagagagccaagaccggcaaggaccccgtggtgggcgccggcggcggcggcggcggcggcggcggcggcgccccccccgacgacctgctgcaggacgtgctgagccccaacagcagctgcggcagcagcctggacggcgccgccagccccgacagctacaccgaggagcccgcccccaagcacaccgccagaagcctgcaccccgccatgctgcccgccgccgacggcgccggccccagatag

SEQ ID NO: 109344 - DNA, 996 bp, Artificial Sequence
  derived and/or modified sequence
atgactgagagaccccctagcgaggccgcgaggagcgacccgcagttggagggcagagatgctgcagaggctagcatggccccaccgcacctcgtcctactgaacggtgtggccaaggagaccagtcgcgcggccgccgccgagccacccgtgatagaactgggcgcaagaggaggccctggcggcggccctgctgggggtggcggcgcagcacgcgatcttaaaggacgggacgctgctaccgcagaagctaggcatagagttcccactaccgaactctgtcgccccccaggtcctgctcctgcacctgcccctgcttccgttacggccgaactgcctggagatggcagaatggtgcagctgtctccccccgccttggccgccccggccgctcccgggagagcattactctattcactgtcccagcctttggcctccttgggctcgggtttttttggtgagcccgacgccttccccatgttcactacaaacaacagggtgaagcgaaggcctagcccttacgagatggaaattaccgacgggccccacacaaaggttgtgaggcgtatatttaccaacagcagggagagatggcgacagcagaatgtgaacggtgccttcgctgagctgaggaagctcatacctacccatcctcccgataaaaaactcagcaaaaacgaaatactaaggcttgccatgaaatatatcaacttcctagcaaagttactgaacgatcaagaggaggaggggacccagcgcgcaaagaccggcaaagaccccgtcgttggggcaggtggagggggtggaggcggcggaggaggcgctccgcccgacgacctcctgcaggacgtcctaagtcccaactcctcttgtggcagtagcctggacggcgcggcgagccccgatagttacaccgaggaacctgcccctaaacacaccgcccggtccttgcaccctgctatgctgccggccgccgacggcgctggaccacggtag

SEQ ID NO: 109345 - DNA, 1002 bp, Artificial Sequence
  derived and/or modified sequence
atgaccgagcgcccgccttcggaggcggccaggagtgatccacagttggagggccgcgatgctgctgaggcaagcatggcccctccacatctggtgctgcttaatggtgtggccaaggagactagccgggccgccgctgccgagccgccagttatagagttgggcgcacgaggggggcctggaggtgggccagctggcgggggaggtgctgcccgcgacctgaagggccgagacgcagctaccgccgaggcaagacacagagtgcctacgactgagctttgcagaccacccggcccagcacctgcccccgcacccgcttcagtgacggctgagttacctggcgatggacgaatggtgcagctgtcaccacccgcacttgctgcccccgctgcgcccggacgtgcactgctatactccctctctcagccgttagcttccttgggatcccattctggcttttttggcgagcctgacgcgttcccaatgttcactacgaataaccgtgtgaagcggagacccagtccctacgagatggaaatcacggacggcccacacaccaaggtagtgcgccggatcttcaccaactcaagagagaggtggaggcagcagaacgtaaacggggcattcgccgaacttcgcaaactgattcctacccacccgcctgacaagaagctgagcaagaatgagattctgcggctggctatgaaatatattaactttctcgcaaaactcttgaacgaccaggaggaggaagggactcaaagggcaaagacagggaaggaccccgtcgttggcgccggaggaggtggaggcggaggtgggggcggggctcctcctgacgacctgcttcaggacgtccttagtccgaattcatcctgcggctccagcttggacggtgccgcaagccctgacagctacaccgaggaaccagcacctaagcatactgcccgaagcctgcacccggccatgctgccggccgctgatggggccgggcccagatag

SEQ ID NO: 109346 - DNA, 996 bp, Artificial Sequence
  derived and/or modified sequence
atgactgagcggcccccctcagaggcggcacgaagtgatccccagctagagggccgggatgcagcagaggcttcgatggccccgcctcatctagttctgctcaatggggtggctaaagaaacaagtcgagcggccgctgccgaacctccagtgattgaactcggagcgcgcggcggacctggagggggcccagctggaggaggtggcgccgctagggacctgaagggaagagatgccgccactgcggaggccagacaccgcgttccaaccacggagttgtgtcgcccgcccggccccgcccctgcgcccgccccagcgtcagtcacggccgagcttccaggtgacggaaggatggtgcagctgtcccctcctgccttagccgcacccgctgcccccggaagagccttgctgtacagtctcagtcagcccctggcttccctggggtccgggttctttggcgagcccgacgctttccccatgttcacaaccaacaatagggtaaaaagaagaccgtctccatatgagatggaaatcactgacggcccccatacaaaggttgtcaggcgcatattcaccaattcacgcgaaagatggaggcagcaaaacgtgaacggtgcttttgccgagttaaggaagttaattcctacacacccccccgacaaaaagctctctaagaacgaaattctgcgtttggctatgaagtatatcaacttcttagccaaactgctgaatgatcaggaggaggagggtacccagcgcgctaaaactggtaaggaccctgtggtgggcgcaggaggaggcggaggagggggaggcgggggggccccacctgacgaccttttacaggatgttctttcccccaatagttcgtgtggttccagcctggatggagccgcttcaccagactcatacactgaagaacctgctccgaaacataccgcccgctcactgcatccagccatgctcccagcagcagacggagcaggaccccgatag

SEQ ID NO: 109347 - DNA, 996 bp, Artificial Sequence
  derived and/or modified sequence
atgacagagaggcctccttctgaggccgcccggagtgacccccagctggagggcagagatgctgctgaggcctccatggccccaccccacctggtgctgctgaatggagtggccaaggagaccagcagagctgctgctgctgagccccctgtgattgagctgggcgcccggggcggccctgggggcggccctgctgggggcggcggggccgcccgggacctgaagggcagagatgctgccacagctgaggcccggcaccgggtgcccaccacagagctgtgccggcccccaggccctgccccagccccagccccagcctctgtgacagctgagctgcctggagatggccgcatggtgcagctgagccccccagccctggccgccccagctgcccctggccgggccctgctgtacagcctgagccagcccctggccagcctgggcagcggcttcttcggggagccagatgccttccccatgttcaccaccaacaacagagtgaagagaagacccagcccctatgagatggagatcacagatggcccccacaccaaggtggtgcggcgcatcttcaccaacagccgggagcgctggaggcagcagaatgtgaatggagcctttgctgagctgaggaagctgatccccacccaccccccagacaagaagctgagcaagaatgagatcctgcggctggccatgaagtacatcaacttcctggccaagctgctgaatgaccaggaggaggagggcacccagagggccaagacaggcaaggaccctgtggtgggcgctgggggcggcggcggcggcggcggcggcggggcccccccagatgacctgctgcaggatgtgctgagccccaacagcagctgtggcagcagcctggatggagctgccagcccagacagctacacagaggagcccgcccccaagcacacagcccggagcctgcacccagccatgctgcctgctgctgatggagctggccccaggtag

SEQ ID NO: 109348 - DNA, 1002 bp, Artificial Sequence
  derived and/or modified sequence
atgacagagaggcctccttctgaggccgcccggagtgacccccagctggagggcagagatgctgctgaggcctccatggccccaccccacctggtgctgctgaatggagtggccaaggagaccagcagagctgctgctgctgagccccctgtgattgagctgggcgcccggggcggccctgggggcggccctgctgggggcggcggggccgcccgggacctgaagggcagagatgctgccacagctgaggcccggcaccgggtgcccaccacagagctgtgccggcccccaggccctgccccagccccagccccagcctctgtgacagctgagctgcctggagatggccgcatggtgcagctgagccccccagccctggccgccccagctgcccctggccgggccctgctgtacagcctgagccagcccctggccagcctgggcagccacagcggcttcttcggggagccagatgccttccccatgttcaccaccaacaacagagtgaagagaagacccagcccctatgagatggagatcacagatggcccccacaccaaggtggtgcggcgcatcttcaccaacagccgggagcgctggaggcagcagaatgtgaatggagcctttgctgagctgaggaagctgatccccacccaccccccagacaagaagctgagcaagaatgagatcctgcggctggccatgaagtacatcaacttcctggccaagctgctgaatgaccaggaggaggagggcacccagagggccaagacaggcaaggaccctgtggtgggcgctgggggcggcggcggcggcggcggcggcggggcccccccagatgacctgctgcaggatgtgctgagccccaacagcagctgtggcagcagcctggatggagctgccagcccagacagctacacagaggagcccgcccccaagcacacagcccggagcctgcacccagccatgctgcctgctgctgatggagctggccccaggtag

SEQ ID NO: 109349 - DNA, 996 bp, Artificial Sequence
  derived and/or modified sequence
atgaccgagcggccccccagcgaggccgcccggagcgacccccagctggagggcagagacgccgcggaggcttctatggcaccacctcatttggttttgcttaatggcgtggccaaagaaaccagtcgcgccgcagcagcagaaccccctgtcattgaactgggtgcccggggtggtcctggcggtggccctgctggtggcgggggggcggctagagatttaaagggccgcgacgctgccacggcagaagctagacacagggtacccacaaccgagctgtgtcggccccctgggccagctccagcgcctgctcctgcttctgtcactgccgagcttcccggcgacgggaggatggtccaactgtcccctccggcactagccgcccctgctgccccgggtagagccctgctttactcactgtcacagccgcttgcgtccctcggtagcggattcttcggcgagcctgacgcctttccgatgtttacaacaaataaccgggtgaaaaggcggccttcaccatacgaaatggaaatcactgacgggccgcacacaaaggtcgtgcgcagaatcttcaccaactcacgggagagatggcggcagcaaaatgtgaatggtgcgttcgccgaactcagaaagctgatccctacccatcctccagataagaaactgagtaagaatgaaatactgagactagcaatgaagtacatcaacttcctggctaaactcttgaacgaccaggaagaagagggcactcagcgagctaagactggaaaagatcccgtagtgggggctgggggcggaggaggtggcgggggaggtggcgctccccctgacgacctgctgcaggacgtgctgagccctaactcatcctgcggctcatccctggatggggctgccagcccagactcctatacggaagagccggcacccaagcacacggctagatccctgcatcccgccatgctcccagccgctgacggcgccggccctagatag

SEQ ID NO: 109350 - DNA, 1002 bp, Artificial Sequence
  derived and/or modified sequence
atgaccgagcggccccccagcgaggccgcccggagcgacccccagctggaaggacgagacgccgcagaggcgtccatggcaccgccccatttggtgctgctaaacggggtggctaaagaaacatccagggcggcagcggcagaaccgcccgtcatcgagttaggtgcacgcggaggaccaggcggtggcccagcgggcgggggcggagccgcgagagacttaaaggggagggacgctgctacagccgaggcaaggcaccgggtgcctaccacggaactgtgcagaccgcccggcccagcaccggcccctgctcccgctagcgttactgccgagctacctggtgacgggcgtatggtgcaactctcaccccctgcactggccgcccccgcagctccaggtcgggccctcttgtactccttgtctcagcccttggcctcactgggaagccatagtggcttctttggcgaaccagacgcttttcccatgtttactaccaataacagggtcaagcgccggccttcaccctacgagatggagattaccgacgggcctcacaccaaggtcgtaaggagaatcttcaccaactcacgagaacgctggaggcagcaaaacgtgaacggagcatttgcagagcttcggaaactgatacctactcaccctccggataaaaaactgtctaagaatgagattctgcgcctggccatgaaatacattaacttcctggccaaactcctgaatgatcaggaggaggaaggaacgcagagagccaaaacagggaaggaccccgtggttggggccggcggtgggggagggggaggtggagggggggccccaccggacgacctgctccaggatgtactctccccaaactcgtcttgtgggagctcgctggacggcgccgccagccccgactcctacactgaagagcccgcccctaaacataccgctcggagcctccacccagcaatgttacccgcggccgatggggcgggtccccgctag

SEQ ID NO: 109351 - DNA, 996 bp, Artificial Sequence
  derived and/or modified sequence
atgaccgagcggccccccagcgaggccgcccggagcgacccccagttggaaggacgggatgcggccgaggcctcaatggccccaccacacttggttctgttgaatggcgttgcgaaggagacctctcgtgccgctgcggccgaaccccctgtcatcgaactgggtgcccgaggtggccccgggggaggacctgccgggggagggggggcagctcgagatctgaagggccgagacgcagcaacagctgaagccagacaccgagtgcctacaacagaattgtgccgtccacccgggcccgcacctgcccccgcccccgccagcgtcactgcggaacttcccggggacggtagaatggtgcagctgagcccccctgctctggccgcacctgctgcccccggaagggccctcctctacagtctgagtcagcctcttgcatcactcgggtccggcttctttggggaacctgacgctttcccaatgtttaccacgaacaaccgcgtgaaacgacgccctagtccgtacgagatggaaattacggacggcccccacactaaggtggtcaggagaattttcacgaattcccgcgaacgatggagacagcagaatgtgaacggcgcttttgccgagttgcgtaaactcatccctacccacccgcctgacaagaaactgagcaagaacgaaatcctgaggcttgccatgaagtacatcaactttctcgccaaactcctgaatgatcaagaagaagagggaacacaacgggcaaagacaggtaaggacccagtcgtcggggctggagggggggggggaggcggaggaggaggggcaccccctgacgacctgcttcaggacgtgctgtccccaaacagctcttgtggaagcagcttagacggcgctgcctcccccgatagttacactgaagaacccgcccctaaacatactgcccgtagcctgcatccagccatgcttccggcggccgatggggctggccctcgctag

SEQ ID NO: 109352 - DNA, 996 bp, Artificial Sequence
  derived and/or modified sequence
atgaccgagaggccacctagtgaggcagccaggagtgacccacaactggaggggagggacgccgctgaggccagtatggctccacctcacctggtcctgttgaacggagttgcaaaggaaacctcccgggctgcagctgcagagcctcccgttatcgagctgggcgcaaggggaggtcccggaggaggaccagcgggagggggtggagctgccagggacctgaagggacgcgatgcagctaccgccgaagctcgccacagggtccctactaccgagctctgcagaccgcctggtccagcccctgccccagcgccagcaagtgtgacggcggaactaccgggtgacgggcgtatggtgcaactgtctcccccagctctggcagccccagcagcccctggaagagccctactctactctctgagtcagccactggcgtcactggggtctggcttttttggggagcctgacgcgtttcccatgtttaccacaaacaatagggtgaaacggaggccgtctccttacgagatggagattacagatggacctcataccaaggtggtacgcagaattttcaccaattctcgggagagatggagacagcagaatgtgaatggagcgttcgctgagctccgtaagctcattcctacgcacccacctgacaaaaagctgagcaagaacgagatactcaggcttgccatgaaatatatcaattttctagcaaaactgctgaacgatcaggaggaggagggcacacagagggcaaagaccggtaaagatcccgtagttggtgccggaggtggaggaggcggaggtggcggaggagctcccccagatgatctgttacaggacgtgctgagccctaactcttcctgcgggagttctttagatggcgctgccagccctgattcttatacagaagagcctgctcctaaacacactgcaagaagtttacatccagcaatgctgcctgctgccgatggcgcaggccctaggtag

SEQ ID NO: 109353 - DNA, 1002 bp, Artificial Sequence
  derived and/or modified sequence
atgacagagcggcctccctcggaggcagcgcgttcagacccacagttggagggtcgcgacgcggcagaggctagcatggcccctccacacctcgtgctgctgaacggcgtggcgaaagaaaccagccgagcagccgctgccgagccaccagttatagagttgggtgcgaggggcggacccggtggtggtcctgccggtgggggaggcgcagccagagatttgaaggggagggatgcagctactgccgaggctcgacacagggtgccaacaaccgaactatgtcgccctcctggtcctgccccagcacctgctcccgcttccgtgacagcggagctaccgggtgatggacgcatggtacagctgagccccccagctttagctgcaccggcagcacctggcagggcactactctattccctctcacagcccctcgcatctcttgggtctcactccgggttttttggcgaaccagacgccttcccaatgtttacaacaaataatcgagtaaagcgcaggccaagcccctatgagatggaaatcactgatggcccacacaccaaagtggtccgccgtatttttactaatagccgcgagcggtggaggcagcagaatgttaatggtgcattcgcagagctgcgaaagttgattcccacacatcctcctgataagaagttaagcaaaaacgagatcttacgcttggctatgaagtacataaactttcttgccaaactccttaacgatcaagaagaagagggcacacagcgggcaaaaaccggcaaggatccggttgttggcgcaggaggtgggggaggcggagggggagggggagcacccccagacgatttattacaggatgtactatcaccaaatagctcctgcggaagttctcttgacggagctgcctcccctgatagctatactgaagaacccgcacccaagcataccgctcgatcgctccacccggctatgctcccggctgccgatggcgctggtccgcgttag

SEQ ID NO: 109354 - DNA, 996 bp, Artificial Sequence
  derived and/or modified sequence
atgaccgagaggcccccttccgaagccgcaaggagcgatccccagctcgagggtagggacgccgctgaggccagcatggctccccctcatctggtgctcctcaacggcgtggctaaagagaccagccgcgcagctgccgcagagccccctgtgatcgagctaggcgcacgcggtggccctgggggtggaccagcaggcggaggtggggcagctagggacctcaaggggcgtgatgccgcaactgctgaggcccgacacagagtcccaactactgagctgtgtagacccccagggccagcaccagctcccgctccagcttccgtgacagcagagctgcccggtgatggcaggatggtccaacttagtcctcctgctctggccgctccagcagctccagggagggctctcttatattccttgtcccagcctctggctagtctcggctccgggttctttggtgaaccggatgcgtttccaatgtttaccactaataacagggtgaaacgccgaccttctccatacgagatggagatcaccgacggacctcacacaaaggtagtgcgtcggatctttactaattcccgggagaggtggagacagcaaaatgttaatggagccttcgccgagctccgaaagctgatccccacccatcctccggataaaaagcttagcaagaacgaaatactgcggctggccatgaagtatatcaattttctagccaaattgttgaatgatcaggaggaggaaggaacacagagagcgaagaccggcaaagaccccgtcgtaggcgctggtggaggcggtggcggaggtggaggaggtgcaccccctgacgacctgctccaggatgtgctttcaccaaattcatcttgtgggtcgagtttagacggcgctgcatcccctgattcatacacggaggagcctgcccctaaacacacggccagatccctgcaccccgcaatgttgcccgcagccgacggagccggtccaaggtag

SEQ ID NO: 109355 - protein, 375 aa, Artificial Sequence
  derived and/or modified sequence
MSSHKGSVVAQGNGAPASNREADTVELAELGPLLEEKGKRVIANPPKAEEEQTCPVPQEEEEEVRVLTLPLQAHHAMEKMEEFVYKVWEGRWRVIPYDVLPDWLKDNDYLLHGHRPPMPSFRACFKSIFRIHTETGNIWTHLLGFVLFLFLGILTMLRPNMYFMAPLQEKVVFGMFFLGAVLCLSFSWLFHTVYCHSEKVSRTFSKLDYSGIALLIMGSFVPWLYYSFYCSPQPRLIYLSIVCVLGISAIIVAQWDRFATPKHRQTRAGVFLGLGLSGVVPTMHFTIAEGFVKATTVGQMGWFFLMAVMYITGAGLYAARIPERFFPGKFDIWFQSHQIFHVLVVAAAFVHFYGVSNLQEFRYGLEGGCTDDTLL

SEQ ID NO: 109356 - protein, 171 aa, Artificial Sequence
  derived and/or modified sequence
MSSHKGSVVAQGNGAPASNREADTVELAELGPLLEEKGKRVIANPPKAEEEQTCPVPQEEEEEVRVLTLPLQAHHAMEKMEEFVYKVWEGRWRVIPYDVLPDWLKDNDYLLHGHRPPMPSFRACFKSIFRIHTETGNIWTHLLATAHLPLHRLCPGHFCHHCGAVGPVCHS

SEQ ID NO: 109357 - protein, 266 aa, Artificial Sequence
  derived and/or modified sequence
MSSHKGSVVAQGNGAPASNREADTVELAELGPLLEEKGKRVIANPPKAEEEQTCPVPQEEEEEVRVLTLPLQAHHAMEKMEEFVYKVWEGRWRVIPYDVLPDWLKDNDYLLHGHRPPMPSFRACFKSIFRIHTETGNIWTHLLGFVLFLFLGILTMLRPNMYFMAPLQEKVVFGMFFLGAVLCLSFSWLFHTVYCHSEKVSRTFSKLDYSGIALLIMGSFVPWLYYSFYCSPQPRLIYLSIVCVLGISAIIVAQWDRFATPKHRQT

SEQ ID NO: 109358 - protein, 205 aa, Artificial Sequence
  derived and/or modified sequence
MSSHKGSVVAQGNGAPASNREADTVELAELGPLLEEKGKRVIANPPKAEEEQTCPVPQEEEEEVRVLTLPLQAHHAMEKMEEFVYKVWEGRWRVIPYDVLPDWLKDNDYLLHGHRPPMPSFRACFKSIFRIHTETGNIWTHLLGFVLFLFLGILTMLRPNMYFMAPLQEKVVFGMFFLGAVLCLSFSWLFHTVYCHSEKVSRTFS

SEQ ID NO: 109359 - DNA, 1128 bp, Artificial Sequence
  derived and/or modified sequence
atgagcagtcataaaggcagtgtggtggcgcaggggaacggggctcctgccagcaaccgagaagccgacaccgtggaattggcagaactgggtccacttctcgaagaaaaaggcaagcgggtgatcgctaaccctcctaaagctgaagaggaacaaacctgcccagttcctcaggaggaggaggaggaagtccgagtcttgaccctccccctgcaagctcatcatgccatggagaagatggaagagttcgtttacaaggtttgggagggtaggtggcgcgtcataccttacgatgttctccctgactggcttaaggataatgactatttgctgcacggacatcgcccccctatgccatcattcagagcctgtttcaagtctattttcaggatccatacggaaaccgggaatatctggacgcacctcctcgggtttgtgttgttcctcttcctgggaatcctgacaatgctgcggccgaacatgtactttatggctccactccaagaaaaagtggtgttcgggatgttctttttaggggcagtgttatgcctgtcctttagttggctttttcacacagtgtactgtcacagtgaaaaagtcagtcgcactttttctaagttagactattcagggattgccctattgattatggggtcgtttgtgccgtggctgtactatagtttttactgctcccctcagccccggctaatttacctctcaatcgtatgtgtactgggcatctcagccattatcgtcgcccagtgggacagatttgccaccccaaaacatcgacagactcgggccggggtgtttctcgggctgggactgtcgggagtcgtgcccacaatgcacttcactatcgccgagggctttgtaaaggctacaaccgtgggacaaatggggtggttttttctgatggccgttatgtatataacgggagcagggttatatgcagcacggataccggagagattcttcccaggcaaattcgacatctggtttcagtcccaccagattttccacgtgctggtggtcgcggccgcattcgtacatttctacggcgtgtctaatctgcaagagtttcggtatggcctggagggggggtgcacagacgacacactgctgtag

SEQ ID NO: 109360 - DNA, 516 bp, Artificial Sequence
  derived and/or modified sequence
atgtcatctcacaaggggtcagtagtagcccagggtaatggtgcccccgcctccaatcgtgaggccgacaccgtagagctcgcagagctcgggccattattagaggaaaagggcaaaagggttatagcgaacccacctaaagcggaagaagaacaaacttgccccgtgccccaggaagaagaagaagaggtgagggtactaactttaccactgcaagctcatcatgcaatggagaagatggaggagtttgtgtacaaggtgtgggaggggcgatggcgcgtgattccctacgacgtccttccggactggttgaaggataacgattatctactgcatggacataggccgcctatgcccagctttcgagcctgctttaagtcaattttcagaatccacacggagaccgggaatatttggactcatctgctcgctaccgcgcatctgccgcttcatagactgtgccccggtcacttctgccaccattgtggcgcggtcggacccgtgtgtcattcttag

SEQ ID NO: 109361 - DNA, 801 bp, Artificial Sequence
  derived and/or modified sequence
atgtccagtcacaaggggtccgtcgtggcccagggcaacggggcccctgctagcaatcgcgaagccgacaccgtagaactggcagaactgggaccacttctggaagagaagggaaagagggtaattgccaatcctcccaaggctgaggaggaacagacatgccctgtgcctcaagaagaagaggaggaggtaagggtcctgactttaccactccaagcgcatcacgcgatggagaagatggaggagttcgtttataaggtctgggaggggaggtggagagtcatcccatatgatgttttgccggactggctcaaagataacgattatcttcttcacggacatcgcccccccatgccctcttttagagcctgttttaagagcatattcagaattcataccgaaacgggaaacatatggacacacctgctgggcttcgtgctgttcctcttcctcggaatacttacgatgctgcggcccaatatgtacttcatggctcctctgcaggagaaagtggtctttggcatgttttttttaggcgccgtcctgtgcctttccttttcttggctcttccatactgtatattgtcactccgaaaaggtttcacggaccttcagtaagcttgactattcaggcattgctttgcttatcatgggcagctttgtcccttggctgtactactctttttactgttcccctcaaccgcggttgatatacctgtcgattgtttgcgtgttaggcattagtgcgataatcgtggctcagtgggaccggtttgcgacccctaagcacagacaaacttag

SEQ ID NO: 109362 - DNA, 618 bp, Artificial Sequence
  derived and/or modified sequence
atgagctcccataaaggttctgtcgtcgctcagggtaatggtgccccagccagtaatagagaggcagataccgtggaacttgcagaattaggtcctctccttgaggaaaagggtaaacgagtcattgccaatcccccgaaggctgaggaggagcagacctgtcccgttcctcaggaagaggaagaggaagttcgagtcctgaccctccccttacaggcgcaccacgctatggagaagatggaggaatttgtttacaaggtgtgggaaggcaggtggagagtgatcccatacgatgtgcttccagattggctcaaagacaatgactacctgttacatggccaccggcccccaatgccaagctttcgtgcctgctttaagtccatctttaggattcatactgaaactgggaatatttggactcacctgttaggcttcgtactgtttctatttctgggcatcctcactatgctacggcctaatatgtactttatggcccctctacaagagaaagtagtcttcgggatgtttttcctgggggctgtgctgtgtctcagcttcagctggctgttccatactgtctactgccactccgaaaaagtatcacggaccttttcttag

SEQ ID NO: 109363 - DNA, 1128 bp, Artificial Sequence
  derived and/or modified sequence
atgagttctcacaagggctctgtcgtggcacaagggaacggggccccggcatccaatagagaggctgacacagtggaactcgctgagttgggcccactgctggaggaaaagggaaaaagggttatcgctaacccccctaaggcggaagaggaacagacgtgtcctgtgcctcaggaagaggaggaggaggttcgcgtgcttactttacctctgcaggcccatcatgccatggaaaagatggaagaatttgtgtataaggtttgggaaggccgctggagggtgatcccttacgatgtgctccccgattggcttaaggataacgattacctgctccacggccacagaccgcctatgcctagctttcgggcctgctttaagagcattttcagaattcatacagagacggggaacatctggacccacctcctagggttcgtcctattcctcttcctgggaattctcaccatgcttcggccaaatatgtacttcatggctcccctccaagaaaaagtcgtgttcggcatgttttttcttggtgctgtgctgtgcctcagtttctcttggctttttcacactgtgtattgtcacagcgaaaaagttagtcgcaccttctccaaactggactatagcgggattgccttactgattatgggatctttcgtgccttggttgtactattccttctattgttcgcctcagccacggctcatttacctgtcaattgtgtgtgttcttgggatatcggctattattgtggcacagtgggatcgttttgcaacacctaagcataggcaaacacgcgcaggagtttttttgggcctgggcctcagcggagtcgtccccactatgcactttactattgccgagggcttcgtgaaagcgaccacagtcgggcagatgggctggttcttcctcatggctgttatgtacatcacaggggccgggctgtatgcagcaaggatacccgaaaggttttttccgggcaagtttgacatttggttccaaagccatcagatttttcatgtgctggtggtggcagcagccttcgtccatttttacggcgtgtctaacctgcaggagtttcgatacggcttagagggcgggtgcacagatgatacattgctgtag

SEQ ID NO: 109364 - DNA, 2177 bp, Artificial Sequence
  derived and/or modified sequence
ctccgcgagagggcctaggattggagggcccaggcagagcccgcgaggaggtgacgcggctgcggaggtgacgcgggaggtcgcgcgccccttccggcgcggggagggcgctgaagatcggggccgctcggccgcaggccgcctccagcgccgcgggatgtagcgcgggggaccgcggcccccagcagagcccgcctgcccggcttgtctaccatcagagggagatctctgccccctggggctgagagaccccaacctttccccaagctgaagctgcagggtattgaggtaccagccagatgtcttcccacaaaggatctgtggtggcacaggggaatggggctcctgccagtaacagggaagctgacacggtggaactggctgaactgggacccctgctagaagagaagggcaaacgggtaatcgccaacccacccaaagctgaagaagagcaaacatgcccagtgccccaggaagaagaggaggaggtgcgggtactgacacttcccctgcaagcccaccacgccatggagaagatggaagagtttgtgtacaaggtctgggagggacgttggagggtcatcccatatgatgtgctccctgactggctaaaggacaacgactatctgctacatggtcatagacctcccatgccctcctttcgggcttgcttcaagagcatcttccgcattcatacagaaactggcaacatctggacccatctgcttggtttcgtgctgtttctctttttgggaatcttgaccatgctcagaccaaatatgtacttcatggcccctctacaggagaaggtggtttttgggatgttctttttgggtgcagtgctctgcctcagcttctcctggctctttcacaccgtctattgtcattcagagaaagtctctcggactttttccaaactggactattcagggattgctcttctaattatggggagctttgtcccctggctctattattccttctactgctccccacagccacggctcatctacctctccatcgtctgtgtcctgggcatttctgccatcattgtggcgcagtgggaccggtttgccactcctaagcaccggcagacaagagcaggcgtgttcctgggacttggcttgagtggcgtcgtgcccaccatgcactttactatcgctgagggctttgtcaaggccaccacagtgggccagatgggctggttcttcctcatggctgtgatgtacatcactggagctggcctttatgctgctcgaattcctgagcgcttctttcctggaaaatttgacatatggttccagtctcatcagattttccatgtcctggtggtggcagcagcctttgtccacttctatggagtctccaaccttcaggaattccgttacggcctagaaggcggctgtactgatgacacccttctctgagccttcccacctgcggggtggaggaggaacttcccaagtgcttttaaaaataacttctttgctgaagtgagaggaagagtctgagttgtctgtttctagaagaaacctcttagagaattcagtaccaaccaagcttcagcccactttcacacccactgggcaataaactttccatttccattctcctagctggggatggggcatggtcaaacttagccatcccctcctcagcaaggcatctaccggcccctcacagagacagtactttgaaactcatgttgagattttaccctctcctccaaccattttgggaaaattatggactgggactcttcagaaattctgtcttttcttctggaagaaaatgtccctcccttacccccatccttaactttgtatcctggcttataacaggccatccatttttgtagcacacttttcaaaaacaattatataccctggtcccatctttctagggcctggatctgcttatagagcaggaagaataaagccaccaacttttacctagcccggctaatcatggaagtgtgtccaggcttcaagtaacttgagttttaattttttttttttcttggcagagtaatgtaaaatttaaatggggaaagatatttaatatttaatactaagctttaaaaagaaacctgctatcattgctatgtatcttgatgcaaagactatgatgttaataaaagaaagtacagaagacacttggcattcaaagatttcaca

SEQ ID NO: 109365 - DNA, 715 bp, Artificial Sequence
  derived and/or modified sequence
ggggagggcgctgaagatcggggccgctcggccgcaggccgcctccagcgccgcgggatgtagcgcgggggaccgcggcccccagcagagcccgcctgcccggcttgtctaccatcagagggagatctctgccccctggggctgagagaccccaacctttccccaagctgaagctgcagggtattgaggtaccagccagatgtcttcccacaaaggatctgtggtggcacaggggaatggggctcctgccagtaacagggaagctgacacggtggaactggctgaactgggacccctgctagaagagaagggcaaacgggtaatcgccaacccacccaaagctgaagaagagcaaacatgcccagtgccccaggaagaagaggaggaggtgcgggtactgacacttcccctgcaagcccaccacgccatggagaagatggaagagtttgtgtacaaggtctgggagggacgttggagggtcatcccatatgatgtgctccctgactggctaaaggacaacgactatctgctacatggtcatagacctcccatgccctcctttcgggcttgcttcaagagcatcttccgcattcatacagaaactggcaacatctggacccatctgcttgccacggctcatctacctctccatcgtctgtgtcctgggcatttctgccatcattgtggcgcagtgggaccggtttgccactcctaa

SEQ ID NO: 109366 - DNA, 1058 bp, Artificial Sequence
  derived and/or modified sequence
atcacgcacttcaggctgcgataacgaggtggagtgtagaatccgacgaacgtcctctaccccggggcgggtggaggttacctggctgcggcggggagtttagaagaccaaactggacaatggactttgctcactatgatgacatgatctccattgacctccatttgtctaccatcagagggagatctctgccccctggggctgagagaccccaacctttccccaagctgaagctgcagggtattgaggtaccagccagatgtcttcccacaaaggatctgtggtggcacaggggaatggggctcctgccagtaacagggaagctgacacggtggaactggctgaactgggacccctgctagaagagaagggcaaacgggtaatcgccaacccacccaaagctgaagaagagcaaacatgcccagtgccccaggaagaagaggaggaggtgcgggtactgacacttcccctgcaagcccaccacgccatggagaagatggaagagtttgtgtacaaggtctgggagggacgttggagggtcatcccatatgatgtgctccctgactggctaaaggacaacgactatctgctacatggtcatagacctcccatgccctcctttcgggcttgcttcaagagcatcttccgcattcatacagaaactggcaacatctggacccatctgcttggtttcgtgctgtttctctttttgggaatcttgaccatgctcagaccaaatatgtacttcatggcccctctacaggagaaggtggtttttgggatgttctttttgggtgcagtgctctgcctcagcttctcctggctctttcacaccgtctattgtcattcagagaaagtctctcggactttttccaaactggactattcagggattgctcttctaattatggggagctttgtcccctggctctattattccttctactgctccccacagccacggctcatctacctctccatcgtctgtgtcctgggcatttctgccatcattgtggcgcagtgggaccggtttgccactcctaagcaccggcagacaa

SEQ ID NO: 109367 - DNA, 879 bp, Artificial Sequence
  derived and/or modified sequence
agggcgctgaagatcggggccgctcggccgcaggccgcctccagcgccgcgggatgtagcgcgggggaccgcggcccccagcagagcccgcctgcccggcttttagaagaccaaactggacaatggactttgctcactatgatgacatgatctccattgacctccatttgtctaccatcagagggagatctctgccccctggggctgagagaccccaacctttccccaagctgaagctgcagggtattgaggtaccagccagatgtcttcccacaaaggatctgtggtggcacaggggaatggggctcctgccagtaacagggaagctgacacggtggaactggctgaactgggacccctgctagaagagaagggcaaacgggtaatcgccaacccacccaaagctgaagaagagcaaacatgcccagtgccccaggaagaagaggaggaggtgcgggtactgacacttcccctgcaagcccaccacgccatggagaagatggaagagtttgtgtacaaggtctgggagggacgttggagggtcatcccatatgatgtgctccctgactggctaaaggacaacgactatctgctacatggtcatagacctcccatgccctcctttcgggcttgcttcaagagcatcttccgcattcatacagaaactggcaacatctggacccatctgcttggtttcgtgctgtttctctttttgggaatcttgaccatgctcagaccaaatatgtacttcatggcccctctacaggagaaggtggtttttgggatgttctttttgggtgcagtgctctgcctcagcttctcctggctctttcacaccgtctattgtcattcagagaaagtctctcggactttttccaa

SEQ ID NO: 109368 - DNA, 2125 bp, Artificial Sequence
  derived and/or modified sequence
atcacgcacttcaggctgcgataacgaggtggagtgtagaatccgacgaacgtcctctaccccggggcgggtggaggttacctggctgcggcggggagtttagaagaccaaactggacaatggactttgctcactatgatgacatgatctccattgacctccatttgtctaccatcagagggagatctctgccccctggggctgagagaccccaacctttccccaagctgaagctgcagggtattgaggtaccagccagatgtcttcccacaaaggatctgtggtggcacaggggaatggggctcctgccagtaacagggaagctgacacggtggaactggctgaactgggacccctgctagaagagaagggcaaacgggtaatcgccaacccacccaaagctgaagaagagcaaacatgcccagtgccccaggaagaagaggaggaggtgcgggtactgacacttcccctgcaagcccaccacgccatggagaagatggaagagtttgtgtacaaggtctgggagggacgttggagggtcatcccatatgatgtgctccctgactggctaaaggacaacgactatctgctacatggtcatagacctcccatgccctcctttcgggcttgcttcaagagcatcttccgcattcatacagaaactggcaacatctggacccatctgcttggtttcgtgctgtttctctttttgggaatcttgaccatgctcagaccaaatatgtacttcatggcccctctacaggagaaggtggtttttgggatgttctttttgggtgcagtgctctgcctcagcttctcctggctctttcacaccgtctattgtcattcagagaaagtctctcggactttttccaaactggactattcagggattgctcttctaattatggggagctttgtcccctggctctattattccttctactgctccccacagccacggctcatctacctctccatcgtctgtgtcctgggcatttctgccatcattgtggcgcagtgggaccggtttgccactcctaagcaccggcagacaagagcaggcgtgttcctgggacttggcttgagtggcgtcgtgcccaccatgcactttactatcgctgagggctttgtcaaggccaccacagtgggccagatgggctggttcttcctcatggctgtgatgtacatcactggagctggcctttatgctgctcgaattcctgagcgcttctttcctggaaaatttgacatatggttccagtctcatcagattttccatgtcctggtggtggcagcagcctttgtccacttctatggagtctccaaccttcaggaattccgttacggcctagaaggcggctgtactgatgacacccttctctgagccttcccacctgcggggtggaggaggaacttcccaagtgcttttaaaaataacttctttgctgaagtgagaggaagagtctgagttgtctgtttctagaagaaacctcttagagaattcagtaccaaccaagcttcagcccactttcacacccactgggcaataaactttccatttccattctcctagctggggatggggcatggtcaaacttagccatcccctcctcagcaaggcatctaccggcccctcacagagacagtactttgaaactcatgttgagattttaccctctcctccaaccattttgggaaaattatggactgggactcttcagaaattctgtcttttcttctggaagaaaatgtccctcccttacccccatccttaactttgtatcctggcttataacaggccatccatttttgtagcacacttttcaaaaacaattatataccctggtcccatctttctagggcctggatctgcttatagagcaggaagaataaagccaccaacttttacctagcccggctaatcatggaagtgtgtccaggcttcaagtaacttgagttttaattttttttttttcttggcagagtaatgtaaaatttaaatggggaaagatatttaatatttaatactaagctttaaaaagaaacctgctatcattgctatgtatcttgatgcaaagactatgatgttaataaaagaaagtacagaagacacttggcattc

SEQ ID NO: 109369 - DNA, 1128 bp, Artificial Sequence
  derived and/or modified sequence
atgagcagccacaagggctctgtggtggcccagggcaatggagccccagccagcaaccgggaggccgacacagtggagctggccgagctgggccccctgctggaggagaagggcaagagggtcatcgccaacccccccaaggccgaggaggagcagacctgccctgtgccccaggaggaggaggaggaggtgcgggtgctgaccctgcccctgcaggcccaccacgccatggagaagatggaggagtttgtgtacaaggtgtgggagggccgctggagggtcatcccctatgatgtgctgcctgactggctgaaggacaatgactacctgctgcacggccaccggccccccatgcccagcttccgggcctgcttcaagagcatcttccgcatccacacagaaacaggcaacatctggacccacctgctgggctttgtgctcttcctgttcctgggcatcctgaccatgctgcggcccaacatgtacttcatggcccccctgcaggagaaggtggtgtttggcatgttcttcctgggcgctgtgctgtgcctgtccttctcctggctgttccacacagtgtactgccacagcgagaaggtgtccaggaccttcagcaagctggactacagcggcatcgccctgctgatcatgggcagctttgtgccctggctgtactacagcttctactgcagcccccagcccaggctcatctacctgagcatcgtgtgtgtgctgggcatcagcgccatcatcgtggcccagtgggacagatttgccacccccaagcaccggcagacccgggccggggtcttcctgggcctgggcctgtctggagtggtgcccaccatgcacttcaccatcgccgagggctttgtgaaggccaccaccgtgggccagatgggctggttcttcctgatggctgtgatgtacatcaccggggccggcctgtatgctgcccgcatccctgagcgcttcttccctgggaagtttgacatctggttccagagccaccagatcttccacgtgctggtggtggccgccgcctttgtgcacttctatggagtgagcaacctgcaggagttccgctatggcctggagggcggctgcacagatgacaccctgctgtag

SEQ ID NO: 109370 - DNA, 516 bp, Artificial Sequence
  derived and/or modified sequence
atgagcagccacaagggctctgtggtggcccagggcaatggagccccagccagcaaccgggaggccgacacagtggagctggccgagctgggccccctgctggaggagaagggcaagagggtcatcgccaacccccccaaggccgaggaggagcagacctgccctgtgccccaggaggaggaggaggaggtgcgggtgctgaccctgcccctgcaggcccaccacgccatggagaagatggaggagtttgtgtacaaggtgtgggagggccgctggagggtcatcccctatgatgtgctgcctgactggctgaaggacaatgactacctgctgcacggccaccggccccccatgcccagcttccgggcctgcttcaagagcatcttccgcatccacacagaaacaggcaacatctggacccacctgctggccacagcccacctgcccctgcaccggctgtgccccggccacttctgccaccactgtggggctgtgggccctgtgtgccacagctag

SEQ ID NO: 109371 - DNA, 801 bp, Artificial Sequence
  derived and/or modified sequence
atgagcagccacaagggctctgtggtggcccagggcaatggagccccagccagcaaccgggaggccgacacagtggagctggccgagctgggccccctgctggaggagaagggcaagagggtcatcgccaacccccccaaggccgaggaggagcagacctgccctgtgccccaggaggaggaggaggaggtgcgggtgctgaccctgcccctgcaggcccaccacgccatggagaagatggaggagtttgtgtacaaggtgtgggagggccgctggagggtcatcccctatgatgtgctgcctgactggctgaaggacaatgactacctgctgcacggccaccggccccccatgcccagcttccgggcctgcttcaagagcatcttccgcatccacacagaaacaggcaacatctggacccacctgctgggctttgtgctcttcctgttcctgggcatcctgaccatgctgcggcccaacatgtacttcatggcccccctgcaggagaaggtggtgtttggcatgttcttcctgggcgctgtgctgtgcctgtccttctcctggctgttccacacagtgtactgccacagcgagaaggtgtccaggaccttcagcaagctggactacagcggcatcgccctgctgatcatgggcagctttgtgccctggctgtactacagcttctactgcagcccccagcccaggctcatctacctgagcatcgtgtgtgtgctgggcatcagcgccatcatcgtggcccagtgggacagatttgccacccccaagcaccggcagacctag

SEQ ID NO: 109372 - DNA, 618 bp, Artificial Sequence
  derived and/or modified sequence
atgagcagccacaagggctctgtggtggcccagggcaatggagccccagccagcaaccgggaggccgacacagtggagctggccgagctgggccccctgctggaggagaagggcaagagggtcatcgccaacccccccaaggccgaggaggagcagacctgccctgtgccccaggaggaggaggaggaggtgcgggtgctgaccctgcccctgcaggcccaccacgccatggagaagatggaggagtttgtgtacaaggtgtgggagggccgctggagggtcatcccctatgatgtgctgcctgactggctgaaggacaatgactacctgctgcacggccaccggccccccatgcccagcttccgggcctgcttcaagagcatcttccgcatccacacagaaacaggcaacatctggacccacctgctgggctttgtgctcttcctgttcctgggcatcctgaccatgctgcggcccaacatgtacttcatggcccccctgcaggagaaggtggtgtttggcatgttcttcctgggcgctgtgctgtgcctgtccttctcctggctgttccacacagtgtactgccacagcgagaaggtgtccaggaccttctcctag

SEQ ID NO: 109373 - DNA, 1128 bp, Artificial Sequence
  derived and/or modified sequence
atgagcagccacaagggcagcgtggtggcccagggcaacggcgcccccgcaagtaatcgggaggccgacaccgtggaacttgccgagctaggacctctgctggaggagaagggcaaaagggttatagccaaccctccaaaggctgaggaggagcagacatgtcccgtgccacaggaggaagaggaggaggtacgagtgctgactctgccgcttcaggcccatcatgcaatggagaagatggaagaattcgtgtataaagtatgggaaggaagatggcgcgttattccgtacgatgttctgcctgactggctgaaggacaacgattatctgctccacggccaccggccacctatgccatctttccgggcatgctttaaaagcatcttcagaatccatacagaaactgggaatatctggacccacctgctgggcttcgttctgttcctatttctgggcatcctgaccatgctgagaccaaatatgtatttcatggccccgctgcaggagaaggtggtgttcggtatgttttttttaggcgccgtgttgtgcctgtctttctcatggctgtttcacacagtctactgccattccgagaaagtctcaagaactttttccaagctggactacagcggtattgcactcttgattatggggtcattcgtcccctggttgtattacagtttttactgcagcccacagcccagacttatctacctgtccatcgtttgcgtgctggggatctccgccattatagtggctcaatgggatcggttcgcaacaccgaagcataggcagaccagagcgggagtgtttcttggcctgggcctgtccggagtcgttccaactatgcactttactatcgcagaaggcttcgttaaagcgacgactgtggggcaaatgggttggttcttcctgatggcagtcatgtacatcaccggcgcaggcctctatgcagcccgtatcccagagcggttcttccctggaaagtttgacatttggtttcagtcacatcagattttccacgtcctggtcgtggcggccgcttttgtccacttctatggagtcagcaatcttcaggagttcagatacggcctcgagggggggtgtacagacgatacacttttatag

SEQ ID NO: 109374 - DNA, 516 bp, Artificial Sequence
  derived and/or modified sequence
atgagcagccacaagggcagcgtggtggcccagggcaacggcgcccctgcaagcaatcgtgaggctgacacagtcgaactcgccgaactggggcctctgctggaggaaaagggtaagcgggtgatagcaaatcccccgaaagcggaggaggaacagacatgcccagtgccacaggaggaggaggaggaggtgcgagtgctgacacttccactccaagcccaccacgccatggagaaaatggaggagttcgtgtacaaagtgtgggagggaagatggcgggtcatcccttacgatgtcctgccagattggctgaaggataatgattacctgctgcacgggcacagacctcccatgccttctttccgggcctgcttcaagtccatttttcgcatccacacagagaccggtaacatctggacccacttgcttgccaccgcccacttacccctgcaccggttgtgcccaggacatttctgtcaccattgtggcgctgtggggcctgtctgccattcctag

SEQ ID NO: 109375 - DNA, 801 bp, Artificial Sequence
  derived and/or modified sequence
atgagcagccacaagggcagcgtggtggcccagggcaacggcgccccagcctctaatcgagaggccgacactgttgaactggcagagctgggcccgctgctcgaggagaaaggcaaaagagtcattgcgaaccccccgaaggccgaggaggaacaaacatgtcccgtcccccaggaggaggaggaggaggtccgggttttaacacttccattacaggcacatcacgccatggagaagatggaagaatttgtgtacaaggtgtgggaggggcgctggcgggtgattccctacgatgtgctaccagattggctgaaagacaatgattacctgctgcacggccaccgtcctccgatgccaagttttcgcgcgtgctttaagtccatctttaggatccacacagaaaccgggaacatatggactcacctgttgggcttcgttctctttctgttcctgggaatccttaccatgctgagacccaatatgtattttatggcaccgttgcaggagaaggtggtgttcgggatgttcttcctgggcgctgtcctgtgcctgagcttcagttggcttttccacacagtgtattgccacagcgagaaagtttcccggacgttttccaaactggattattctgggatagctctattaatcatgggcagctttgtcccttggctgtactatagtttctattgcagtcctcagccacggctcatttacctatcaattgtctgtgtgctcggcatcagcgccatcatcgttgcccaatgggacagattcgcaacacccaagcatcggcaaacatag

SEQ ID NO: 109376 - DNA, 618 bp, Artificial Sequence
  derived and/or modified sequence
atgagcagccacaagggcagcgtggtggcccagggcaacggcgcccccgccagcaaccgtgaggctgatacagtcgagcttgctgagctcggcccactgttagaagaaaaagggaaacgcgtcatagccaatccccccaaagcagaagaagaacagacctgtcccgtaccccaggaagaagaggaagaggtcagggtactaacgctaccacttcaggcccaccatgccatggagaaaatggaagaattcgtgtataaagtgtgggagggacggtggagagtaattccatacgatgttctcccagactggttgaaggacaacgactaccttctgcacggccatagaccccctatgccaagctttcgtgcttgctttaaatctatcttccgaattcatactgaaaccggcaatatctggacccacctgctgggtttcgttctttttttgtttcttggcatccttactatgcttcgacccaacatgtattttatggcacctctgcaagaaaaggttgtttttggaatgttttttctgggagccgttctatgcctgtccttctcgtggctctttcatacagtatattgtcactctgagaaagttagccgcaccttcagctag

SEQ ID NO: 109377 - DNA, 1128 bp, Artificial Sequence
  derived and/or modified sequence
atgagcagccacaagggcagcgtggtggcccagggcaacggcgccccagcttccaacagagaggcggacacagtcgaactcgcggagctaggacctctgctagaggagaagggtaagagagtcatcgcaaatcccccgaaagcagaagaggagcaaacttgccccgtgccacaggaagaggaggaggaggttcgagtgctgaccttaccccttcaggctcaccacgccatggagaaaatggaggagtttgtgtacaaagtctgggagggcaggtggagagtgattccctatgacgtgctccctgactggctcaaggacaacgactatttgctgcacggccacaggccacccatgccgtcattccgagcctgttttaagtcaatctttagaattcatacagaaaccgggaacatttggacccatctcctcgggtttgtgctatttttgtttctcggcattctgaccatgcttcgccccaatatgtacttcatggcgccattacaagagaaggtggtgtttggaatgttctttttaggggctgttctgtgcctgagcttctcctggctctttcataccgtgtactgtcactccgagaaggtcagtaggacattctccaaattagactacagtggcatcgcactcctcattatgggaagcttcgtgccttggctgtactacagtttctactgtagcccccaaccccgactgatctatctgtctattgtgtgtgttcttggcataagtgctatcattgtagcccagtgggaccgattcgcaacgcccaaacaccgacagacccgagccggagtgttcctgggcttggggctgtccggagtggttcctaccatgcacttcactatcgccgaaggctttgtgaaggccaccactgttggacagatgggatggttctttctcatggctgtgatgtacattaccggagccggactatatgcggcacgcatccccgagcggttctttcccggtaagttcgatatctggttccagtcccatcaaattttccacgttctcgtggttgccgccgccttcgtacatttttatggcgtgagcaacctgcaagaatttaggtacggcctcgaagggggatgcacagatgacactctactttag

SEQ ID NO: 109378 - DNA, 1128 bp, Artificial Sequence
  derived and/or modified sequence
atgtcctcccataagggatcggtcgtggcacaaggaaatggggctccagcaagcaatagagaagccgatactgtcgagctggcagagctgggcccattattggaggagaagggcaagagggtcatcgcaaacccccctaaggctgaggaggagcagacttgtcctgtgccccaggaagaagaagaggaagtgcgcgtattgaccttgcccctacaagcacaccacgcgatggagaaaatggaggagttcgtctacaaggtttgggaaggacggtggagggtgattccttacgatgtgctgccggattggctaaaggataatgactacctcttacacggccaccgccctcccatgccctcgttcagagcttgctttaaatcaatctttcgtatccataccgagacggggaatatctggacgcaccttctcggctttgtgctcttccttttcttgggcattctgacaatgctgcggccaaacatgtacttcatggccccattacaggaaaaagtggtgttcggcatgtttttcctgggagcagttctgtgcttgtcattttcctggctcttccacactgtctattgtcactctgagaaggtctctagaaccttttccaaactggactatagtggcatcgccttattgatcatgggttcattcgtcccatggctctattatagcttctattgttctcctcaaccaaggcttatttatttaagtatcgtgtgcgttctgggtatcagtgctattattgtcgcacagtgggatcgcttcgccactcccaaacaccgccagacacgcgcaggagtgttcttgggtctaggcttaagcggagtggtgccaaccatgcacttcacaatcgcagaaggcttcgtcaaggctactacagtgggccagatggggtggttttttttgatggcggttatgtacataacaggggcaggcctgtatgcagcccgtatccctgagcgatttttcccgggaaaatttgatatctggttccagagtcatcagatcttccatgtgctggtggtcgcagcagccttcgtacatttttacggtgtgtccaatctgcaggaattccggtacgggctggaggggggttgcaccgacgacaccctcttgtag

SEQ ID NO: 109379 - DNA, 516 bp, Artificial Sequence
  derived and/or modified sequence
atgagttcccacaaaggtagtgtggtcgctcagggcaacggcgcacccgcttctaacagggaagccgataccgttgagctggccgagcttggaccattgcttgaggagaaggggaagagggtaattgccaacccaccgaaggcggaggaggagcagacatgcccggtgccccaggaggaggaagaagaggtccgcgtccttacactgccactgcaagctcatcacgccatggagaagatggaagaatttgtgtacaaagtctgggaggggaggtggcgggtcatcccttacgacgtattgcctgactggctcaaagataatgactatctgctgcacgggcaccgccctcccatgcccagttttcgcgcttgctttaagagtatctttagaatccataccgagaccgggaacatctggactcacctgctcgctactgcccacctcccactgcatagactctgtccgggacacttctgtcatcattgtggggctgtgggtccagtgtgtcatagctag

SEQ ID NO: 109380 - DNA, 801 bp, Artificial Sequence
  derived and/or modified sequence
atgtcttcccacaaagggagcgttgtggcgcaaggaaacggcgctcccgcaagtaacagagaagccgacacagtggaacttgcagaactgggcccattacttgaggaaaaagggaagcgtgtgatcgccaaccccccaaaggctgaggaagagcaaacctgcccagtcccccaggaagaagaggaggaagtgagagtcctaactctgcctctccaagcacaccatgccatggagaagatggaggagtttgtgtacaaggtatgggagggtcgctggagagtgatcccatacgatgtgctcccagactggctcaaagacaatgattacctcctccacggccacaggccgcctatgccctcgttccgcgcttgtttcaagagcattttccgtatccacactgagactggaaatatctggacacacctgctcggctttgttctcttcctgtttttggggatcctgaccatgctgcgccctaacatgtatttcatggcgccactgcaggagaaagttgtgttcggcatgtttttcttaggtgctgtattgtgcctatcattcagctggctgttccacaccgtgtactgtcactctgagaaagtcagtcgcactttcagtaaactagattattccggaatcgcactgctgataatgggatccttcgtcccatggctgtattattctttctactgtagccctcagccgaggctaatctatctcagtatcgtgtgcgtactgggcatatccgcaatcatcgtggctcagtgggacagatttgctactcccaaacatagacagacgtag

SEQ ID NO: 109381 - DNA, 618 bp, Artificial Sequence
  derived and/or modified sequence
atgagctcccacaaaggctctgttgtggcccagggaaatggcgcaccagccagcaaccgggaggccgacaccgtggagttggctgagctgggcccactgctggaagagaaaggaaagcgtgtgatcgctaatccacctaaagcggaagaggagcagacctgtcccgttcctcaagaagaggaggaagaggtgagggtgctcaccttaccgctccaggctcatcacgccatggagaagatggaagaatttgtctacaaggtgtgggagggcagatggcgcgtgattccttatgacgtattgcccgattggctgaaagacaacgactaccttcttcatgggcataggcctcccatgccttccttccgcgcatgctttaaatctatattccgtattcatacagagactggcaacatctggacccatctgctgggttttgtcttattcctattcctagggattcttacaatgctgaggcccaacatgtatttcatggctcccctgcaggaaaaggtggtctttggaatgttttttctcggagctgttttatgcctttccttcagctggcttttccatactgtgtactgtcattcagagaaagtctctcggactttctcctag

SEQ ID NO: 109382 - DNA, 1128 bp, Artificial Sequence
  derived and/or modified sequence
atgagctcccacaagggaagcgtggtggcccaaggcaacggggcaccggcttccaatcgagaagctgacactgtcgagctcgcagaattggggcctttgctggaagagaaagggaagcgggtgattgctaacccaccaaaagcagaagaagagcagacttgccccgtgccccaggaagaagaggaagaggtgcgagttcttaccttgcctctacaggctcaccacgccatggaaaaaatggaagagtttgtatataaagtttgggaggggcgatggagagttattccttacgacgtcctgcctgactggctgaaagataacgactacctcctccatggccatcgccctccgatgccttcattccgtgcctgtttcaaatctattttcagaattcacacagaaaccggaaacatctggacccacttgctcggtttcgttctgtttctcttcttgggtatcctgaccatgcttaggccgaacatgtatttcatggccccactccaggagaaagtcgtgttcggtatgttctttcttggggctgtgctgtgtctctctttcagctggctgtttcacacagtgtattgccacagcgagaaggtgtccagaaccttttctaaactcgactactctggtatcgccctactcattatgggtagctttgtgccctggctgtattactcattctactgttcacctcagccgagactgatctaccttagtatcgtatgcgtgctgggtataagtgcaatcatagtggcccagtgggaccgctttgcaacaccaaaacacagacagacgagggccggtgtcttcctggggctcgggctctcaggagtggtgccgactatgcacttcacaatcgcagaggggttcgttaaggcaacaacagtcggtcagatggggtggttttttttaatggctgtcatgtatattaccggcgcaggcctatatgcggcaaggatccctgagagattttttccgggaaaattcgacatttggtttcagagccatcagatctttcacgtgctcgtcgtcgccgctgcctttgtgcatttctatggagtgagcaaccttcaggagtttcggtatgggctggaaggcggatgtacagacgacacactgttgtag

SEQ ID NO: 109383 - DNA, 1128 bp, Artificial Sequence
  derived and/or modified sequence
atgagcagccacaagggcagcgtggtggcccagggcaacggcgcccccgccagcaacagagaggccgacaccgtggagctggccgagctgggccccctgctggaggagaagggcaagagagtgatcgccaacccccccaaggccgaggaggagcagacctgccccgtgccccaggaggaggaggaggaggtgagagtgctgaccctgcccctgcaggcccaccacgccatggagaagatggaggagttcgtgtacaaggtgtgggagggcagatggagagtgatcccctacgacgtgctgcccgactggctgaaggacaacgactacctgctgcacggccacagaccccccatgcccagcttcagagcctgcttcaagagcatcttcagaatccacaccgagaccggcaacatctggacccacctgctgggcttcgtgctgttcctgttcctgggcatcctgaccatgctgagacccaacatgtacttcatggcccccctgcaggagaaggtggtgttcggcatgttcttcctgggcgccgtgctgtgcctgagcttcagctggctgttccacaccgtgtactgccacagcgagaaggtgagcagaaccttcagcaagctggactacagcggcatcgccctgctgatcatgggcagcttcgtgccctggctgtactacagcttctactgcagcccccagcccagactgatctacctgagcatcgtgtgcgtgctgggcatcagcgccatcatcgtggcccagtgggacagattcgccacccccaagcacagacagaccagagccggcgtgttcctgggcctgggcctgagcggcgtggtgcccaccatgcacttcaccatcgccgagggcttcgtgaaggccaccaccgtgggccagatgggctggttcttcctgatggccgtgatgtacatcaccggcgccggcctgtacgccgccagaatccccgagagattcttccccggcaagttcgacatctggttccagagccaccagatcttccacgtgctggtggtggccgccgccttcgtgcacttctacggcgtgagcaacctgcaggagttcagatacggcctggagggcggctgcaccgacgacaccctgctgtag

SEQ ID NO: 109384 - DNA, 516 bp, Artificial Sequence
  derived and/or modified sequence
atgagcagccacaagggcagcgtggtggcccagggcaacggcgcccccgccagcaacagagaggccgacaccgtggagctggccgagctgggccccctgctggaggagaagggcaagagagtgatcgccaacccccccaaggccgaggaggagcagacctgccccgtgccccaggaggaggaggaggaggtgagagtgctgaccctgcccctgcaggcccaccacgccatggagaagatggaggagttcgtgtacaaggtgtgggagggcagatggagagtgatcccctacgacgtgctgcccgactggctgaaggacaacgactacctgctgcacggccacagaccccccatgcccagcttcagagcctgcttcaagagcatcttcagaatccacaccgagaccggcaacatctggacccacctgctggccaccgcccacctgcccctgcacagactgtgccccggccacttctgccaccactgcggcgccgtgggccccgtgtgccacagctag

SEQ ID NO: 109385 - DNA, 801 bp, Artificial Sequence
  derived and/or modified sequence
atgagcagccacaagggcagcgtggtggcccagggcaacggcgcccccgccagcaacagagaggccgacaccgtggagctggccgagctgggccccctgctggaggagaagggcaagagagtgatcgccaacccccccaaggccgaggaggagcagacctgccccgtgccccaggaggaggaggaggaggtgagagtgctgaccctgcccctgcaggcccaccacgccatggagaagatggaggagttcgtgtacaaggtgtgggagggcagatggagagtgatcccctacgacgtgctgcccgactggctgaaggacaacgactacctgctgcacggccacagaccccccatgcccagcttcagagcctgcttcaagagcatcttcagaatccacaccgagaccggcaacatctggacccacctgctgggcttcgtgctgttcctgttcctgggcatcctgaccatgctgagacccaacatgtacttcatggcccccctgcaggagaaggtggtgttcggcatgttcttcctgggcgccgtgctgtgcctgagcttcagctggctgttccacaccgtgtactgccacagcgagaaggtgagcagaaccttcagcaagctggactacagcggcatcgccctgctgatcatgggcagcttcgtgccctggctgtactacagcttctactgcagcccccagcccagactgatctacctgagcatcgtgtgcgtgctgggcatcagcgccatcatcgtggcccagtgggacagattcgccacccccaagcacagacagacctag

SEQ ID NO: 109386 - DNA, 618 bp, Artificial Sequence
  derived and/or modified sequence
atgagcagccacaagggcagcgtggtggcccagggcaacggcgcccccgccagcaacagagaggccgacaccgtggagctggccgagctgggccccctgctggaggagaagggcaagagagtgatcgccaacccccccaaggccgaggaggagcagacctgccccgtgccccaggaggaggaggaggaggtgagagtgctgaccctgcccctgcaggcccaccacgccatggagaagatggaggagttcgtgtacaaggtgtgggagggcagatggagagtgatcccctacgacgtgctgcccgactggctgaaggacaacgactacctgctgcacggccacagaccccccatgcccagcttcagagcctgcttcaagagcatcttcagaatccacaccgagaccggcaacatctggacccacctgctgggcttcgtgctgttcctgttcctgggcatcctgaccatgctgagacccaacatgtacttcatggcccccctgcaggagaaggtggtgttcggcatgttcttcctgggcgccgtgctgtgcctgagcttcagctggctgttccacaccgtgtactgccacagcgagaaggtgagcagaaccttcagctag

SEQ ID NO: 109387 - protein, 282 aa, Artificial Sequence
  derived and/or modified sequence
MSLLATLGLELDRALLPASGLGWLVDYGKLPPAPAPLAPYEVLGGALEGGLPVGGEPLAGDGFSDWMTERVDFTALLPLEPPLPPGTLPQPSPTPPDLEAMASLLKKELEQMEDFFLDAPPLPPPSPPPLPPPPLPPAPSLPLSLPSFDLPQPPVLDTLDLLAIYCRNEAGQEEVGMPPLPPPQQPPPPSPPQPSRLAPYPHPATTRGDRKQKKRDQNKSAALRYRQRKRAEGEALEGECQGLEARNRELKERAESVEREIQYVKDLLIEVYKARSQRTRSC

SEQ ID NO: 109388 - DNA, 2268 bp, Artificial Sequence
  derived and/or modified sequence
gtgactcatgctggactctaacccacgagggtttctcagagtcagcagctgggggatgaagaagtgaaaagtgactggcaggaaattctgcaagcaaggaaagggaaagagaaatgaactggtgcaggtctgcgggaagagaatgaggctggatcctcaaaatcacaggaggaagcaggcccagacctcagaggcagaaagagaaagaaaccagagcttagagtcaggaggaggaaaccagaccccggagccacaaggagagggctggatccccggctcagagggaagagtgtcgccgcctctgcctgcgtagccccggccatggctctgtagcctcgacccctttgtgcccccggcccgtctccgcgctcaccacgcctgcgctctccgctcccaccttctttcttcagccgaggccgccgccgcctctccttgctgcagccatggagtcttccactttcgccttggtgcctgtcttcgcccacctgagcatcctccagagcctcgtgccagctgctggtgcagcctctcctgttgccatcagtgcccagcacctgtgctacagccatgtcactcctggcgaccctggggctggagctggacagggccctgctcccagctagtgggctgggatggctcgtagactatgggaaactccccccggcccctgcccccctggctccctatgaggtccttgggggagccctggagggcgggcttccagtggggggagagcccctggcaggtgatggcttctctgactggatgactgagcgagttgatttcacagctctcctccctctggagcctcccttaccccccggcaccctcccccaaccttccccaaccccacctgacctggaagctatggcctccctcctcaagaaggagctggaacagatggaagacttcttcctagatgccccgcccctcccaccaccctccccgccgccactaccaccaccaccactaccaccagccccctccctccccctgtccctcccctcctttgacctcccccagccccctgtcttggatactctggacttgctggccatctactgccgcaacgaggccgggcaggaggaagtggggatgccgcctctgcccccgccacagcagccccctcctccttctccacctcaaccttctcgcctggccccctacccacatcctgccaccacccgaggggaccgcaagcaaaagaagagagaccagaacaagtcggcggctctgaggtaccgccagcggaagcgggcagagggtgaggccctggagggcgagtgccaggggctggaggcacggaatcgcgagctgaaggaacgggcagagtccgtggagcgcgagatccagtacgtcaaggacctgctcatcgaggtttacaaggcccggagccagaggacccgtagctgctagaagggcaggggtgtggcttctgggggctggtcttcagctctggcgccttcatccccctgcctctaccttcattccaaacccctctcggccgggtgcagtggcttatgcttgtaatcccagcactttgggaggccaaggcaggaggatcgtttgaggccaggaggtcaataccagcctgggcaacatagtaagaccctgtctctattaaaaaaaaaaaatcaacccttcttccccaccaaaccacccaactcctctctactcttatccttttatcctctgtctctgcttatcacctctcttgcgtatttctggatctccttccctcctttctcgtccaaatcatgaaatgtttggccttagtcaatgtctatgcccgtcacataacagccgaggcaccgaggcccacagggaagcagctgggagcttggaaacctggtctcttgaatttcaaacctggtttcttacaggtggttgtctggggtgggtggagtggcgacaggatagagctgaaggactatgcaaatgaggaagtaagtcagggcgggctttgagaaggggacccatatcctacaggcaaaaagcaggctaggtgaccttgggacactacgctaagggagggaggctaaaggcggccaggtttgcagtgcgggaagatgagcaggccagtgggaggaggggcagggcagggctgtagttggtgactgggtgttcattttagctctaagaaaaaaaatcagtgtttcgtgaaggtgttggagaggggctgtgtctgggtgagggatggcggggtactgatttttttgggaggttatgagcaaaaataaaacgaaacatttcctctggaaaaaaaaa

SEQ ID NO: 109389 - DNA, 849 bp, Artificial Sequence
  derived and/or modified sequence
atgagcctactcgctacactgggactagagctggatcgggccctcctgcccgctagcggcttgggatggcttgtggattatggtaaacttccccctgctcccgcccctttggccccctatgaagtgctagggggggctttagaggggggcctgcccgttgggggcgagccgctcgcgggggatggcttcagtgactggatgacagaacgagtagatttcacggcactcttgccactggagccaccccttccccctggcaccctcccacagccttcacccacaccccctgatctggaagcaatggcttcgctcctcaagaaagaattggagcaaatggaggacttcttcctggatgctccccctctcccgccccccagccctccacccctgcctcctcctccactccctccggcaccatccctcccgcttagcctgccctcatttgatttgcctcaacctcctgtcttagatactctggacctgttggccatttattgtaggaacgaggcagggcaggaagaggtgggcatgcccccattacctcccccacaacaacctcctcccccgtccccaccccagcccagccggctggcaccctatccacaccctgctacgaccaggggtgataggaaacagaaaaaacgtgatcagaataaaagcgccgccttgcggtatcggcaacggaaaagggccgaaggggaggccctcgagggggaatgccagggcctggaggcccgcaatagggagcttaaggaaagggctgaatccgtggaaagggaaattcagtacgttaaagacctcttaatcgaagtttataaagcccgctctcagcgaacaagatcttgctag

SEQ ID NO: 109390 - DNA, 849 bp, Artificial Sequence
  derived and/or modified sequence
atgagcctgctggccaccctgggcctggagctggaccgggccctgctgcctgccagcggcctgggctggctggtggactatggcaagctgcccccagccccagcccccctggccccctatgaggtgctgggcggggccctggagggcggcctgcctgtgggcggggagcccctggccggagatggcttcagtgactggatgacagagcgggtggacttcaccgccctgctgcccctggagccccccctgcccccaggcaccctgccccagcccagccccaccccaccagacctggaggccatggccagcctgctgaagaaggagctggagcagatggaggacttcttcctggatgccccacccctgcccccacccagccccccacccctgcccccaccacccctgcccccagcccccagcctgcccctgagcctgcccagctttgacctgccccagccccctgtgctggacaccctggacctgctggccatctactgcagaaatgaggccggccaggaggaggtgggcatgccacccctgcccccaccccagcagcccccaccacccagccccccccagcccagccggctggccccctacccccacccagccaccaccaggggggacaggaagcagaagaagagggaccagaacaagtctgctgccctgcgctaccggcagaggaagagagctgagggggaggccctggagggggagtgccagggcctggaggccaggaaccgggagctgaaggagcgggcagagagcgtggagcgggagatccagtatgtgaaggacctgctgattgaggtgtacaaggcccggagccagaggaccaggagctgctag

SEQ ID NO: 109391 - DNA, 849 bp, Artificial Sequence
  derived and/or modified sequence
atgagcctgctggccaccctgggcctggagctggaccgggccctgctccccgcttccggcctggggtggctcgttgactatggcaaactgccaccagcgccagcccctttagctccatacgaagtgttaggtggcgcgctggagggcggcctcccagtcggcggggagcccctggctggtgacgggttttcggattggatgactgagcgggtagactttactgcacttttacccctggagccacctttacctcccgggacgcttccccagccctcccctactccacccgaccttgaagcaatggctagcctgctgaaaaaggaacttgagcagatggaagactttttcctcgacgctcccccccttccgccaccaagtccacccccacttcccccgcctccgctgccgccagccccctccctgccactttccctcccctccttcgacctgccgcaacccccggtacttgataccctcgaccttttggctatttactgtcggaatgaggccggacaggaagaagtgggtatgccccctctgccgcccccccagcagccacctcctccctctccccctcagccaagtcggctagccccttaccctcaccccgctactacccgcggagatcgcaagcaaaagaaacgcgatcagaataaatccgctgctcttcgttataggcagcggaaacgcgccgaaggtgaggcactggaaggagaatgtcagggtttggaggcaagaaatcgcgagctgaaggaacgggccgagtctgtcgagcgggaaattcagtatgttaaagacttactgattgaggtatacaaggcccggagtcaaagaactaggtcctgttag

SEQ ID NO: 109392 - DNA, 849 bp, Artificial Sequence
  derived and/or modified sequence
atgagcctcctggccacactaggtctcgaactggaccgcgctctactgcctgcctccgggttgggttggttagtggactatgggaaactgcctcccgctcctgcccctctggcgccttacgaggtactgggtggagcgttagaagggggtctcccagtggggggtgagccgcttgcgggagatggattcagcgattggatgacagagagagtggacttcaccgccttgctgcctctcgaaccgcctttgcccccagggacgctgccccaacctagtccgacgcctccagacctcgaagccatggcctccttgctgaagaaggagctggagcaaatggaggactttttcttggacgctccaccactccctcccccatcacctccccctctgccaccgcctccactacccccagcaccaagcctgcccttgtcccttccaagcttcgatcttccccagccccctgttctcgatacactagacttgctggctatctactgtcggaatgaagctgggcaggaggaggtcggtatgccgccattacctcctccacagcagcctcctccgccatcccctccacagcccagcagattggcaccttacccccaccctgccactactcggggagaccgcaaacaaaagaagcgtgatcagaataaatccgcggctctgcggtatcgacagcgaaagagggcagagggtgaggccctagagggggaatgtcagggccttgaagcacgcaatagagaactgaaggagcgggctgaaagcgttgagagggagattcagtacgtcaaagatctactgatcgaggtgtataaggctcggtcccagcgaaccagaagttgctag

SEQ ID NO: 109393 - DNA, 2259 bp, Artificial Sequence
  derived and/or modified sequence
gtgactcatgctggactctaacccacgagggtttctcagagtcagcagctgggggatgaagaagtgaaaagtgactggcaggaaattctgcaagcaaggaaagggaaagagaaatgaactggtgcaggtctgcgggaagagaatgaggctggatcctcaaaatcacaggaggaagcaggcccagacctcagaggcagaaagagaaagaaaccagagcttagagtcaggaggaggaaaccagaccccggagccacaaggagagggctggatccccggctcagagggaagagtgtcgccgcctctgcctgcgtagccccggccatggctctgtagcctcgacccctttgtgcccccggcccgtctccgcgctcaccacgcctgcgctctccgctcccaccttctttcttcagccgaggccgccgccgcctctccttgctgcagccatggagtcttccactttcgccttggtgcctgtcttcgcccacctgagcatcctccagagcctcgtgccagctgctggtgcagcctctcctgttgccatcagtgcccagcacctgtgctacagccatgtcactcctggcgaccctggggctggagctggacagggccctgctcccagctagtgggctgggatggctcgtagactatgggaaactccccccggcccctgcccccctggctccctatgaggtccttgggggagccctggagggcgggcttccagtggggggagagcccctggcaggtgatggcttctctgactggatgactgagcgagttgatttcacagctctcctccctctggagcctcccttaccccccggcaccctcccccaaccttccccaaccccacctgacctggaagctatggcctccctcctcaagaaggagctggaacagatggaagacttcttcctagatgccccgcccctcccaccaccctccccgccgccactaccaccaccaccactaccaccagccccctccctccccctgtccctcccctcctttgacctcccccagccccctgtcttggatactctggacttgctggccatctactgccgcaacgaggccgggcaggaggaagtggggatgccgcctctgcccccgccacagcagccccctcctccttctccacctcaaccttctcgcctggccccctacccacatcctgccaccacccgaggggaccgcaagcaaaagaagagagaccagaacaagtcggcggctctgaggtaccgccagcggaagcgggcagagggtgaggccctggagggcgagtgccaggggctggaggcacggaatcgcgagctgaaggaacgggcagagtccgtggagcgcgagatccagtacgtcaaggacctgctcatcgaggtttacaaggcccggagccagaggacccgtagctgctagaagggcaggggtgtggcttctgggggctggtcttcagctctggcgccttcatccccctgcctctaccttcattccaaacccctctcggccgggtgcagtggcttatgcttgtaatcccagcactttgggaggccaaggcaggaggatcgtttgaggccaggaggtcaataccagcctgggcaacatagtaagaccctgtctctattaaaaaaaaaaaatcaacccttcttccccaccaaaccacccaactcctctctactcttatccttttatcctctgtctctgcttatcacctctcttgcgtatttctggatctccttccctcctttctcgtccaaatcatgaaatgtttggccttagtcaatgtctatgcccgtcacataacagccgaggcaccgaggcccacagggaagcagctgggagcttggaaacctggtctcttgaatttcaaacctggtttcttacaggtggttgtctggggtgggtggagtggcgacaggatagagctgaaggactatgcaaatgaggaagtaagtcagggcgggctttgagaaggggacccatatcctacaggcaaaaagcaggctaggtgaccttgggacactacgctaagggagggaggctaaaggcggccaggtttgcagtgcgggaagatgagcaggccagtgggaggaggggcagggcagggctgtagttggtgactgggtgttcattttagctctaagaaaaaaaatcagtgtttcgtgaaggtgttggagaggggctgtgtctgggtgagggatggcggggtactgatttttttgggaggttatgagcaaaaataaaacgaaacatttcctctgg

SEQ ID NO: 109394 - DNA, 849 bp, Artificial Sequence
  derived and/or modified sequence
atgagcctgctggccaccctgggcctggagctggacagagccctgctgcccgccagcggcctgggctggctggtggactacggcaagctgccccccgcccccgcccccctggccccctacgaggtgctgggcggcgccctggagggcggcctgcccgtgggcggcgagcccctggccggcgacggcttcagcgactggatgaccgagagagtggacttcaccgccctgctgcccctggagccccccctgccccccggcaccctgccccagcccagccccaccccccccgacctggaggccatggccagcctgctgaagaaggagctggagcagatggaggacttcttcctggacgccccccccctgcccccccccagccccccccccctgccccccccccccctgccccccgcccccagcctgcccctgagcctgcccagcttcgacctgccccagccccccgtgctggacaccctggacctgctggccatctactgcagaaacgaggccggccaggaggaggtgggcatgccccccctgccccccccccagcagccccccccccccagccccccccagcccagcagactggccccctacccccaccccgccaccaccagaggcgacagaaagcagaagaagagagaccagaacaagagcgccgccctgagatacagacagagaaagagagccgagggcgaggccctggagggcgagtgccagggcctggaggccagaaacagagagctgaaggagagagccgagagcgtggagagagagatccagtacgtgaaggacctgctgatcgaggtgtacaaggccagaagccagagaaccagaagctgctag

SEQ ID NO: 109395 - protein, 773 aa, Artificial Sequence
  derived and/or modified sequence
MEPPYSLTAHYDEFQEVKYVSRCGAGGARGASLPPGFPLGAARSATGARSGLPRWNRREVCLLSGLVFAAGLCAILAAMLALKYLGPVAAGGGACPEGCPERKAFARAARFLAANLDASIDPCQDFYSFACGGWLRRHAIPDDKLTYGTIAAIGEQNEERLRRLLARPGGGPGGAAQRKVRAFFRSCLDMREIERLGPRPMLEVIEDCGGWDLGGAEERPGVAARWDLNRLLYKAQGVYSAAALFSLTVSLDDRNSSRYVIRIDQDGLTLPERTLYLAQDEDSEKILAAYRVFMERVLSLLGADAVEQKAQEILQVEQQLANITVSEHDDLRRDVSSMYNKVTLGQLQKITPHLRWKWLLDQIFQEDFSEEEEVVLLATDYMQQVSQLIRSTPHRVLHNYLVWRVVVVLSEHLSPPFREALHELAQEMEGSDKPQELARVCLGQANRHFGMALGALFVHEHFSAASKAKVQQLVEDIKYILGQRLEELDWMDAETRAAARAKLQYMMVMVGYPDFLLKPDAVDKEYEFEVHEKTYFKNILNSIRFSIQLSVKKIRQEVDKWLLPPQALNAYYLPNKNQMVFPAGILQPTLYDPDFPQSLNYGGIGTIIGHELTHGYDDWGGQYDRSGNLLHWWTEASYSRFLRKAECIVRLYDNFTVYNQRVNGKHTLGENIADMGGLKLAYHAYQKWVREHGPEHPLPRLKYTHDQLFFIAFAQNWCIKRRSQSIYLQVLTDKHAPEHYRVLGSVSQFEEFGRAFHCPKDSPMNPAHKCSVW

SEQ ID NO: 109396 - DNA, 2322 bp, Artificial Sequence
  derived and/or modified sequence
atggaacccccttattcactcaccgcccactacgacgagttccaggaagtcaagtacgtgtcgcgctgcggggccggcggggctcggggagcaagtctccctccggggttccccctcggcgccgccagatccgcaaccggtgctaggtctgggctgccgagatggaaccgccgtgaggtgtgtctcctgtccggactcgttttcgcagcagggctttgcgcgatcctggccgctatgctcgccctgaaatatcttggcccagttgccgcggggggtggggcatgccccgagggatgtcctgaaagaaaagccttcgcacgcgcagcgcggtttctcgccgcaaatctggacgccagcattgatccgtgccaagacttttactcttttgcctgcgggggttggctgcggcggcacgcaatccctgacgataagctcacctacggcaccattgcagccatcggtgagcagaacgaagagcggctcaggagattactagcccgcccgggaggagggccgggaggtgccgcccagaggaaggtgcgagcattcttcagatcttgtttagacatgagggaaatagagcgacttggacctagaccgatgctggaagtgattgaagattgtggcgggtgggacttagggggcgctgaggaacggccgggagtagccgcccggtgggatcttaaccgactcctgtacaaggcccagggggtgtattcggccgccgccctcttcagccttactgtctccctggacgatcgaaattcctcccgatatgtgattcgtatcgatcaggacggcctcactctaccagaacgcacactgtatttggcacaggatgaagattcagaaaagatcctcgccgcctatcgggtgttcatggagcgggtcctgtccttgctgggggccgacgctgtagagcagaaggcacaagaaattttacaagtggagcagcagctggctaacataacagtgtctgagcacgatgacctgcgccgggatgtttcaagtatgtataacaaagtgacactcgggcagctccaaaaaataacgccccacttacgctggaagtggctgctggatcaaatttttcaggaggatttttctgaggaggaagaggtcgtattactcgctacagattacatgcagcaggtttcccaactcattaggtccactcctcatcgggttctgcacaactacctcgtgtggcgggtcgttgtggttttatcggaacacctttcaccacctttccgtgaagccctgcacgagctagcgcaggaaatggaggggagcgacaagccccaggaactggcccgggtgtgccttgggcaggccaatcgccactttggcatggctctgggtgcacttttcgtacacgaacacttctccgcagccagcaaggcaaaagtccagcagctggtcgaggacatcaaatacattctgggccagcggctggaagagttggactggatggacgctgaaactagggcggccgccagggcaaagctgcagtacatgatggttatggtcggctaccctgacttcctgctcaagcctgatgccgtcgataaagagtacgagttcgaagtgcacgaaaagacctatttcaaaaacatcttaaacagcatacggtttagcattcagctttcagtgaagaagatcagacaggaggtggacaagtggcttctgccaccacaggctctgaatgcgtattacctccccaacaaaaatcagatggtgtttccggcgggtatccttcagcctacactctacgatcctgacttccctcagagcttgaattacgggggaattggaacgattatagggcatgagttgacacacggttacgacgactggggcgggcagtacgatcgcagcgggaatttactacactggtggacagaggcgtcttactctcgcttccttaggaaagccgagtgtatcgtccggttgtatgacaactttactgtgtataaccagagagttaatggcaagcacaccttgggcgaaaacattgccgatatgggcggtctcaagcttgcttaccacgcttatcagaagtgggttcgcgaacatggaccggaacatcccctccctcggctcaagtacactcatgaccaactgttcttcatagcatttgcacagaactggtgcataaaaaggcgatcccagtctatatatcttcaggtactcactgacaagcacgcccccgaacattatcgtgttttgggtagcgtcagccaatttgaagaatttgggagagcgttccattgccccaaagattcgccaatgaatcccgcacataaatgttcagtttggtag

SEQ ID NO: 109397 - DNA, 2322 bp, Artificial Sequence
  derived and/or modified sequence
atggagcccccctacagcctgacagcccactatgatgagttccaggaggtgaagtatgtgagccgctgtggggccggcggggcccggggggccagcctgcccccaggcttccccctgggcgccgcccggagcgccaccggggcccggagcggcctgccccgctggaacagaagagaggtgtgcctgctgagcggcctggtgtttgctgctggcctgtgtgccatcctggccgccatgctggccctgaagtacctgggccctgtggccgccggcggcggggcctgcccagagggctgcccagagaggaaggcctttgcccgggccgcccgcttcctggccgccaacctggatgccagcattgacccctgccaggacttctacagctttgcctgtggcggctggctgcggagacatgccatcccagatgacaagctgacctacggcaccatcgccgccatcggggagcagaatgaggagcggctgcggcggctgctggcccggcctgggggcggccctgggggcgccgcccagaggaaggtgcgggccttcttccgcagctgcctggacatgagagaaattgagcggctgggcccccggcccatgctggaggtgattgaggactgtggcggctgggacctgggcggcgctgaggagaggcctggggtggccgcccgctgggacctgaaccggctgctgtacaaggcccagggcgtgtacagcgctgctgccctcttcagcctgactgtgtccctggatgacaggaacagcagccgctacgtgatcagaattgaccaggacggcctgaccctgcctgagaggaccctgtacctggcccaggatgaagattctgagaagatcctggccgcctacagagtcttcatggagcgggtgctgagcctgctgggcgcagatgctgtggagcagaaggcccaggagatcctgcaggtggagcagcagctggccaacatcaccgtgtctgaacatgatgacctgcggagagatgtgtcctccatgtacaacaaggtgaccctgggccagctgcagaagatcaccccccacctgcgctggaagtggctgctggaccagatcttccaggaggacttcagcgaggaggaggaggtggtgctgctggccacagactacatgcagcaggtgtcccagctgatccgcagcaccccccaccgggtgctgcacaactacctggtgtggagggtggtggtggtgctgtctgagcacctgagcccccccttccgggaggccctgcacgagctggcccaggagatggagggcagtgacaagccccaggagctggcccgggtgtgcctgggccaggccaacagacacttcggcatggccctgggcgccctgtttgtgcatgagcacttctctgctgccagcaaggccaaggtgcagcagctggtggaggacatcaagtacatcctgggccagaggctggaggagctggactggatggatgctgagaccagggctgctgcccgggccaagctgcagtacatgatggtgatggtgggctacccagacttcctgctgaagccagatgctgtggacaaggagtatgaatttgaggtgcatgagaagacctacttcaagaacatcctgaacagcatccgcttcagcatccagctgtctgtgaagaagatccggcaggaggtggacaagtggctgctgcccccccaggccctgaatgcctactacctgcccaacaagaaccagatggtgtttcctgctggcatcctgcagcccaccctgtatgaccctgacttcccccagagcctgaactatggaggcatcggcaccatcatcggccacgagctgacccacggctatgatgactggggcggccagtatgacaggagcggcaacctgctgcactggtggacagaggccagctacagccgcttcctgaggaaggccgagtgcatcgtgcggctgtatgacaacttcaccgtgtacaaccagagggtgaatggcaagcacaccctgggggagaacattgctgacatgggcggcctgaagctggcctaccacgcctaccagaagtgggtgcgggagcacggccctgagcaccccctgccccggctgaagtacacccatgaccagctgttcttcatcgcctttgcccagaactggtgcatcaagagaagaagccagagcatctacctgcaggtgctgacagacaagcacgcccctgagcactacagagtgctgggctctgtgtcccagtttgaggagtttggccgggccttccactgccccaaggacagccccatgaacccagcccacaagtgcagcgtgtggtag

SEQ ID NO: 109398 - DNA, 2322 bp, Artificial Sequence
  derived and/or modified sequence
atggagcccccctacagcctgaccgcccactacgacgagttccaggaggtgaagtacgtgtctcgctgcggagccggcggggctcgcggcgccagccttccacccggattccctctgggagccgcccgatcagccacaggtgctagatccggccttcccaggtggaatagacgtgaagtatgcctacttagcgggctggttttcgcagccgggctgtgtgcaatcctagccgccatgcttgccttgaaatatctcgggcccgtggcagcggggggaggcgcctgtccagaaggctgtcctgagaggaaagcattcgcgagggcagctagattcctggcggccaacctggacgctagcatcgacccgtgccaagatttttactcctttgcttgtgggggatggctgcgacggcacgctattcccgacgacaaactgacgtacgggaccatcgccgcaatcggtgagcagaatgaagagcggctgaggcgactgttggcacggccaggcggagggccgggcggcgccgcccagcgcaaagtccgagccttctttagatcttgcctggatatgcgggaaattgaacggctagggcccagacctatgttagaggttattgaagactgtggcggctgggacctgggtggggcagaggagcgtcccggggttgccgccagatgggacctcaatcgactgctgtataaggcccagggtgtgtattctgcggcggccttgttctccctgacagtgagtcttgacgacagaaacagctcccgctacgttatacgcatagatcaggacgggttgactctgccagagaggacactgtacctggcccaggacgaagactctgaaaagatccttgcagcttatcgtgtttttatggagcgggttctgtctctgctgggtgccgatgctgtggaacagaaggcgcaggaaattctgcaggtggagcagcagcttgctaatatcacggtgtccgagcacgatgatcttaggcgcgacgtcagcagtatgtacaacaaagtcaccctgggtcagctgcaaaaaatcaccccccatctgcgctggaaatggctgctcgatcagatctttcaggaggatttcagtgaggaagaggaggtggtcttgctggctacggactacatgcaacaggtgtctcaactgatacggtctacaccacaccgcgtgctacataattatctcgtgtggcgggtggtagtcgtgctgagcgagcacctcagccccccttttcgggaggcactgcatgaactggcccaggaaatggaaggatccgataagcctcaagaactcgcccgggtttgcttaggacaagccaacagacacttcggtatggccttgggagccctctttgtacatgaacacttttcagccgcttctaaggcaaaggttcagcagcttgtggaggatatcaagtatattctggggcagaggctggaggagttggactggatggatgctgagacacgggcggctgcaagggcaaagcttcagtatatgatggtcatggtggggtaccctgatttcttgcttaaacctgacgctgtggacaaggaatacgaattcgaggtccacgagaagacgtactttaagaatatccttaactccattaggttttctatacagctgtccgttaagaagattcggcaagaagtcgataagtggctgctccccccccaggccttgaacgcgtactatcttccgaataagaaccaaatggtgtttccggccggaatccttcagccaaccctttacgacccagacttcccccaatcgctgaattacggcggcatcggcacaatcatcggccacgaactcacccacggctatgacgactgggggggccagtatgaccgctcgggcaatctccttcactggtggacagaagcctcttactcgcggtttttaagaaaagcagaatgcatagtcaggctatacgacaactttacagtatacaatcagagggtaaatggaaaacatactctgggtgaaaatatcgccgatatgggcggtttaaaactcgcctaccatgcataccagaaatgggttcgcgagcacggccctgagcacccactcccacgactgaagtacacgcatgatcaattgttcttcattgcctttgcccagaactggtgtatcaagcggcggtctcagtcaatctacctgcaagtcctcacagacaaacacgcccctgagcactatcgcgtgctcgggagtgtcagtcaattcgaagaatttggaagggcctttcattgccccaaggacagtccgatgaatcctgctcataagtgctctgtgtggtag

SEQ ID NO: 109399 - DNA, 2322 bp, Artificial Sequence
  derived and/or modified sequence
atggagcctccgtattctcttactgcccactacgatgagttccaggaagtcaaatacgtgagtagatgtggggctggtggagctcgcggagcttctctccccccaggcttccccttaggagcagccaggtctgccacaggcgctaggtctggcttgccacggtggaacaggagggaagtctgtttgcttagcggcctggtcttcgccgctggattgtgtgcaattctggcagctatgctagccttgaaatacttaggccctgtcgccgcagggggaggggcatgccccgaggggtgccccgagcgcaaggcattcgcgcgtgccgcacgttttcttgctgccaatctggacgcctccatagacccgtgtcaggatttttattcttttgcgtgcgggggatggcttagaaggcacgcgattccagacgataagcttacttacggaacaatagccgctatcggtgaacaaaatgaggaaagacttcgcagactgctggccaggcctggtggcggtcccggaggtgccgcacaaagaaaagtaagagccttctttcgcagttgtctcgacatgagggaaattgaacggttgggccctcggcctatgcttgaggtcatcgaggattgcgggggatgggatctgggcggagccgaagagcgccctggcgtggctgctcgttgggacttaaatcgtctgctgtacaaagctcagggggtctacagcgccgcagcacttttcagcctcaccgtttccctggatgaccggaatagttctcggtatgtcatccgcatcgatcaggacggactgactcttcctgaacgcaccttgtaccttgcgcaggatgaggattccgaaaaaatactcgcagcttatagagttttcatggagcgggttctgagcctgctgggcgctgatgcagttgagcagaaagctcaggaaatattacaggtggagcagcagctcgctaatattaccgtgtccgaacatgacgacctccgcagggacgtgagttccatgtataataaggttactctgggccagcttcagaaaattacgccacatctgcgctggaagtggttactggatcagatcttccaggaagacttcagcgaagaagaggaagtggtcctgctcgcgaccgactacatgcagcaggtgagccaactgatcagaagcacccctcacagagtactgcacaactacttggtctggagggtggtcgtcgtgttgtcagaacacctgtctccaccctttagagaggctctccacgaactggcacaggagatggagggatccgacaaaccacaagagctggcacgtgtttgtctcggacaggcaaaccggcactttggaatggcattaggagcactgtttgtccacgagcacttttctgcagcctccaaagccaaagttcaacaactggttgaggatatcaaatacattctggggcaacggctggaagagctcgactggatggacgctgagacacgggctgccgctcgcgctaaactgcagtatatgatggtcatggtgggctatccagatttcttgttaaagcccgatgccgtcgacaaagaatacgagttcgaggtccatgaaaagacctactttaaaaacatcctgaattcaattcgattcagcatccagttaagcgttaagaaaatcaggcaggaggtggacaagtggttattgccaccccaagccctgaacgcctattacctgcccaacaaaaatcagatggtattccccgctggaatcctacaacctaccttatacgatcctgactttccccaaagcctaaactatggaggcattgggactatcatcggccacgaacttacacacggttacgacgattgggggggacagtacgaccggagcgggaatctgttgcattggtggactgaggcttcttatagcaggtttctacgtaaagccgagtgtatcgtaagactctacgataacttcacggtctacaaccaaagggttaatggcaagcacactctcggtgaaaacatcgccgatatgggcggactaaaactggcctaccacgcctatcagaagtgggtgagagagcacggcccagagcatccactccctagactcaagtacacccatgaccagctgttcttcatagcctttgcacagaattggtgcatcaagagaaggtctcaaagcatttacctgcaggtactgactgataagcatgcccctgaacattatcgagtgttagggtccgtatcgcaattcgaggaatttggacgggcttttcactgtccaaaggattcccccatgaatccagcccataaatgctcagtatggtag

SEQ ID NO: 109400 - DNA, 2322 bp, Artificial Sequence
  derived and/or modified sequence
atggagcccccctacagcctgaccgcccactacgacgagttccaggaggtgaagtacgtgagcagatgcggcgccggcggcgccagaggcgccagcctgccccccggcttccccctgggcgccgccagaagcgccaccggcgccagaagcggcctgcccagatggaacagaagagaggtgtgcctgctgagcggcctggtgttcgccgccggcctgtgcgccatcctggccgccatgctggccctgaagtacctgggccccgtggccgccggcggcggcgcctgccccgagggctgccccgagagaaaggccttcgccagagccgccagattcctggccgccaacctggacgccagcatcgacccctgccaggacttctacagcttcgcctgcggcggctggctgagaagacacgccatccccgacgacaagctgacctacggcaccatcgccgccatcggcgagcagaacgaggagagactgagaagactgctggccagacccggcggcggccccggcggcgccgcccagagaaaggtgagagccttcttcagaagctgcctggacatgagagagatcgagagactgggccccagacccatgctggaggtgatcgaggactgcggcggctgggacctgggcggcgccgaggagagacccggcgtggccgccagatgggacctgaacagactgctgtacaaggcccagggcgtgtacagcgccgccgccctgttcagcctgaccgtgagcctggacgacagaaacagcagcagatacgtgatcagaatcgaccaggacggcctgaccctgcccgagagaaccctgtacctggcccaggacgaggacagcgagaagatcctggccgcctacagagtgttcatggagagagtgctgagcctgctgggcgccgacgccgtggagcagaaggcccaggagatcctgcaggtggagcagcagctggccaacatcaccgtgagcgagcacgacgacctgagaagagacgtgagcagcatgtacaacaaggtgaccctgggccagctgcagaagatcaccccccacctgagatggaagtggctgctggaccagatcttccaggaggacttcagcgaggaggaggaggtggtgctgctggccaccgactacatgcagcaggtgagccagctgatcagaagcaccccccacagagtgctgcacaactacctggtgtggagagtggtggtggtgctgagcgagcacctgagcccccccttcagagaggccctgcacgagctggcccaggagatggagggcagcgacaagccccaggagctggccagagtgtgcctgggccaggccaacagacacttcggcatggccctgggcgccctgttcgtgcacgagcacttcagcgccgccagcaaggccaaggtgcagcagctggtggaggacatcaagtacatcctgggccagagactggaggagctggactggatggacgccgagaccagagccgccgccagagccaagctgcagtacatgatggtgatggtgggctaccccgacttcctgctgaagcccgacgccgtggacaaggagtacgagttcgaggtgcacgagaagacctacttcaagaacatcctgaacagcatcagattcagcatccagctgagcgtgaagaagatcagacaggaggtggacaagtggctgctgcccccccaggccctgaacgcctactacctgcccaacaagaaccagatggtgttccccgccggcatcctgcagcccaccctgtacgaccccgacttcccccagagcctgaactacggcggcatcggcaccatcatcggccacgagctgacccacggctacgacgactggggcggccagtacgacagaagcggcaacctgctgcactggtggaccgaggccagctacagcagattcctgagaaaggccgagtgcatcgtgagactgtacgacaacttcaccgtgtacaaccagagagtgaacggcaagcacaccctgggcgagaacatcgccgacatgggcggcctgaagctggcctaccacgcctaccagaagtgggtgagagagcacggccccgagcaccccctgcccagactgaagtacacccacgaccagctgttcttcatcgccttcgcccagaactggtgcatcaagagaagaagccagagcatctacctgcaggtgctgaccgacaagcacgcccccgagcactacagagtgctgggcagcgtgagccagttcgaggagttcggcagagccttccactgccccaaggacagccccatgaaccccgcccacaagtgcagcgtgtggtag

SEQ ID NO: 109401 - DNA, 2322 bp, Artificial Sequence
  derived and/or modified sequence
atggagcccccgtattcgctgacggcgcactacgatgagttccaagaggtcaagtacgtgagccgctgcggcgcggggggcgcgcgcggggcctccctgcccccgggcttcccgttgggcgctgcgcgcagcgccaccggggcccggtccgggctgccgcgctggaaccggcgcgaggtgtgcctgctgtcggggctggtgttcgccgccggcctctgcgccattctggcggctatgctggccctcaagtacctgggcccggtcgcggccggcggcggcgcctgtcccgagggctgccctgagcgcaaggccttcgcgcgcgccgctcgcttcctggccgccaacctggacgccagcatcgacccatgccaggacttctactcgttcgcctgcggcggttggctgcggcgccacgccatccccgacgacaagctcacctatggcaccatcgcggccatcggcgagcaaaacgaggagcgcctacggcgcctgctggcgcggcccgggggtgggcctggcggcgcggcccagcgcaaggtgcgcgccttcttccgctcgtgcctcgacatgcgcgagatcgagcgactgggcccgcgacccatgctagaggtcatcgaggactgcgggggctgggacctgggcggcgcggaggagcgtccgggggtcgcggcgcgatgggacctcaaccggctgctgtacaaggcgcagggcgtgtacagcgccgccgcgctcttctcgctcacggtcagcctggacgacaggaactcctcgcgctacgtcatccgcattgaccaggatgggctcaccctgccagagaggaccctgtacctcgctcaggatgaggacagtgagaagatcctggcagcatacagggtgttcatggagcgagtgctcagcctcctgggtgcagacgctgtggaacagaaggcccaagagatcctgcaagtggagcagcagctggccaacatcactgtgtcagagcatgacgacctacggcgagatgtcagctccatgtacaacaaggtgacgctggggcagctgcagaagatcaccccccacttgcggtggaagtggctgctagaccagatcttccaggaggacttctcagaggaagaggaggtggtgctgctggcgacagactacatgcagcaggtgtcgcagctcatccgctccacaccccaccgggtcctgcacaactacctggtgtggcgcgtggtggtggtcctgagtgaacacctgtccccgccattccgtgaggcactgcacgagctggcacaggagatggagggcagcgacaagccacaggagctggcccgggtctgcttgggccaggccaatcgccactttggcatggcgcttggcgccctctttgtacatgagcacttctcagctgccagcaaagccaaggtgcagcagctagtggaagacatcaagtacatcctgggccagcgcctggaggagctggactggatggacgccgagaccagggctgctgctcgggccaagctccagtacatgatggtgatggtcggctacccggacttcctgctgaaacccgatgctgtggacaaggagtatgagtttgaggtccatgagaagacctacttcaagaacatcttgaacagcatccgcttcagcatccagctctcagttaagaagattcggcaggaggtggacaagtggctgctccccccacaggcgctcaatgcctactatctacccaacaagaaccagatggtgttccccgcgggcatcctgcagcccaccctgtacgaccctgacttcccacagtctctcaactacgggggcatcggcaccatcattggacatgagctgacccacggctacgacgactgggggggccagtatgaccgctcagggaacctgctgcactggtggacggaggcctcctacagccgcttcctgcgaaaggctgagtgcatcgtccgtctctatgacaacttcactgtctacaaccagcgggtgaacgggaaacacacgcttggggagaacatcgcagatatgggcggcctcaagctggcctaccacgcctatcagaagtgggtgcgggagcacggcccagagcacccacttccccggctcaagtacacacatgaccagctcttcttcattgcctttgcccagaactggtgcatcaagcggcggtcgcagtccatctacctgcaggtgctgactgacaagcatgcccctgagcactacagggtgctgggcagtgtgtcccagtttgaggagtttggccgggctttccactgtcccaaggactcacccatgaaccctgcccacaagtgttccgtgtggtga

SEQ ID NO: 109402 - protein, 891 aa, Artificial Sequence
  derived and/or modified sequence
MPVRKQDTQRALHLLEEYRSKLSQTEDRQLRSSIERVINIFQSNLFQALIDIQEFYEVTLLDNPKCIDRSKPSEPIQPVNTWEISSLPSSTVTSETLPSSLSPSVEKYRYQDEDTPPQEHISPQITNEVIGPELVHVSEKNLSEIENVHGFVSHSHISPIKPTEAVLPSPPTVPVIPVLPVPAENTVILPTIPQANPPPVLVNTDSLETPTYVNGTDADYEYEEITLERGNSGLGFSIAGGTDNPHIGDDSSIFITKIITGGAAAQDGRLRVNDCILRVNEVDVRDVTHSKAVEALKEAGSIVRLYVKRRKPVSEKIMEIKLIKGPKGLGFSIAGGVGNQHIPGDNSIYVTKIIEGGAAHKDGKLQIGDKLLAVNNVCLEEVTHEEAVTALKNTSDFVYLKVAKPTSMYMNDGYAPPDITNSSSQPVDNHVSPSSFLGQTPASPARYSPVSKAVLGDDEITREPRKVVLHRGSTGLGFNIVGGEDGEGIFISFILAGGPADLSGELRKGDRIISVNSVDLRAASHEQAAAALKNAGQAVTIVAQYRPEEYSRFEAKIHDLREQMMNSSISSGSGSLRTSQKRSLYVRALFDYDKTKDSGLPSQGLNFKFGDILHVINASDDEWWQARQVTPDGESDEVGVIPSKRRVEKKERARLKTVKFNSKTRDKGEIPDDMGSKGLIGGQEEYVLSYEPVNQQEVNYTRPVIILGPMKDRINDDLISEFPDKFGSCVPHTTRPKRDYEVDGRDYHFVTSREQMEKDIQEHKFIEAGQYNNHLYGTSVQSVREVAEKGKHCILDVSGNAIKRLQIAQLYPISIFIKPKSMENIMEMNKRLTEEQARKTFERAMKLEQEFTEHFTAIVQGDTLEDIYNQVKQIIEEQSGSYIWVPAKEKL

SEQ ID NO: 109403 - protein, 904 aa, Artificial Sequence
  derived and/or modified sequence
MPVRKQDTQRALHLLEEYRSKLSQTEDRQLRSSIERVINIFQSNLFQALIDIQEFYEVTLLDNPKCIDRSKPSEPIQPVNTWEISSLPSSTVTSETLPSSLSPSVEKYRYQDEDTPPQEHISPQITNEVIGPELVHVSEKNLSEIENVHGFVSHSHISPIKPTEAVLPSPPTVPVIPVLPVPAENTVILPTIPQANPPPVLVNTDSLETPTYVNGTDADYEYEEITLERGNSGLGFSIAGGTDNPHIGDDSSIFITKIITGGAAAQDGRLRVNDCILRVNEVDVRDVTHSKAVEALKEAGSIVRLYVKRRKPVSEKIMEIKLIKGPKGLGFSIAGGVGNQHIPGDNSIYVTKIIEGGAAHKDGKLQIGDKLLAVNNVCLEEVTHEEAVTALKNTSDFVYLKVAKPTSMYMNDGYAPPDITNSSSQPVDNHVSPSSFLGQTPASPARYSPVSKAVLGDDEITREPRKVVLHRGSTGLGFNIVGGEDGEGIFISFILAGGPADLSGELRKGDRIISVNSVDLRAASHEQAAAALKNAGQAVTIVAQYRPEEYSRFEAKIHDLREQMMNSSISSGSGSLRTSQKRSLYVRALFDYDKTKDSGLPSQGLNFKFGDILHVINASDDEWWQARQVTPDGESDEVGVIPSKRRVEKKERARLKTVKFNSKTRDKGEIPDDMGSKGLKHVTSNASDSESSYRGQEEYVLSYEPVNQQEVNYTRPVIILGPMKDRINDDLISEFPDKFGSCVPHTTRPKRDYEVDGRDYHFVTSREQMEKDIQEHKFIEAGQYNNHLYGTSVQSVREVAEKGKHCILDVSGNAIKRLQIAQLYPISIFIKPKSMENIMEMNKRLTEEQARKTFERAMKLEQEFTEHFTAIVQGDTLEDIYNQVKQIIEEQSGSYIWVPAKEKL

SEQ ID NO: 109404 - DNA, 2676 bp, Artificial Sequence
  derived and/or modified sequence
atgcccgtgagaaagcaggatacacaacgagctctccacctcttggaagagtacaggtccaagctgagccaaacagaggaccggcagctgcggagctccattgaacgcgttataaacatcttccagagcaatttgttccaagccctgatcgacatccaagaattttatgaggtcactctgctcgacaatcccaaatgcatcgataggtctaaaccgtctgagcccatccagcccgttaacacttgggagatatcttcactgccctcttccaccgtgactagtgaaacactaccctcatcactttctccgagcgtagaaaaatacaggtatcaagacgaagacaccccaccccaagaacatatttctcctcagattacgaatgaggtaattgggcccgagttggtacatgtgtctgagaaaaatctgagcgagattgagaatgtccatggcttcgtgtctcattcgcacatctccccaataaaacccaccgaggccgtcctgcctagtcctcccacagttccggttatcccagtcctcccagtcccagctgagaataccgttatcctgcccactatacctcaggccaacccaccccccgtgctggtgaacaccgatagcttggagaccccgacctacgtaaacggaaccgacgctgactatgaatatgaagaaatcaccctcgaacgcgggaacagcggactagggttctccatcgccggcggtacagataacccccatatcggcgacgatagcagtatctttattaccaagatcataacgggcggcgcagccgcgcaagacggtcggctgcgggtcaacgactgtatcctccgtgtaaacgaggtggacgtgagggatgttactcatagcaaagccgtggaggccttaaaggaagccgggagcatagtacgtctgtatgtgaaaaggcggaaacctgtgtccgaaaagataatggagattaaactgatcaaaggcccgaagggactcggctttagcatcgccggcggtgttggtaaccagcacataccaggggataatagtatctacgtcacaaagattatcgagggaggcgccgctcataaagatggaaaattgcaaatcggtgacaagttacttgcagttaataacgtctgcctggaggaggtcacacacgaggaagcggtgactgcgctgaaaaacactagcgactttgtgtacctgaaggtcgcaaagccaacatcaatgtatatgaatgacggctatgccccacccgacatcactaactcctctagccagcccgttgacaaccacgtgtccccaagcagcttcctcggtcagactcccgcttcaccagcgcggtactctccagtctctaaggccgttctgggagacgacgaaatcacaagagagcccaggaaagtggtgctgcaccgtggtagcacagggctgggcttcaacattgtgggaggagaggacggtgagggaatctttatttctttcattctcgccggtgggccagctgatcttagtggcgagttaagaaaaggcgatcgaatcatctcagtaaattccgttgatctgcgggctgccagccatgagcaagctgccgcagcactcaaaaatgcaggacaagccgtcacgattgttgcccagtatcgccctgaagaatactctcgcttcgaagcaaagattcacgacctcagggaacaaatgatgaactcttctatttccagtgggtccggcagcctgaggactagccagaaacggagtctgtacgtgcgcgccctttttgattatgataaaaccaaagactcaggattacccagtcagggcctgaacttcaagtttggcgatatcctgcatgtgatcaacgccagcgacgacgagtggtggcaagcccgccaggtaaccccagatggcgaatcagatgaagtcggagttataccctccaaaaggcgcgtggagaagaaggaacgcgctcggctgaagaccgttaagtttaactcaaagacgcgggacaagggggaaataccggatgacatgggaagcaagggcctcattggggggcaagaggaatacgtcctctcatacgagcccgtgaatcagcaagaggtgaattacacgagaccggtcattatcctgggccctatgaaagataggatcaacgacgatctgatatccgagtttcctgataagttcgggtcatgcgtgccacacaccacacggcctaaacgagattacgaggttgatggtagggattaccatttcgtcacctccagggaacagatggagaaggacatccaagagcataaatttatcgaagctggtcagtacaataatcatctttatggaaccagtgtccagtcagtaagagaggtcgcagaaaagggcaaacactgtattcttgatgtgagcggcaacgcgattaaaagactacagattgcccagctgtaccccatttccatatttatcaagcctaaatccatggagaatattatggaaatgaacaaaagattaacagaagaacaggcccggaagacttttgaaagggctatgaaactggaacaggagttcacagaacattttacggcaatcgttcagggcgacactctcgaggacatttataaccaagtgaaacagataatcgaagaacaatcagggagttacatctgggtccctgccaaagaaaagctgtag

SEQ ID NO: 109405 - DNA, 2715 bp, Artificial Sequence
  derived and/or modified sequence
atgcctgtcagaaagcaagatacacaacgcgccttacacctccttgaagagtaccggtccaagctctctcaaaccgaggatcggcagcttcggtcctcaattgagcgcgttataaatatcttccagagtaatctgttccaagccctgattgacatccaagaattctacgaggtgaccctattggacaacccaaaatgcatcgatcgctccaaaccttccgaaccgatccaaccagtgaatacctgggaaattagctcactgcccagcagtacagtcacctctgaaactctccctagctccctctccccttcagtggaaaagtaccggtatcaggatgaggatactcctccgcaggaacatatcagcccccagattaccaacgaggtgataggaccagagctcgtgcatgtgtctgaaaagaatctatccgaaatagagaatgtacatggattcgtttcacactctcacatctcacctatcaagcccaccgaagccgttttgccttctccgcccactgtccctgtgatacccgtcctcccagtccccgcggagaacacagtgatcctgccaactatccctcaagcaaatcccccccccgtcttggttaacactgatagtcttgaaacaccaacttatgtgaacggcactgacgccgactatgaatacgaagagatcactttggagcgaggtaacagcggactgggcttctcaatagccggagggactgataatccacatatcggtgacgatagttctatctttattaccaaaataatcactggaggagcagccgctcaggacggtcgtttacgtgtgaacgattgcattcttagggttaatgaggtggatgttcgcgatgttacccactccaaagctgtggaagccctaaaagaagccggctccatcgtgagactgtacgttaagcggagaaagcctgtgtccgaaaaaattatggagattaaactgatcaagggcccaaagggactgggattctctattgcaggaggagtcggtaaccagcacatcccgggagacaacagtatttacgtgactaagatcatcgagggaggagcagcccataaagacggtaagctccaaataggcgataagctgctcgccgtgaacaacgtatgtctggaggaagttacccacgaggaggccgttaccgcactaaaaaacacatcagactttgtatatctaaaggtggccaagccaactagcatgtatatgaatgatgggtacgctcccccagatatcacgaactcaagctcacagcccgttgataaccacgtctcccctagtagcttcctgggtcagacccccgcttcgccggcaagatattcaccggtctctaaggctgtcctcggggacgacgagatcaccagagagccacgcaaggtagtgctccacaggggctcaacaggactgggatttaatattgtcggaggcgaagacggagaaggaattttcatctcctttatactagctggagggcctgctgacctttcaggggaactccggaagggggaccggatcataagtgtgaactctgtcgatctccgcgctgcctcacatgaacaagccgccgctgctctgaagaatgctggtcaggccgtgactatcgtcgcacaataccggccagaggagtattcccggttcgaagctaagatccacgacttacgtgaacagatgatgaatagcagtatctcctctgggtccggatctcttcggacgagccagaaaagatccctgtacgtgcgcgcactttttgattatgacaaaaccaaggattctggactgccatcacagggccttaatttcaaattcggagatatcctccacgtgatcaatgcttcagacgatgaatggtggcaggccagacaagtgaccccagacggagagagcgacgaggtgggagtgattccatcgaaaagacgggtggagaagaaggagagggcacgactgaaaactgtaaagtttaactccaaaaccagagataaaggggagattcccgacgacatggggtctaagggccttaaacacgtgacgagtaacgcaagtgacagcgagtcctcttataggggccaggaggagtacgtcctctcttatgagcctgtaaaccagcaggaggttaattacacacgacccgtaatcatcttggggcctatgaaggatcgcatcaatgacgacctcatctcagaatttccggataaattcggctcttgtgtgccccacacgactagacctaaaagagattacgaagtggatggaagggactaccacttcgtaacatcgagggaacagatggaaaaggatattcaagaacataaattcatcgaggcaggacagtacaacaatcatctgtatggaacttcagttcagagtgtgagggaggtggccgaaaaaggcaaacactgcattctggacgtgtctggcaacgccatcaagaggctgcaaatcgcacaactctaccctattagcatcttcataaaacctaagagcatggagaatataatggagatgaataaacggctgaccgaggagcaggcaagaaagacattcgagcgggcaatgaaactggaacaggagtttacagagcatttcactgccatcgtgcagggggatacactggaggatatttataaccaggtgaaacaaattattgaagaacagtctggctcttacatctgggtgccggccaaggaaaaactctag

SEQ ID NO: 109406 - DNA, 2715 bp, Artificial Sequence
  derived and/or modified sequence
atgcccgtgcgcaagcaggatacgcagcgggccctgcatctgctggaggaatataggtctaaactctcgcaaacagaggaccgccaattaaggtcttcaattgagagggtgatcaacatcttccagagtaacctgttccaggcactcattgacatacaggagttttacgaggtgaccctccttgataaccctaagtgcatcgacaggtcaaaaccctcggaaccgatccagcccgttaacacttgggagatttctagtctgccttcttctacagttacgtccgagaccctgccttctagcctttcaccctctgtcgaaaaataccgttatcaggatgaggacacaccccctcaggagcatatctccccccagatcaccaacgaggttatcggacctgagctcgttcacgtttctgagaaaaacctgagcgagatcgaaaatgtgcacgggtttgtatcccattcccacattagtcccataaagccaaccgaagccgtgctgccaagcccgccaaccgtccctgtgattcctgtcctgcctgtgcccgcggagaatacggtgatccttcccactattccacaagccaatccaccccccgttctcgtcaacacggatagtctcgagacacccacatatgtaaatgggaccgatgcagactatgagtacgaagaaatcactctggaaaggggcaactctggactggggttctccatcgccggtggcaccgataacccccacattggtgacgactcttctatcttcataacaaaaatcattaccggcggtgcagcagcccaagatggccgcctgcgggtcaatgactgtattttgcgggtgaacgaggttgacgtgagagacgtgacccattcaaaggctgtggaagctcttaaggaagccggcagcatagtgcggctgtatgttaaacggcgaaagccagttagcgaaaaaatcatggagattaagctcattaaagggcctaaggggttgggattcagcatcgccgggggcgtggggaaccagcacattccaggcgacaacagtatatacgtcaccaagatcattgagggcggagctgcccataaggacggcaaactgcagatcggagacaagcttcttgctgtgaacaacgtgtgtctagaagaagtaacccacgaagaagccgttactgccctgaaaaatacaagcgattttgtgtatttgaaggtggcaaagccaacgtctatgtacatgaatgatggttacgcaccacctgatattacaaacagctcttctcagcccgtggacaaccatgttagccccagctctttcctcggccagacacccgcatcaccggctaggtattctcccgtgtcaaaagctgtgctcggcgatgatgaaatcacccgcgagccccgtaaagttgtactgcaccgagggtcaaccgggttgggattcaatatcgttggtggggaggacggtgaaggaattttcatctcctttattctagcaggaggacctgcggatttgagcggcgagcttcgcaaaggggataggatcatcagtgtaaattctgtggatctgcgcgcagcctcccacgaacaggccgccgccgccttgaaaaacgccggccaggctgtaacaattgtggcacagtacaggcctgaagaatattcacggtttgaggccaagattcacgacctcagagagcagatgatgaatagtagcatttcctctggcagcggaagcctcaggacaagccagaagcggtctctctacgtgcgagcactctttgactatgataaaacaaaggacagcgggctgccaagccaggggctgaactttaagtttggggacatcctccatgtaattaacgctagcgatgatgaatggtggcaggcaaggcaggtgacacctgatggggaaagcgacgaggtgggcgtgatcccatcaaagcgacgtgtagaaaagaaggagcgggcccgtcttaaaactgttaagttcaactccaagaccagagacaagggggagatcccagatgacatgggaagtaaagggttaaaacatgtcactagcaacgctagcgattctgaatcatcctaccgaggacaggaggagtatgtattatcctacgaacctgttaaccagcaggaggtaaattacaccagacccgtgattattctcggccccatgaaagacagaatcaacgatgatctaatatctgaatttccagacaaattcggctcctgtgtaccacacacaactcggccaaagcgagattacgaagtggatggacgggattaccacttcgttacctcaagagagcagatggaaaaggacattcaggaacataaatttattgaagccggccaatacaataatcacttgtatggaacttctgtacagtctgttagggaggtggccgaaaaggggaagcattgtatcctggacgtctccggcaacgccatcaagcgtttacaaatcgcccagctctacccaatttcgatcttcatcaaacccaagtcaatggaaaacattatggaaatgaacaaacggttgaccgaggagcaggctagaaagaccttcgaaagggctatgaagctggagcaggaatttaccgaacatttcaccgctatagtacagggtgacacccttgaggatatctataaccaggtcaagcagattatcgaagagcagtccggcagctatatttgggtgcccgctaaagaaaagctttag

SEQ ID NO: 109407 - DNA, 2676 bp, Artificial Sequence
  derived and/or modified sequence
atgcctgtgaggaagcaggacacccagagggccctgcacctgctggaggagtaccgcagcaagctgagccagacagaggaccggcagctgcggagcagcattgaaagagtcatcaacatcttccagagcaacctcttccaggccctgattgacatccaggagttctatgaggtgaccctgctggacaaccccaagtgcatcgacaggagcaagcccagcgagcccatccagcctgtgaacacctgggagatcagcagcctgcccagcagcacagtgaccagcgagaccctgcccagcagcctgagccccagcgtggagaagtaccgctaccaggatgaggacaccccaccccaggagcacatcagcccccagatcaccaatgaagtcatcggccctgagctggtgcacgtgtctgagaagaacctgtctgaaattgaaaatgtgcacggctttgtgagccacagccacatcagccccatcaagcccacagaagctgtgctgcccagcccccccaccgtgcctgtgattcctgtgctgcctgtgcctgctgagaacacagtcatcctgcccaccatcccccaggccaaccccccacctgtgctggtgaacacagacagcctggagacccccacctacgtgaatggaacagatgctgactatgaatatgaggagatcaccctggagcggggcaacagcggcctgggcttcagcattgctgggggcacagacaacccccacatcggagatgacagcagcatcttcatcaccaagatcatcaccggcggggccgccgcccaggacggccgcctgcgggtgaatgactgcatcctgcgggtgaatgaggtggatgtgagagatgtgacccacagcaaggctgtggaggccctgaaggaggccggcagcatcgtgcggctgtatgtgaagaggaggaagcctgtgtctgagaagatcatggagatcaagctgatcaagggccccaagggcctgggcttcagcattgctgggggcgtgggcaaccagcacatccctggggacaacagcatctacgtgaccaagatcatcgagggcggggccgcccacaaggatggcaagctgcagattggagacaagctgctggccgtgaacaacgtgtgcctggaggaggtgacccatgaggaggccgtgacagccctgaagaacaccagtgactttgtgtacctgaaggtggccaagcccacctccatgtacatgaatgatggctacgcccccccagacatcaccaacagcagcagccagcctgtggacaaccacgtgagccccagcagcttcctgggccagaccccagccagccctgcccgctacagccctgtgtccaaggctgtgctgggagatgatgagatcacccgggagcccaggaaggtggtgctgcaccggggcagcacaggcctgggcttcaacatcgtgggcggggaggatggagagggcatcttcatctccttcatcctggccggcggccctgctgacctgtctggagagctgaggaagggggaccgcatcatctctgtgaacagcgtggacctgcgggccgccagccatgagcaggccgccgccgccctgaagaatgccggccaggccgtgaccatcgtggcccagtacagacctgaggagtacagcagatttgaggccaagatccatgacctgcgggagcagatgatgaacagcagcatcagcagcggcagcggcagcctgcggaccagccagaagaggagcctgtatgtgcgggccctgtttgattatgacaagaccaaggacagcggcctgcccagccagggcctgaacttcaagtttggagacatcctgcacgtgatcaatgccagtgatgatgagtggtggcaggcccggcaggtgaccccagatggagagagtgatgaggtgggcgtcatccccagcaagagaagagtggagaagaaggagcgggcccggctgaagacagtgaagttcaacagcaagacccgggacaagggggagatcccagatgacatgggcagcaagggcctcatcggcggccaggaggagtatgtgctgtcctatgagcctgtgaaccagcaggaggtgaactacaccaggcctgtgatcatcctgggccccatgaaggaccgcatcaatgatgacctgatcagcgagttcccagacaagtttggcagctgtgtgccccacaccacccggcccaagagggactatgaggtggatggccgggactaccactttgtgaccagccgggagcagatggagaaggacatccaggagcacaagttcatcgaggccggccagtacaacaaccacctgtatggcacctctgtgcagagcgtgcgggaggtggccgagaagggcaagcactgcatcctggatgtgtctggaaatgccatcaagaggctgcagatcgcccagctgtaccccatcagcatcttcatcaagcccaagtccatggagaacatcatggagatgaacaagaggctgacagaggagcaggccaggaagacctttgagcgggccatgaagctggagcaggagttcacagagcacttcaccgccatcgtgcagggcgacaccctggaggacatctacaaccaggtgaagcagatcatcgaggagcagagcggcagctacatctgggtgcctgccaaggagaagctgtag

SEQ ID NO: 109408 - DNA, 2715 bp, Artificial Sequence
  derived and/or modified sequence
atgcctgtgaggaagcaggacacccagagggccctgcacctgctggaggagtaccgcagcaagctgagccagacagaggaccggcagctgcggagcagcattgaaagagtcatcaacatcttccagagcaacctcttccaggccctgattgacatccaggagttctatgaggtgaccctgctggacaaccccaagtgcatcgacaggagcaagcccagcgagcccatccagcctgtgaacacctgggagatcagcagcctgcccagcagcacagtgaccagcgagaccctgcccagcagcctgagccccagcgtggagaagtaccgctaccaggatgaggacaccccaccccaggagcacatcagcccccagatcaccaatgaagtcatcggccctgagctggtgcacgtgtctgagaagaacctgtctgaaattgaaaatgtgcacggctttgtgagccacagccacatcagccccatcaagcccacagaagctgtgctgcccagcccccccaccgtgcctgtgattcctgtgctgcctgtgcctgctgagaacacagtcatcctgcccaccatcccccaggccaaccccccacctgtgctggtgaacacagacagcctggagacccccacctacgtgaatggaacagatgctgactatgaatatgaggagatcaccctggagcggggcaacagcggcctgggcttcagcattgctgggggcacagacaacccccacatcggagatgacagcagcatcttcatcaccaagatcatcaccggcggggccgccgcccaggacggccgcctgcgggtgaatgactgcatcctgcgggtgaatgaggtggatgtgagagatgtgacccacagcaaggctgtggaggccctgaaggaggccggcagcatcgtgcggctgtatgtgaagaggaggaagcctgtgtctgagaagatcatggagatcaagctgatcaagggccccaagggcctgggcttcagcattgctgggggcgtgggcaaccagcacatccctggggacaacagcatctacgtgaccaagatcatcgagggcggggccgcccacaaggatggcaagctgcagattggagacaagctgctggccgtgaacaacgtgtgcctggaggaggtgacccatgaggaggccgtgacagccctgaagaacaccagtgactttgtgtacctgaaggtggccaagcccacctccatgtacatgaatgatggctacgcccccccagacatcaccaacagcagcagccagcctgtggacaaccacgtgagccccagcagcttcctgggccagaccccagccagccctgcccgctacagccctgtgtccaaggctgtgctgggagatgatgagatcacccgggagcccaggaaggtggtgctgcaccggggcagcacaggcctgggcttcaacatcgtgggcggggaggatggagagggcatcttcatctccttcatcctggccggcggccctgctgacctgtctggagagctgaggaagggggaccgcatcatctctgtgaacagcgtggacctgcgggccgccagccatgagcaggccgccgccgccctgaagaatgccggccaggccgtgaccatcgtggcccagtacagacctgaggagtacagcagatttgaggccaagatccatgacctgcgggagcagatgatgaacagcagcatcagcagcggcagcggcagcctgcggaccagccagaagaggagcctgtatgtgcgggccctgtttgattatgacaagaccaaggacagcggcctgcccagccagggcctgaacttcaagtttggagacatcctgcacgtgatcaatgccagtgatgatgagtggtggcaggcccggcaggtgaccccagatggagagagtgatgaggtgggcgtcatccccagcaagagaagagtggagaagaaggagcgggcccggctgaagacagtgaagttcaacagcaagacccgggacaagggggagatcccagatgacatgggcagcaagggcctgaagcacgtgaccagcaatgccagtgacagcgagagcagctaccggggccaggaggagtatgtgctgtcctatgagcctgtgaaccagcaggaggtgaactacaccaggcctgtgatcatcctgggccccatgaaggaccgcatcaatgatgacctgatcagcgagttcccagacaagtttggcagctgtgtgccccacaccacccggcccaagagggactatgaggtggatggccgggactaccactttgtgaccagccgggagcagatggagaaggacatccaggagcacaagttcattgaagctggccagtacaacaaccacctgtatggcacctctgtgcagagcgtgcgggaggtggccgagaagggcaagcactgcatcctggatgtgtctggaaatgccatcaagaggctgcagatcgcccagctgtaccccatcagcatcttcatcaagcccaagtccatggagaacatcatggagatgaacaagaggctgacagaggagcaggccaggaagacctttgagcgggccatgaagctggagcaggagttcacagagcacttcaccgccatcgtgcagggcgacaccctggaggacatctacaaccaggtgaagcagatcatcgaggagcagagcggcagctacatctgggtgcctgccaaggagaagctgtag

SEQ ID NO: 109409 - DNA, 2676 bp, Artificial Sequence
  derived and/or modified sequence
atgcccgtgcggaagcaggacacccagcgggccctgcacctgctggaggagtatcggtccaaactgtcacaaactgaagataggcagttgagatcctcaatcgaacgcgttatcaacatattccagtccaatctctttcaggccctgatcgacattcaagagttttatgaggtcaccttgttggataaccccaagtgtatcgatcgctccaaaccctctgagcccatccaacctgtcaatacatgggagatctcgagccttccgagctcaaccgtgacgtccgagactttgccgtcctctttatccccctccgtggaaaagtatcggtatcaggacgaggatactccaccacaggagcacatctcaccacagataaccaacgaggtcatcggccccgaactggttcatgtatctgaaaagaatctgtccgaaattgaaaatgtccacggattcgttagtcattctcacatttcaccaatcaaacccaccgaggcagtgttgccttcaccgcctacggtccccgtcattcccgttctaccagtgccggctgagaacacagtgatactccccaccattccgcaggccaacccccctcccgttctggtgaacaccgattctctcgagacgcctacatacgtaaatggcaccgatgctgattatgaatatgaagagatcactctcgaacgaggaaattccggcctgggattctcaatcgccggcggcactgacaatcctcacataggcgacgacagcagcatttttatcaccaaaatcatcaccggtggggccgccgcccaagacgggaggctgcgtgtcaatgactgcattttacgtgtgaatgaagtggacgtgcgtgacgtcacccattctaaggccgtggaggcactaaaagaagccggatccattgttcggctgtatgtgaaacgtcggaagccggtgtcagaaaaaattatggaaatcaagctgatcaaaggaccaaagggactggggtttagtattgccggcggtgtgggtaatcagcatataccaggtgacaacagcatatacgttaccaagatcatcgagggcggggcagcgcataaagatggaaagctgcagattggagataaactgctagccgtgaacaatgtgtgtctggaggaggttactcacgaagaggctgtgactgcgcttaaaaacacctcagattttgtgtatcttaaagttgccaagcccacaagcatgtacatgaacgacggttacgctccccctgatattacaaactcctcctcccagcccgtggataatcacgtttctccatccagtttcctgggccagactcccgcaagtcccgctcggtacagcccggtttccaaggccgtgctcggcgacgatgagatcactagagagcctcgcaaagtagtcctgcatcggggctcgaccggcttaggctttaacatcgtcggcggggaagacggggagggcattttcattagtttcattttggccgggggtcctgcagacctgagcggagaactccggaaaggcgatagaattatcagtgtgaactcggtagatctgcgggcagcatcccatgaacaagctgcagctgcactgaaaaatgctggacaggccgtgacaatagtagcccagtataggcccgaggagtattcgaggttcgaggctaaaatccatgatcttcgcgagcagatgatgaactctagtatttccagtggctcaggatctcttcgtacgtcacagaaacgaagtctgtacgtccgcgctctattcgactacgacaaaactaaggatagcgggttgcctagccagggacttaatttcaagttcggcgacatcttgcacgtgataaatgccagtgatgacgagtggtggcaggccaggcaggttacgcctgatggagagagcgacgaggttggcgtgattccatcaaagcgccgagtcgaaaaaaaggaacgcgcaagactgaaaactgtgaaatttaactccaagactcgtgataagggcgagattccagacgatatgggttcaaagggactgattggcggccaggaagaatatgtgctttcctatgaaccagtgaaccagcaggaggtgaattatacaagacctgtgatcatcctcgggcccatgaaggaccgcattaacgatgatctgataagcgagtttcctgacaaattcgggagttgcgtcccgcacaccacccggcctaagcgggattacgaggtcgatggccgggactaccattttgtgacttctcgtgagcagatggagaaagatatccaggagcataagtttattgaggccggacagtacaataatcatctttacggaacgtctgtccagagtgtgcgcgaggttgcggaaaaaggcaagcattgcattcttgatgtgtcagggaatgccatcaagagacttcagatcgctcaactgtacccaatttccattttcatcaagccaaaaagcatggagaacataatggaaatgaacaaaagactgaccgaggagcaggctcggaagacattcgaacgggcaatgaagctggaacaggagttcactgaacactttacagccattgtgcagggggacactctggaagatatctacaatcaggtgaagcaaatcatagaggagcaatctggcagctatatttgggttcccgccaaggaaaaactgtag

SEQ ID NO: 109410 - DNA, 2715 bp, Artificial Sequence
  derived and/or modified sequence
atgcccgtgcggaagcaggacacccagcgggccctgcacctgctggaagagtaccgcagtaagcttagccagaccgaggaccgccaactgcgctccagtatcgagagggtcattaatatcttccagagtaatctgtttcaggcactgatcgatattcaggagttctatgaagtgaccctcctcgataatcctaaatgtatcgacagatctaagccaagcgagccgatccaacctgtgaatacttgggaaatctcctcgttgccctcctctaccgttacatccgaaaccctcccttcatcactgagtccatcagtggaaaagtatagataccaagacgaagataccccaccccaagagcacatctccccacagatcacaaacgaggtgatcggccctgagcttgtccacgtttccgagaagaacctcagtgagatagagaacgtgcatggttttgtgagccactcccacatcagtccaatcaagcccacggaggccgtacttccgagtccaccaactgtccctgtcatccccgtattaccggtccctgcagaaaacacggtgatcctgcctacaattcctcaagctaatccaccccccgtcttagtcaacaccgacagcctggagaccccaacctacgtaaacggaacggacgcagattacgaatacgaagagattaccttagagcgtggaaactccggcctggggtttagtatcgctgggggcacagacaacccccacatcggcgatgactcctccatctttattaccaagattatcaccggtggtgcagccgcgcaggacggtcgcctcagagtgaatgattgtattctaagagtgaacgaagttgacgtcagggacgtgacacattcaaaagccgtggaggcactcaaggaagccggcagcattgttcgcttatatgtcaagagaagaaagcctgtcagtgagaagattatggagatcaagctcataaaaggcccaaagggactggggttcagtatcgccgggggagtcgggaaccagcatatcccgggggacaacagcatatatgtgaccaagatcattgaggggggcgctgcgcataaggacggcaaactgcagatcggagataagcttcttgctgttaacaatgtgtgcctggaagaggtgactcatgaggaagcagtaacagcattgaaaaacacgtctgatttcgtctatctgaaggtagcaaaacccactagcatgtatatgaatgatgggtatgccccaccagacataaccaactcgtccagccagcccgtcgataaccatgtttccccatcgtctttcctgggccagacacccgcctcaccggctagatatagtccagtgagtaaggcggtactaggagatgatgagattacgagggagcctagaaaggtggtccttcaccggggttctacaggtttaggattcaacattgtcggtggggaggatggagaagggattttcatctcctttatcctcgcgggggggcccgccgatctctctggtgaactgcggaagggagatagaatcatctccgttaatagcgtcgacctgcgggctgcctcacacgaacaggctgctgccgctctcaagaatgctggacaggcagtgacgatagtggcccagtatcgccctgaggaatattcacgttttgaggctaagatccacgatctgcgcgagcagatgatgaactcctctattagctctggatccggtagcctgaggactagtcagaagcggagtctatacgtcagggccctgttcgactatgacaagaccaaggattctggcctgccaagccagggcctcaactttaaattcggagatatcttacacgtaatcaatgcatcagatgacgaatggtggcaggctcggcaggttacccctgacggggagagtgacgaggtgggtgtgattccttcgaagcggcgggtcgagaaaaaagagcgagccaggctgaagacagttaagttcaactctaaaactagggacaaaggcgagatccctgacgacatgggcagtaaaggcctgaaacatgtcacttctaacgcaagcgactccgagtcgagttatagaggacaggaggagtacgtgctaagttatgaacctgtgaaccagcaggaagttaactacacccgaccagtgattatccttggccccatgaaggacagaatcaacgacgacttgatttcagagttccccgacaagtttggctcttgcgtccctcacacaacccggcccaaacgggactacgaggttgacgggagggattaccactttgttacaagtcgcgagcagatggagaaggatatccaggaacataagttcatcgaggcagggcaatacaacaaccatctctacggtacttcagtccagagcgtgagagaagtggcggagaaaggaaagcactgcatcctagatgtgagtggaaacgctattaaacggcttcagatcgctcagctgtatcccatttctattttcattaagccgaagagcatggaaaatattatggagatgaataagcggctgaccgaggaacaggctcggaaaaccttcgagagagccatgaagctggagcaggagtttaccgagcactttaccgcgatagtgcaaggcgatacactagaggacatctacaaccaggttaagcagatcattgaagagcagtcagggtcttatatctgggtccccgcaaaggagaagttatag

SEQ ID NO: 109411 - DNA, 2715 bp, Artificial Sequence
  derived and/or modified sequence
atgcccgtgcggaagcaggacacccagcgggccctgcacctgctggaggaatacaggtctaaattatcacaaacagaggacagacagctccggtcatcaattgaacgcgtcatcaatattttccagagcaaccttttccaagccctgatcgatattcaagaattctatgaagttaccttgctggataatccaaagtgcatcgatcgctccaaacccagcgaacccatccaaccagttaacacctgggaaatatctagtttgccatccagcaccgttactagcgaaaccctgccttcctctctgagccctagtgtcgagaaatacagataccaagatgaggacacacccccacaggagcacatatctccacaaatcaccaacgaggtgatcggacccgaactcgtgcatgtaagtgaaaaaaacctaagcgagatcgagaatgtacacgggtttgtttcccatagccatattagcccaatcaagccaacagaggcggtcctgccttctccccccacagtgccagtcattccagtactgcctgtgcccgcagagaacaccgtaattctgccgacaattccccaggcaaaccctcctcccgttctcgtgaatactgattcgctggagactcctacatacgtcaacggaaccgacgctgattacgagtacgaggaaataaccctagagcgcggaaattccggtctgggattctccatcgccggagggacagataacccccatattggtgatgatagctctatttttataaccaagattattaccggcggcgcagccgctcaggacggcagattacgcgtgaatgactgtattctccgagtcaatgaagtcgatgtgcgcgatgtaacgcactcaaaggccgtcgaagctctcaaagaagccggatctatagtccgcctttatgtgaagaggagaaagccggtttcggagaagatcatggaaattaagttaattaagggtccgaagggcctggggttcagcatcgccgggggtgttgggaaccagcatatacctggtgacaacagcatatatgttacaaaaatcattgagggcggcgctgcccacaaggacggtaaattgcagattggagacaagcttctggcagtaaacaacgtgtgcctcgaggaggttacgcacgaggaagctgtaacagccctgaagaacacaagcgatttcgtttatctaaaagtggctaagcctacaagtatgtacatgaatgatggatacgctcctcccgacatcacaaattcctctagtcaaccggtcgataaccacgtgtcgcctagttcattcctgggacagaccccagcatcacccgctcggtatagcccagtaagcaaggccgttctcggagacgacgagattactagagaacctagaaaggtcgtccttcaccggggaagcacaggcttgggattcaacatcgtgggcggagaagacggagagggcattttcataagctttatccttgcaggtgggccagccgatctgagcggagaactgcgcaaaggtgacagaattatctccgtcaactcggtcgacctgagagccgccagccacgagcaggcagccgccgcacttaagaacgcaggccaagccgtgaccattgtcgctcagtaccgacccgaggagtacagcagatttgaggccaagatccacgatctccgagagcaaatgatgaattcaagtatttcatccggatctgggagtctccgaacatcccaaaagcgctcactgtacgttcgagcccttttcgattacgataaaacaaaggattccggcctcccctctcagggtttaaacttcaaatttggggacatactgcacgttattaatgcttctgacgacgagtggtggcaggccaggcaggtcaccccagacggcgagagtgatgaggtgggggtgatcccatcgaagcggagggtggagaagaaagagcgggcacgccttaagaccgtgaagtttaatagtaaaactcgcgataaaggcgagatccccgacgacatgggctccaagggcctaaaacatgtaacttctaacgctagtgattctgaatccagttaccgcggacaggaggagtatgtgttatcttacgaacctgtaaatcagcaggaagtgaattacactcggccggtcattattctcggcccaatgaaggataggatcaatgatgatctcattagtgagtttccggacaagtttgggtcgtgcgtaccacacaccacccgacctaagagggattacgaagtggacggacgggattatcacttcgtgacttcgagggaacagatggagaaggacattcaggagcacaagttcatcgaggcggggcagtacaacaaccacctgtatgggaccagcgtgcaaagcgttcgggaggtcgcggagaaaggaaagcactgtattcttgatgtaagtggtaatgctataaaaaggctgcaaatagcccaactgtatcctatctctatttttatcaagcctaaatctatggagaatattatggaaatgaacaagcggctaactgaggagcaagcccgtaaaactttcgagcgggcgatgaaattggagcaagaatttaccgagcactttacagcaattgtgcaaggcgatacgctggaggatatatataaccaggtgaaacagattattgaagagcagagtggatcctacatatgggtgcctgcaaaggaaaagctctag

SEQ ID NO: 109412 - DNA, 2676 bp, Artificial Sequence
  derived and/or modified sequence
atgcccgtgagaaaacaggatactcagcgggcactacatctgctggaggaataccgatccaaattgagtcagaccgaggaccggcagctcaggagtagtatcgaacgcgtgataaatatcttccaaagcaacctatttcaggccctgatcgacatccaggaattttacgaggtcaccctcctggataaccctaagtgtattgaccggtccaaaccttccgagccgatacagccggtgaatacatgggagatatcatcattgccaagtagcactgttacctcagaaaccttaccctcgagcctgagcccaagtgttgagaaataccgttatcaggatgaagacacccctccgcaggagcacataagtccccaaatcacgaacgaagtgatcggcccagaattagtgcacgtgtcagagaaaaacctctcggagatagaaaacgtgcatggctttgtttctcattctcacatatctcccatcaaacctactgaagccgtgctgccttcccccccaaccgtgcctgtcattcctgtgctccctgtgccggctgagaacaccgttattctccccacgatccctcaggccaacccaccacctgttctggtcaataccgatagcctcgaaacccccacttatgtgaacgggaccgatgcagactacgaatacgaagaaattacacttgagcgtggaaactccggtcttggttttagtattgctgggggaaccgataacccacacattggggatgattctagcatttttatcaccaaaatcataactggaggggctgccgctcaggacggcaggctgcgcgtgaatgactgcatcctaagggttaatgaggttgacgtgagagatgtcactcactcaaaggccgtcgaggccctaaaagaagccggtagcattgtcagactatacgtcaaacgcagaaaacccgtgtctgaaaaaatcatggagattaaactgatcaagggccctaaaggactcggcttcagcatcgctggaggagtgggaaatcaacacatccctggagacaattccatctacgtaacgaagattattgagggaggcgctgcacacaaggacggtaagctgcaaatcggggacaagctcctggccgtgaataacgtatgtttggaagaggtgacccacgaagaggcggtgactgcactcaagaataccagtgacttcgtgtatctgaaagttgccaagcctaccagcatgtacatgaacgatgggtacgcaccaccagatatcaccaactcaagttctcagccagttgacaaccacgtcagcccgagctccttcttgggacagactcctgcttcccctgcacggtactcgccagtcagtaaggcagtgttaggagacgatgaaatcactcgggagccacgtaaagtggtcctccaccgtggatccactgggcttggctttaacattgtagggggtgaggacggcgaaggaatcttcataagcttcatcctcgcaggcggacccgcagatctgagtggagagctgaggaagggcgaccgaatcatttcagtgaattctgtcgatctcagggctgcctcccatgagcaggccgcagccgctctcaagaacgccggacaagctgttacaattgtcgcacagtataggcctgaagaatattcaagatttgaggctaaaatccacgatctacgggaacagatgatgaattccagcatttcctcaggaagcggatcgctcagaaccagtcagaaaaggtccttgtacgtcagggcacttttcgattacgacaaaacaaaggacagcgggttaccctcacaagggcttaatttcaaattcggtgatatattgcatgtcattaatgcgagcgatgatgaatggtggcaggcgcgtcaggtgactccagatggcgagagtgatgaggtaggcgtgataccatctaagaggagagtggagaaaaaggagagagccaggctgaagaccgtgaagttcaattccaaaacgagggacaagggggagattccagacgacatgggctctaaggggctaattggaggacaggaggagtatgtgctcagttacgagcctgtcaatcagcaggaagttaactatacaagacctgtcattatcctgggcccaatgaaggaccgaatcaatgatgacctcatatccgaatttcccgacaagtttggcagctgcgtgccacatacaacgagacccaaacgagactatgaagttgatgggagagactatcacttcgtcacttctcgcgagcagatggaaaaagacatccaggaacacaaattcatcgaggcaggacagtacaataatcatctctacggcacttcagtccaaagcgttagagaggttgccgagaaagggaagcactgcattctcgacgtgtccgggaatgctataaagaggctgcaaatcgcccaactctatcccatttccatctttatcaaaccaaagtcaatggagaacataatggaaatgaataagagactcaccgaggaacaggcgaggaaaaccttcgaacgagccatgaagttagagcaagaatttactgagcacttcacagctattgtccaaggggatacacttgaagacatctataatcaggtgaagcagattattgaggagcagagcggatcgtacatctgggtcccggctaaggagaagctctag

SEQ ID NO: 109413 - DNA, 2715 bp, Artificial Sequence
  derived and/or modified sequence
atgcccgtacggaagcaggacacacagcgggcattacacctgctggaggagtaccgctccaagctttcgcagaccgaggatcggcaattgagaagcagcatcgagagggtgatcaacatttttcaatccaacctgtttcaggctctgatcgacattcaggagttctatgaagtgacactgttggataatcctaagtgcatcgaccggagcaaaccatcggagcccattcagccagtgaacacttgggaaatctcgagcctgccatcgtccacagtgaccagcgagacgttgcctagttcacttagtccatccgtggaaaagtataggtatcaggatgaggatactcctcctcaggagcatatatcacctcagatcaccaacgaggtgattggcccagaactggtccacgtgagcgagaagaaccttagcgagatcgagaatgtccacggctttgtgtcgcattcacatatctctcctatcaagcccaccgaggcagtgttgccaagtcccccaaccgtcccggtaattcctgtcctaccagtcccagctgagaatacggtgatcctgccgaccataccgcaggccaatccgccacctgtcctcgtaaacactgacagtctcgagaccccgacttacgtcaacggcactgatgcggactatgaatatgaggaaattacacttgaacggggaaatagtggcctcggattcagcatagctgggggaacagacaatccgcatataggtgatgactcctctattttcatcaccaagatcattactgggggagcagccgctcaggacggcagactgagggtcaacgactgcatattgcgcgtgaacgaggtcgacgtgagggatgtaacacactccaaagccgtcgaggcactgaaagaggcgggttccatagttcgattgtacgtgaaacggaggaagcccgtctctgaaaaaatcatggaaatcaaactgatcaagggacctaagggactcggcttttccattgccggtggggtgggaaaccagcatatcccaggggataacagcatatatgtgacgaaaataattgagggcggtgctgcgcacaaggatgggaagctgcaaattggagataaacttctcgcagtgaacaatgtgtgtttagaagaggtcacacatgaggaagccgttaccgccctgaaaaacacaagcgacttcgtgtacttgaaagtggctaaacccacgtccatgtatatgaatgatggatacgcccctcccgatatcacgaacagcagtagccagcccgttgataatcatgtgtcccctagctccttcctgggacagacccctgcgtcccctgcaaggtactcccctgtatccaaggcagttttgggcgatgacgaaatcacccgtgaaccaagaaaggtagtgttgcacagaggaagcaccggacttggttttaacattgtcggaggcgaggacggagagggaattttcatttccttcatcttggccggtggcccagcagacctatcgggtgagctgcgaaagggcgaccggatcataagtgtgaatagcgtcgacttaagggccgcatcccacgagcaagcagccgctgcgctcaaaaacgcgggtcaagccgtcaccattgtggcccagtatagaccggaggagtactcgagattcgaagccaaaatccatgacttgagagagcaaatgatgaattcttcgattagtagcggttcggggtccctgcggacaagccagaagcggtcactctacgttcgcgctttgtttgactacgacaagaccaaggatagtggcctgccctcccagggattaaattttaaattcggcgacatcctgcacgtaatcaatgcatctgatgacgaatggtggcaggctcgccaggttacccccgatggcgagtccgacgaggtgggcgtcattccttccaagagacgtgtggagaagaaggagagggcccgtctgaaaaccgtgaaattcaactcgaagactcgggataagggtgagatccccgatgatatggggagtaagggtttgaaacacgtcaccagcaatgcatccgacagtgagtcttcctatagaggacaggaggagtatgttttgtcctatgagcccgtgaaccagcaggaggtgaattatactagacctgttatcattctcggcccaatgaaagatcggattaacgacgatctgatttccgagttccctgataaatttgggtcatgtgttccacacactactcgaccgaaacgtgactacgaggtcgacgggagggattaccactttgtgacttcccgtgagcaaatggaaaaagatatacaggagcacaagttcattgaggcaggacagtacaataaccacctgtacggtacaagcgttcagtccgtgcgggaagtggctgaaaaggggaagcactgcattctggatgtaagtggaaatgcaatcaaaagactccagattgcacagctatacccaattagcattttcattaagcccaaatcgatggaaaatattatggagatgaacaaaaggttgacggaagagcaggcaaggaagacattcgagcgcgctatgaaactggaacaagaattcactgaacatttcacagccatcgttcaaggtgatactctggaagatatttacaatcaggtgaagcagatcatcgaagagcagtctgggagctacatctgggtgccagcgaaggagaagctgtag

SEQ ID NO: 109414 - DNA, 2715 bp, Artificial Sequence
  derived and/or modified sequence
atgcccgtgagaaaacaggatacgcagagggccctgcatttactggaagagtacaggtctaagctatcccagacagaggaccgacaactaagatcatcaatagaacgcgtcataaatattttccagagcaacttatttcaggccctgattgatatccaggagttctatgaagtcaccctcctggataaccctaagtgcattgatcggagtaagccctctgaaccgatacaacctgttaatacttgggagatcagttcactccctagttccacagttacttccgagactctaccatcttccttgagccctagcgtagagaaatacagataccaggatgaggatactcctccacaggaacacattagccctcagataactaacgaggttatcggacccgagctggtgcacgtgtccgaaaaaaatctaagcgagattgagaacgtgcacggatttgtgtcacacagccacataagcccaatcaaacccacggaggctgtcctcccatcgcctcctacagtgcccgtaatacctgtgttgccagtgccggctgaaaatacggttattttgcccacaatcccccaagccaaccctccccctgttttggtgaatactgattcgcttgagactccaacctatgtgaacgggacggatgctgactatgagtatgaagaaattactctggaaagaggaaacagcggactgggcttttcaattgctggcggtacagataacccgcacatcggagacgactcaagcatcttcatcactaaaatcattacaggcggagccgcagcacaggatgggaggctccgcgtgaatgattgcatcctgagagtcaacgaagtcgatgtgagggacgttacccacagcaaggcggttgaagcccttaaagaggccggatccatcgtgcgactctatgtcaagagacgaaagccggtgagcgagaagatcatggagatcaaactgattaaagggccaaaaggcctggggttttcaatcgccggtggagtaggtaatcagcatatcccaggcgacaatagtatctatgtgacgaaaatcatcgaaggaggcgctgcgcacaaggatggaaagctgcaaatcggtgacaagctgttggccgtaaataacgtgtgcctggaagaagttactcacgaagaggccgtgaccgccctgaaaaataccagtgactttgtctacctgaaagtggcaaaacctacatctatgtatatgaacgatggctacgctccaccagatatcacgaacagcagctcacaacccgtcgataatcatgtgtccccctcatctttcttggggcagacacccgcttcccccgctcgctatagccccgtgagcaaggcagtcttgggggacgatgaaataaccagggagccgaggaaagtggtgcttcatcgcggaagcaccggccttggatttaatattgtggggggagaggatggagaaggaattttcattagctttatcctggccggtggacctgctgatctttcaggagaattgcggaagggcgataggatcatcagcgtcaacagtgttgacctcagggcagcgtcacacgagcaggcagccgcagccttgaaaaacgccggtcaggctgtcaccatcgtcgcccagtacaggcctgaggagtattcacgattcgaggctaagatacacgacttgcgggagcagatgatgaactcctccatcagtagtggcagcgggtctttgcgtacctcacagaagcgcagtctctatgtgcgcgcactgttcgactatgacaaaactaaggactcgggcttgccctcccaaggactgaactttaaattcggcgatattctgcatgtaataaacgcctccgatgatgagtggtggcaggcacgccaggtcacgccagacggtgaatccgatgaagttggcgtgatcccctcaaagaggcgcgtggaaaaaaaggaacgggctagactgaaaacagtcaaatttaattctaagaccagggataagggcgaaatccccgatgacatgggctctaagggcctgaaacacgtaactagtaatgcgtctgattccgaatcatcataccggggtcaggaagagtacgtattatcatatgagccagtcaaccaacaggaagtgaactatacccgacctgtcattattctcgggcctatgaaggataggattaatgatgatctgatctctgagttccctgataagtttggaagttgcgtccctcacaccactagaccgaagagagattatgaggtcgatgggagggactaccacttcgtaacatctagggagcaaatggaaaaagatattcaggagcacaagttcatcgaagctgggcagtataataaccacttgtacggaacgagcgtgcaaagcgttagagaagtggcagagaaggggaaacactgtatacttgacgttagcggcaatgcaatcaagcggttacagatcgctcagttatatccaatttccatcttcattaaacctaaatctatggagaacataatggagatgaacaaaagactcacggaagagcaggctaggaagacctttgaacgggctatgaaacttgagcaagaattcaccgagcatttcacagcaattgtgcagggggacaccctggaggacatttacaaccaagtcaagcagataatagaggagcaaagtggctcctacatctgggttccggctaaggagaaactgtag

SEQ ID NO: 109415 - DNA, 2676 bp, Artificial Sequence
  derived and/or modified sequence
atgcccgtgagaaagcaggacacccagagagccctgcacctgctggaggagtacagaagcaagctgagccagaccgaggacagacagctgagaagcagcatcgagagagtgatcaacatcttccagagcaacctgttccaggccctgatcgacatccaggagttctacgaggtgaccctgctggacaaccccaagtgcatcgacagaagcaagcccagcgagcccatccagcccgtgaacacctgggagatcagcagcctgcccagcagcaccgtgaccagcgagaccctgcccagcagcctgagccccagcgtggagaagtacagataccaggacgaggacacccccccccaggagcacatcagcccccagatcaccaacgaggtgatcggccccgagctggtgcacgtgagcgagaagaacctgagcgagatcgagaacgtgcacggcttcgtgagccacagccacatcagccccatcaagcccaccgaggccgtgctgcccagcccccccaccgtgcccgtgatccccgtgctgcccgtgcccgccgagaacaccgtgatcctgcccaccatcccccaggccaaccccccccccgtgctggtgaacaccgacagcctggagacccccacctacgtgaacggcaccgacgccgactacgagtacgaggagatcaccctggagagaggcaacagcggcctgggcttcagcatcgccggcggcaccgacaacccccacatcggcgacgacagcagcatcttcatcaccaagatcatcaccggcggcgccgccgcccaggacggcagactgagagtgaacgactgcatcctgagagtgaacgaggtggacgtgagagacgtgacccacagcaaggccgtggaggccctgaaggaggccggcagcatcgtgagactgtacgtgaagagaagaaagcccgtgagcgagaagatcatggagatcaagctgatcaagggccccaagggcctgggcttcagcatcgccggcggcgtgggcaaccagcacatccccggcgacaacagcatctacgtgaccaagatcatcgagggcggcgccgcccacaaggacggcaagctgcagatcggcgacaagctgctggccgtgaacaacgtgtgcctggaggaggtgacccacgaggaggccgtgaccgccctgaagaacaccagcgacttcgtgtacctgaaggtggccaagcccaccagcatgtacatgaacgacggctacgccccccccgacatcaccaacagcagcagccagcccgtggacaaccacgtgagccccagcagcttcctgggccagacccccgccagccccgccagatacagccccgtgagcaaggccgtgctgggcgacgacgagatcaccagagagcccagaaaggtggtgctgcacagaggcagcaccggcctgggcttcaacatcgtgggcggcgaggacggcgagggcatcttcatcagcttcatcctggccggcggccccgccgacctgagcggcgagctgagaaagggcgacagaatcatcagcgtgaacagcgtggacctgagagccgccagccacgagcaggccgccgccgccctgaagaacgccggccaggccgtgaccatcgtggcccagtacagacccgaggagtacagcagattcgaggccaagatccacgacctgagagagcagatgatgaacagcagcatcagcagcggcagcggcagcctgagaaccagccagaagagaagcctgtacgtgagagccctgttcgactacgacaagaccaaggacagcggcctgcccagccagggcctgaacttcaagttcggcgacatcctgcacgtgatcaacgccagcgacgacgagtggtggcaggccagacaggtgacccccgacggcgagagcgacgaggtgggcgtgatccccagcaagagaagagtggagaagaaggagagagccagactgaagaccgtgaagttcaacagcaagaccagagacaagggcgagatccccgacgacatgggcagcaagggcctgatcggcggccaggaggagtacgtgctgagctacgagcccgtgaaccagcaggaggtgaactacaccagacccgtgatcatcctgggccccatgaaggacagaatcaacgacgacctgatcagcgagttccccgacaagttcggcagctgcgtgccccacaccaccagacccaagagagactacgaggtggacggcagagactaccacttcgtgaccagcagagagcagatggagaaggacatccaggagcacaagttcatcgaggccggccagtacaacaaccacctgtacggcaccagcgtgcagagcgtgagagaggtggccgagaagggcaagcactgcatcctggacgtgagcggcaacgccatcaagagactgcagatcgcccagctgtaccccatcagcatcttcatcaagcccaagagcatggagaacatcatggagatgaacaagagactgaccgaggagcaggccagaaagaccttcgagagagccatgaagctggagcaggagttcaccgagcacttcaccgccatcgtgcagggcgacaccctggaggacatctacaaccaggtgaagcagatcatcgaggagcagagcggcagctacatctgggtgcccgccaaggagaagctgtag

SEQ ID NO: 109416 - DNA, 2715 bp, Artificial Sequence
  derived and/or modified sequence
atgcccgtgagaaagcaggacacccagagagccctgcacctgctggaggagtacagaagcaagctgagccagaccgaggacagacagctgagaagcagcatcgagagagtgatcaacatcttccagagcaacctgttccaggccctgatcgacatccaggagttctacgaggtgaccctgctggacaaccccaagtgcatcgacagaagcaagcccagcgagcccatccagcccgtgaacacctgggagatcagcagcctgcccagcagcaccgtgaccagcgagaccctgcccagcagcctgagccccagcgtggagaagtacagataccaggacgaggacacccccccccaggagcacatcagcccccagatcaccaacgaggtgatcggccccgagctggtgcacgtgagcgagaagaacctgagcgagatcgagaacgtgcacggcttcgtgagccacagccacatcagccccatcaagcccaccgaggccgtgctgcccagcccccccaccgtgcccgtgatccccgtgctgcccgtgcccgccgagaacaccgtgatcctgcccaccatcccccaggccaaccccccccccgtgctggtgaacaccgacagcctggagacccccacctacgtgaacggcaccgacgccgactacgagtacgaggagatcaccctggagagaggcaacagcggcctgggcttcagcatcgccggcggcaccgacaacccccacatcggcgacgacagcagcatcttcatcaccaagatcatcaccggcggcgccgccgcccaggacggcagactgagagtgaacgactgcatcctgagagtgaacgaggtggacgtgagagacgtgacccacagcaaggccgtggaggccctgaaggaggccggcagcatcgtgagactgtacgtgaagagaagaaagcccgtgagcgagaagatcatggagatcaagctgatcaagggccccaagggcctgggcttcagcatcgccggcggcgtgggcaaccagcacatccccggcgacaacagcatctacgtgaccaagatcatcgagggcggcgccgcccacaaggacggcaagctgcagatcggcgacaagctgctggccgtgaacaacgtgtgcctggaggaggtgacccacgaggaggccgtgaccgccctgaagaacaccagcgacttcgtgtacctgaaggtggccaagcccaccagcatgtacatgaacgacggctacgccccccccgacatcaccaacagcagcagccagcccgtggacaaccacgtgagccccagcagcttcctgggccagacccccgccagccccgccagatacagccccgtgagcaaggccgtgctgggcgacgacgagatcaccagagagcccagaaaggtggtgctgcacagaggcagcaccggcctgggcttcaacatcgtgggcggcgaggacggcgagggcatcttcatcagcttcatcctggccggcggccccgccgacctgagcggcgagctgagaaagggcgacagaatcatcagcgtgaacagcgtggacctgagagccgccagccacgagcaggccgccgccgccctgaagaacgccggccaggccgtgaccatcgtggcccagtacagacccgaggagtacagcagattcgaggccaagatccacgacctgagagagcagatgatgaacagcagcatcagcagcggcagcggcagcctgagaaccagccagaagagaagcctgtacgtgagagccctgttcgactacgacaagaccaaggacagcggcctgcccagccagggcctgaacttcaagttcggcgacatcctgcacgtgatcaacgccagcgacgacgagtggtggcaggccagacaggtgacccccgacggcgagagcgacgaggtgggcgtgatccccagcaagagaagagtggagaagaaggagagagccagactgaagaccgtgaagttcaacagcaagaccagagacaagggcgagatccccgacgacatgggcagcaagggcctgaagcacgtgaccagcaacgccagcgacagcgagagcagctacagaggccaggaggagtacgtgctgagctacgagcccgtgaaccagcaggaggtgaactacaccagacccgtgatcatcctgggccccatgaaggacagaatcaacgacgacctgatcagcgagttccccgacaagttcggcagctgcgtgccccacaccaccagacccaagagagactacgaggtggacggcagagactaccacttcgtgaccagcagagagcagatggagaaggacatccaggagcacaagttcatcgaggccggccagtacaacaaccacctgtacggcaccagcgtgcagagcgtgagagaggtggccgagaagggcaagcactgcatcctggacgtgagcggcaacgccatcaagagactgcagatcgcccagctgtaccccatcagcatcttcatcaagcccaagagcatggagaacatcatggagatgaacaagagactgaccgaggagcaggccagaaagaccttcgagagagccatgaagctggagcaggagttcaccgagcacttcaccgccatcgtgcagggcgacaccctggaggacatctacaaccaggtgaagcagatcatcgaggagcagagcggcagctacatctgggtgcccgccaaggagaagctgtag

SEQ ID NO: 109417 - DNA, 4929 bp, Artificial Sequence
  derived and/or modified sequence
gttggaaacggcactgctgagtgaggttgaggggtgtctcggtatgtgcgccttggatctggtgtaggcgaggtcacgcctctcttcagacagcccgagccttcccggcctggcgcgtttagttcggaactgcgggacgcgccggtgggctagggcaaggtgtgtgccctcttcctgattctggagaaaaatgccggtccggaagcaagatacccagagagcattgcaccttttggaggaatatcgttcaaaactaagccaaactgaagacagacagctcagaagttccatagaacgggttattaacatatttcagagcaacctctttcaggctttaatagatattcaagaattttatgaagtgaccttactggataatccaaaatgtatagatcgttcaaagccgtctgaaccaattcaacctgtgaatacttgggagatttccagccttccaagctctactgtgacttcagagacactgccaagcagccttagccctagtgtagagaaatacaggtatcaggatgaagatacacctcctcaagagcatatttccccacaaatcacaaatgaagtgataggtccagaattggttcatgtctcagagaagaacttatcagagattgagaatgtccatggatttgtttctcattctcatatttcaccaataaagccaacagaagctgttcttccctctcctcccactgtccctgtgatccctgtcctgccagtccctgctgagaatactgtcatcctacccaccataccacaggcaaatcctcccccagtactggtcaacacagatagcttggaaacaccaacttacgttaatggcacagatgcagattatgaatatgaagaaatcacacttgaaaggggaaattcagggcttggtttcagcattgcaggaggtacggacaacccacacattggagatgactcaagtattttcattaccaaaattatcacagggggagcagccgcccaagatggaagattgcgggtcaatgactgtatattacgagtaaatgaagtagatgttcgtgatgtaacacatagcaaagcagttgaagcgttgaaagaagcagggtctattgtacgcttgtatgtaaaaagaaggaaaccagtgtcagaaaaaataatggaaataaagctcattaaaggtcctaaaggtcttgggtttagcattgctggaggtgttggaaatcagcatattcctggggataatagcatctatgtaaccaaaataattgaaggaggtgcagcacataaggatggcaaacttcagattggagataaacttttagcagtgaataacgtatgtttagaagaagttactcatgaagaagcagtaactgccttaaagaacacatctgattttgtttatttgaaagtggcaaaacccacaagtatgtatatgaatgatggctatgcaccacctgatatcaccaactcttcttctcagcctgttgataaccatgttagcccatcttccttcttgggccagacaccagcatctccagccagatactccccagtttctaaagcagtacttggagatgatgaaattacaagggaacctagaaaagttgttcttcatcgtggctcaacgggccttggtttcaacattgtaggaggagaagatggagaaggaatatttatttcctttatcttagccggaggacctgctgatctaagtggagagctcagaaaaggagatcgtattatatcggtaaacagtgttgacctcagagctgctagtcatgagcaggcagcagctgcattgaaaaatgctggccaggctgtcacaattgttgcacaatatcgacctgaagaatacagtcgttttgaagctaaaatacatgatttacgggagcagatgatgaatagtagtattagttcagggtcaggttctcttcgaactagccagaagcgatccctctatgtcagagccctttttgattatgacaagactaaagacagtgggcttcccagtcagggactgaacttcaaatttggagatatcctccatgttattaatgcttctgatgatgaatggtggcaagccaggcaggttacaccagatggtgagagcgatgaggtcggagtgattcccagtaaacgcagagttgagaagaaagaacgagcccgattaaaaacagtgaaattcaattctaaaacgagagataaaggggagatccctgacgacatgggatcaaaaggcctgataggtggtcaagaagaatacgtcttatcttatgaaccagtgaatcaacaagaagttaattatactcgaccagtgatcatattgggacctatgaaagacaggataaatgatgacttgatctcagaatttcctgacaaatttggatcctgtgttcctcatacaactagaccaaaacgagattatgaggtagatggaagagattatcattttgtgacttcaagagagcagatggaaaaagatatccaggaacataaattcattgaagctggccagtataacaatcatctatatggaacaagtgttcagtctgtacgagaagtagcagaaaagggcaaacactgtatccttgatgtgtctggaaatgccataaagagattacagattgcacagctttaccctatctccatttttattaaacccaaatccatggaaaatatcatggaaatgaataagcgtctaacagaagaacaagccagaaaaacatttgagagagccatgaaactggaacaggagtttactgaacatttcacagctattgtacagggggatacgctggaagacatttacaaccaagtgaaacagatcatagaagaacaatctggttcttacatctgggttccggcaaaagaaaagctatgaaaactcatgtttctctgtttctcttttccacaattccattttctttggcatctctttgccctttcctctggagtctttcttgagtactgatttcatgttgaattgtatcccacacatcatggtctgcagcttctttttcacatgtagtgtctccttcaagttacatcgtgtgtattatttaatgtcactattggttagtggccatttttcagaactgaagatggaatggcctgaccagctattaagaacgtggggagacgcagaaattgtggtaaaattccttaatgtttaagggaaagtaactttaagagatttttggaaaagctttatatacattcttttcaaatttcagtacaaatgaaaaagtggttttaatcagtgatttagtagactttgagcaactgtgcacgcttcagtttaatagcatggtttggccagtgtattactctcaagtccttttctcaatcaacttctatcatcaaagcaattgtttcattatagataaataaggacattttttaatttaaaaattcatgtctgagttgactttcataagggatttcattttttcctcaacattcttaaagccttttagtatttgacggttcttttttcccaggacatttgctaggaataacaacgtttcaatgtttttaatctacttgagcaacactatcgtgtcttacaaaagttgttcatatgtaaatgatcatcacatttcgtgaattgaggccatgttcaggtgctaaggaagttcgccttttacacagaagattgagaaaatttcctagatataaatacagataaatcagacgttacagtggtgacgtagtaaccatcatggcaatggaaaggagtccaattcatagcctaaaacttcaaatgtattcttaggagtcagattttactgaatattttacccacaatagctgcctattttgttataataaaatatatataaatatatatataaaactttctttaaactgtaactatgggaattattttctttacatagttgcgcacacacacaaacatatatatatatttaaaatatattttgtttcttttgccacctactcctaactttttgtttggtttttaaattaaatattaattgaatagacttatcttccttaatcatgtgaactgaaaatgggggcatggtggtcatgaggaggaaacatttagggaaattagattataagtaaaagtgtgggcatattctcctcttttctacaaaggttttcaaatggttcctgaggttttttgttgttgtccgtgttgttactgttgttcttgtcatcaggtttgattttggtccttgccctttccttctagttctccttttattaataggaaggcaggcaaaagccccatttatgtgtgtgttttcccctcagacagctttcatccactgctctgcactagaattgcacaaatcttcatggtgagcaattttaagaaatgttagtgaaaggtagaaattatttcacaaatcagtttctctggtccttcatattaataataatatttggcttcccattgctctttggagttgtttattaaatatgtgtttttgacaacctcctcattagtttcttaaatgagtactggtttgtaaagaattatcaacattatccattccatttatgaagaagaggagaacagctaataaactgtattgtaaaatccatatgttaagtgtgtcttgaattttgaaagaaaaaatatattttgcaagctaacattttcttgaaacaatttgaggcatcatgtaacttataaccgaatccaagagccgttaggcagcagagtgtgttaccacattgaaatacacagtgctgctgttagactaaatgtcgtaggttgttaaccacatagaaacacactagtatgaagaaaactgttgtaaaatctcaagagcttcagaaactgccttacaagaccgcagcataagctattttgaagtatttaccaaatagtcacatgttgtaaaatatcaagtggttataaaaggatgccatttatatattaaaatttacataacattgttttctgga

SEQ ID NO: 109418 - DNA, 3994 bp, Artificial Sequence
  derived and/or modified sequence
agttctgtcactcactcggggtaactttgggcaaattctctctggacctcctaatagggaggtcctcgtcaccccgaggaagttcgaagacgtgggcagtgacttggaaagcttcccgagattccccttctataacctgggtggctcagaccgggagcggggtcccagccggccggtaattccgcccggaggtgcgcacgaaacaaacctgcagcgctggccgagggcggctcagcttcggagggcgcgactccgggtgtgtgccctcttcctgattctggagaaaaatgccggtccggaagcaagatacccagagagcattgcaccttttggaggaatatcgttcaaaactaagccaaactgaagacagacagctcagaagttccatagaacgggttattaacatatttcagagcaacctctttcaggctttaatagatattcaagaattttatgaagtgaccttactggataatccaaaatgtatagatcgttcaaagccgtctgaaccaattcaacctgtgaatacttgggagatttccagccttccaagctctactgtgacttcagagacactgccaagcagccttagccctagtgtagagaaatacaggtatcaggatgaagatacacctcctcaagagcatatttccccacaaatcacaaatgaagtgataggtccagaattggttcatgtctcagagaagaacttatcagagattgagaatgtccatggatttgtttctcattctcatatttcaccaataaagccaacagaagctgttcttccctctcctcccactgtccctgtgatccctgtcctgccagtccctgctgagaatactgtcatcctacccaccataccacaggcaaatcctcccccagtactggtcaacacagatagcttggaaacaccaacttacgttaatggcacagatgcagattatgaatatgaagaaatcacacttgaaaggggaaattcagggcttggtttcagcattgcaggaggtacggacaacccacacattggagatgactcaagtattttcattaccaaaattatcacagggggagcagccgcccaagatggaagattgcgggtcaatgactgtatattacgagtaaatgaagtagatgttcgtgatgtaacacatagcaaagcagttgaagcgttgaaagaagcagggtctattgtacgcttgtatgtaaaaagaaggaaaccagtgtcagaaaaaataatggaaataaagctcattaaaggtcctaaaggtcttgggtttagcattgctggaggtgttggaaatcagcatattcctggggataatagcatctatgtaaccaaaataattgaaggaggtgcagcacataaggatggcaaacttcagattggagataaacttttagcagtgaataacgtatgtttagaagaagttactcatgaagaagcagtaactgccttaaagaacacatctgattttgtttatttgaaagtggcaaaacccacaagtatgtatatgaatgatggctatgcaccacctgatatcaccaactcttcttctcagcctgttgataaccatgttagcccatcttccttcttgggccagacaccagcatctccagccagatactccccagtttctaaagcagtacttggagatgatgaaattacaagggaacctagaaaagttgttcttcatcgtggctcaacgggccttggtttcaacattgtaggaggagaagatggagaaggaatatttatttcctttatcttagccggaggacctgctgatctaagtggagagctcagaaaaggagatcgtattatatcggtaaacagtgttgacctcagagctgctagtcatgagcaggcagcagctgcattgaaaaatgctggccaggctgtcacaattgttgcacaatatcgacctgaagaatacagtcgttttgaagctaaaatacatgatttacgggagcagatgatgaatagtagtattagttcagggtcaggttctcttcgaactagccagaagcgatccctctatgtcagagccctttttgattatgacaagactaaagacagtgggcttcccagtcagggactgaacttcaaatttggagatatcctccatgttattaatgcttctgatgatgaatggtggcaagccaggcaggttacaccagatggtgagagcgatgaggtcggagtgattcccagtaaacgcagagttgagaagaaagaacgagcccgattaaaaacagtgaaattcaattctaaaacgagagataaaggggagatccctgacgacatgggatcaaaaggcctgaagcatgtaacttctaatgccagcgatagtgaaagtagttaccgtggtcaagaagaatacgtcttatcttatgaaccagtgaatcaacaagaagttaattatactcgaccagtgatcatattgggacctatgaaagacaggataaatgatgacttgatctcagaatttcctgacaaatttggatcctgtgttcctcatacaactagaccaaaacgagattatgaggtagatggaagagattatcattttgtgacttcaagagagcagatggaaaaagatatccaggaacataaattcattgaagctggccagtataacaatcatctatatggaacaagtgttcagtctgtacgagaagtagcagaaaagggcaaacactgtatccttgatgtgtctggaaatgccataaagagattacagattgcacagctttaccctatctccatttttattaaacccaaatccatggaaaatatcatggaaatgaataagcgtctaacagaagaacaagccagaaaaacatttgagagagccatgaaactggaacaggagtttactgaacatttcacagctattgtacagggggatacgctggaagacatttacaaccaagtgaaacagatcatagaagaacaatctggttcttacatctgggttccggcaaaagaaaagctatgaaaactcatgtttctctgtttctcttttccacaattccattttctttggcatctctttgccctttcctctggagtctttcttgagtactgatttcatgttgaattgtatcccacacatcatggtctgcagcttctttttcacatgtagtgtctccttcaagttacatcgtgtgtattatttaatgtcactattggttagtggccatttttcagaactgaagatggaatggcctgaccagctattaagaacgtggggagacgcagaaattgtggtaaaattccttaatgtttaagggaaagtaactttaagagatttttggaaaagctttatatacattcttttcaaatttcagtacaaatgaaaaagtggttttaatcagtgatttagtagactttgagcaactgtgcacgcttcagtttaatagcatggtttggccagtgtattactctcaagtccttttctcaatcaacttctatcatcaaagcaattgtttcattatagataaataaggacattttttaatttaaaaattcatgtctgagttgactttcataagggatttcattttttcctcaacattcttaaagccttttagtatttgacggttcttttttcccaggacatttgctaggaataacaacgtttcaatgtttttaatctacttgagcaacactatcgtgtcttacaaaagttgttcatatgtaaatgatcatcacatttcgtgaattgaggccatgttcaggtgctaaggaagttcgccttttacacagaagattgagaaaatttcctagatataaatacagataaatcagacgttacagtggtgacgtagtaaccatcatggcaatggaaaggagtccaattcatagcctaaaacttcaaatgtattcttaggagtcagattttactgaatattttacccacaatagctgcctattttgttataataaaatatatataaatatatatataaaactttctttaaactgtaa

SEQ ID NO: 109419 - DNA, 2977 bp, Artificial Sequence
  derived and/or modified sequence
gttggaaacggcactgctgagtgaggttgaggggtgtctcggtatgtgcgccttggatctggtgtaggcgaggtcacgcctctcttcagacagcccgagccttcccggcctggcgcgtttagttcggaactgcgggacgcgccggtgggctagggcaaggtgtgtgccctcttcctgattctggagaaaaatgccggtccggaagcaagatacccagagagcattgcaccttttggaggaatatcgttcaaaactaagccaaactgaagacagacagctcagaagttccatagaacgggttattaacatatttcagagcaacctctttcaggctttaatagatattcaagaattttatgaagtgaccttactggataatccaaaatgtatagatcgttcaaagccgtctgaaccaattcaacctgtgaatacttgggagatttccagccttccaagctctactgtgacttcagagacactgccaagcagccttagccctagtgtagagaaatacaggtatcaggatgaagatacacctcctcaagagcatatttccccacaaatcacaaatgaagtgataggtccagaattggttcatgtctcagagaagaacttatcagagattgagaatgtccatggatttgtttctcattctcatatttcaccaataaagccaacagaagctgttcttccctctcctcccactgtccctgtgatccctgtcctgccagtccctgctgagaatactgtcatcctacccaccataccacaggcaaatcctcccccagtactggtcaacacagatagcttggaaacaccaacttacgttaatggcacagatgcagattatgaatatgaagaaatcacacttgaaaggggaaattcagggcttggtttcagcattgcaggaggtacggacaacccacacattggagatgactcaagtattttcattaccaaaattatcacagggggagcagccgcccaagatggaagattgcgggtcaatgactgtatattacgagtaaatgaagtagatgttcgtgatgtaacacatagcaaagcagttgaagcgttgaaagaagcagggtctattgtacgcttgtatgtaaaaagaaggaaaccagtgtcagaaaaaataatggaaataaagctcattaaaggtcctaaaggtcttgggtttagcattgctggaggtgttggaaatcagcatattcctggggataatagcatctatgtaaccaaaataattgaaggaggtgcagcacataaggatggcaaacttcagattggagataaacttttagcagtgaataacgtatgtttagaagaagttactcatgaagaagcagtaactgccttaaagaacacatctgattttgtttatttgaaagtggcaaaacccacaagtatgtatatgaatgatggctatgcaccacctgatatcaccaactcttcttctcagcctgttgataaccatgttagcccatcttccttcttgggccagacaccagcatctccagccagatactccccagtttctaaagcagtacttggagatgatgaaattacaagggaacctagaaaagttgttcttcatcgtggctcaacgggccttggtttcaacattgtaggaggagaagatggagaaggaatatttatttcctttatcttagccggaggacctgctgatctaagtggagagctcagaaaaggagatcgtattatatcggtaaacagtgttgacctcagagctgctagtcatgagcaggcagcagctgcattgaaaaatgctggccaggctgtcacaattgttgcacaatatcgacctgaagaatacagtcgttttgaagctaaaatacatgatttacgggagcagatgatgaatagtagtattagttcagggtcaggttctcttcgaactagccagaagcgatccctctatgtcagagccctttttgattatgacaagactaaagacagtgggcttcccagtcagggactgaacttcaaatttggagatatcctccatgttattaatgcttctgatgatgaatggtggcaagccaggcaggttacaccagatggtgagagcgatgaggtcggagtgattcccagtaaacgcagagttgagaagaaagaacgagcccgattaaaaacagtgaaattcaattctaaaacgagagataaaggggagatccctgacgacatgggatcaaaaggcctgaagcatgtaacttctaatgccagcgatagtgaaagtagttaccgtggtcaagaagaatacgtcttatcttatgaaccagtgaatcaacaagaagttaattatactcgaccagtgatcatattgggacctatgaaagacaggataaatgatgacttgatctcagaatttcctgacaaatttggatcctgtgttcctcatacaactagaccaaaacgagattatgaggtagatggaagagattatcattttgtgacttcaagagagcagatggaaaaagatatccaggaacataaattcattgaagctggccagtataacaatcatctatatggaacaagtgttcagtctgtacgagaagtagcagaaaagggcaaacactgtatccttgatgtgtctggaaatgccataaagagattacagattgcacagctttaccctatctccatttttattaaacccaaatccatggaaaatatcatggaaatgaataagcgtctaacagaagaacaagccagaaaaacatttgagagagccatgaaactggaacaggagtttactgaacatttcacagctattgtacagggggatacgctggaagacatttacaaccaagtgaaacagatcatagaagaacaatctggttcttacatctgggttccggcaaaagaaaagctatgaaaactcatgtttctctgtttctcttttccacaattccattttctttggcatctctttgccctttcctctgga

SEQ ID NO: 109420 - protein, 1076 aa, Artificial Sequence
  derived and/or modified sequence
MQHWARRLEQEVDGVMRIFGGVQQLREIYKDNRNLFEVQENEPQKLVEKVAGDIESLLDRKVQALKRLADAAENFQKAHRWQDNIKEEDIVYYDAKADAELDDPESEDVERGSKASTLRLDFIEDPNFKNKVNYSYAAVQIPTDIYKGSTVILNELNWTEALENVFMENRRQDPTLLWQVFGSATGVTRYYPATPWRAPKKIDLYDVRRRPWYIQGASSPKDMVIIVDVSGSVSGLTLKLMKTSVCEMLDTLSDDDYVNVASFNEKAQPVSCFTHLVQANVRNKKVFKEAVQGMVAKGTTGYKAGFEYAFDQLQNSNITRANCNKMIMMFTDGGEDRVQDVFEKYNWPNRTVRVFTFSVGQHNYDVTPLQWMACANKGYYFEIPSIGAIRINTQEYLDVLGRPMVLAGKEAKQVQWTNVYEDALGLGLVVTGTLPVFNLTQDGPGEKKNQLILGVMGIDVALNDIKRLTPNYTLGANGYVFAIDLNGYVLLHPNLKPQTTNFREPVTLDFLDAELEDENKEEIRRSMIDGNKGHKQIRTLVKSLDERYIDEVTRNYTWVPIRSTNYSLGLVLPPYSTFYLQANLSDQILQVKYFEFLLPSSFESEGHVFIAPREYCKDLNASDNNTEFLKNFIELMEKVTPDSKQCNNFLLHNLILDTGITQQLVERVWRDQDLNTYSLLAVFAATDGGITRVFPNKAAEDWTENPEPFNASFYRRSLDNHGYVFKPPHQDALLRPLELENDTVGILVSTAVELSLGRRTLRPAVVGVKLDLEAWAEKFKVLASNRTHQDQPQKCGPNSHCEMDCEVNNEDLLCVLIDDGGFLVLSNQNHQWDQVGRFFSEVDANLMLALYNNSFYTRKESYDYQAACAPQPPGNLGAAPRGVFVPTVADFLNLAWWTSAAAWSLFQQLLYGLIYHSWFQADPAEAEGSPETRESSCVMKQTQYYFGSVNASYNAIIDCGNCSRLFHAQRLTNTNLLFVVAEKPLCSQCEAGRLLQKETHCPADGPEQCELVQRPRYRRGPHICFDYNATEDTSDCGRGASFPPSLGVLVSLQLLLLLGLPPRPQPQVLVHASRRL

SEQ ID NO: 109421 - DNA, 3231 bp, Artificial Sequence
  derived and/or modified sequence
atgcaacattgggctaggagattggagcaggaagtcgatggggtaatgcgaatcttcggcggcgtacaacagcttagagaaatatataaagacaaccgcaaccttttcgaagttcaggagaatgaaccgcagaagctagtggaaaaggtggcaggtgatattgagtcattgttggaccggaaggtgcaggcattaaagcggctggccgatgccgccgaaaactttcaaaaagctcaccggtggcaggacaacatcaaggaggaagacatcgtgtactatgacgccaaagccgacgccgaactggacgatccagaatcagaggacgtggaaaggggatctaaagcctccacactgagactagactttatagaggaccccaactttaagaataaggtgaattactcgtatgctgccgtgcaaatcccaaccgatatttacaaggggtcgacagtcattctgaacgagttgaactggactgaggcccttgagaacgtctttatggaaaatagaaggcaggacccaacactcttatggcaggtcttcggatccgcgacaggtgttacgcgctattacccagctactccgtggagagccccgaaaaagatagacctatatgacgtccgccgaagaccctggtatatccaaggggcgtcctcacctaaagatatggttatcatcgtcgatgtaagcggctcagtgtctggcctcactttaaagctgatgaagacttctgtgtgtgaaatgctggacacactctcggatgatgactacgtgaatgtggcttccttcaacgagaaagcccagcctgtgtcctgctttacgcacctggtacaggctaacgtgcggaacaaaaaagtgtttaaggaggctgtacagggcatggtggcaaaaggtactactggctataaggcaggattcgagtacgcattcgaccagttgcaaaacagcaacattacgagagccaattgtaacaaaatgatcatgatgttcacagatgggggcgaggatagagtccaggacgtcttcgaaaagtataattggccgaataggaccgtaagagtctttaccttttctgttggccagcataattatgacgtgactccactgcagtggatggcttgcgctaacaagggttactatttcgagattcccagcatcggggctatccggatcaatacacaggagtacctcgacgtgctaggccgcccgatggtcttggccggaaaagaggctaagcaggtccaatggaccaatgtgtatgaggatgccctcggtctcgggctcgtggtaactggcacgctgccagtgttcaacctcactcaggatggtcctggcgagaagaaaaatcagctgattctaggtgttatgggcattgacgtggcattaaacgacattaagaggctgacgccaaattacacactgggggcgaatgggtatgtatttgccattgatcttaacggttatgtgctgctgcatcccaatcttaagcctcagactacgaatttccgagagcccgtgaccctggactttctggacgcagaattggaagacgagaataaggaggaaatccgtagatccatgatcgatggaaataaaggccataagcaaatccgaaccttggtgaagagtctggatgaaagatatatcgacgaggtgacccggaattacacgtgggttcccatccggtcaactaattattctctcggcctggtgttgccaccttattcaacgttttatttgcaagcgaacctctctgaccagatccttcaagtgaaatattttgagtttctgctgccttcaagctttgagtctgaaggacatgtgttcatagcccctcgtgagtactgtaaggatcttaatgctagcgacaacaatactgagttcctaaagaatttcattgaactaatggagaaggtcaccccagactctaaacagtgcaataacttcctgctgcacaatttgatcttggatactggtattacacagcaattggtggagcgcgtatggcgggaccaggatcttaacacctattccctgctagcagtgttcgccgctacggatggtgggattacacgagtgtttcctaataaggcggccgaggattggaccgaaaatcctgaaccgtttaacgcctcattttaccgaaggagcctggacaaccacggctacgtctttaaaccacctcaccaggacgccctgctgcgccctttagagctggagaatgacacagtcggtattctagtgtccacggctgttgagttgtccctgggccgcagaacactccggccggcggttgttggcgtcaagcttgacttagaagcctgggccgaaaagttcaaggtattggcatccaaccggacccaccaggaccaaccccaaaagtgtgggcccaactcccattgtgaaatggattgcgaggtaaataacgaggaccttttgtgcgtcttgattgacgacggcgggttcctggttctctcaaatcaaaatcaccagtgggaccaggttgggcggtttttctcagaggtagacgctaatctgatgcttgccctgtataacaacagcttctacacacgcaaggaatcttatgattaccaggccgcttgcgccccccaaccacctggaaaccttggagccgcccctcgaggggtgttcgtgccaaccgtggctgattttctgaacctcgcatggtggactagtgctgctgcatggagcttatttcagcagctgctatacgggttaatataccatagctggtttcaggcagacccagcagaggccgagggctctccggagacccgtgagagcagctgtgtaatgaagcaaacccagtactacttcgggtctgtgaatgccagctacaacgctatcatagattgtgggaactgtagccggctctttcatgcccagaggctgaccaatactaacctcctgttcgtggtggccgaaaagccgctgtgctcccaatgcgaggccggaaggctgctccagaaagagactcattgtccagctgacggccctgagcagtgtgagctcgtccagcgcccccggtaccgacggggtccacatatctgctttgactacaacgcaacagaggatacatccgattgtggacggggggcgtccttcccccccagcctcggtgtgcttgtcagcctccagctgctgctgcttcttggattaccacccaggccacagccacaggtgctggtacacgcaagccggcgactctag

SEQ ID NO: 109422 - DNA, 3231 bp, Artificial Sequence
  derived and/or modified sequence
atgcagcactgggcccggcggctggagcaggaggtggatggagtgatgaggatctttggaggagtgcagcagctgcgggagatctacaaggacaacagaaacctgtttgaggtgcaggagaatgagccccagaagctggtggagaaggtggccggggacatcgagagcctgctggacaggaaggtgcaggccctgaagaggctggctgatgctgctgagaacttccagaaggcccaccgctggcaggacaacatcaaggaggaggacatcgtgtactatgatgccaaggcagatgctgagctggatgatcctgagagtgaagatgtggagcggggcagcaaggccagcaccctgcggctggacttcatcgaggaccccaacttcaagaacaaggtgaactacagctatgctgctgtgcagatccccacagacatctacaagggcagcaccgtcatcctgaatgagctgaactggacagaggccctggagaatgtgttcatggagaacagacggcaggaccccaccctgctgtggcaggtgtttggaagtgccactggagtgacccgctactacccagccaccccctggagggcccccaagaagattgacctgtatgatgtgagaagaagaccctggtacatccagggcgccagcagccccaaggacatggtgatcatcgtggatgtgtctggctctgtgtctggcctgaccctgaagctgatgaagacctctgtgtgtgagatgctggacaccctgagtgatgatgattatgtgaatgtggccagcttcaatgagaaggcccagcctgtgtcctgcttcacccacctggtgcaggccaacgtgaggaacaagaaggtgttcaaggaggccgtgcagggcatggtggccaagggcaccaccggctacaaggccggctttgaatatgcctttgaccagctgcagaacagcaacatcacccgggccaactgcaacaagatgatcatgatgttcacagatggaggagaagatagagtgcaggatgtgtttgagaagtacaactggcccaacagaacagtgcgggtcttcaccttctctgtgggccagcacaactatgatgtgacccccctgcagtggatggcctgtgccaacaagggctactactttgagatccccagcatcggggccatccgcatcaacacccaggagtacctggatgtgctgggccggcccatggtgctggccggcaaggaggccaagcaggtgcagtggaccaacgtgtatgaagatgccctgggcctgggcctggtggtgacaggcaccctgcctgtgttcaacctgacccaggacggccctggagagaagaagaaccagctgatcctgggcgtgatgggcattgatgtggccctgaatgacatcaagaggctgacccccaactacaccctgggcgccaacggctacgtgtttgccatcgacctgaatggctacgtgctgctgcaccccaacctgaagccccagaccaccaacttccgggagcctgtgaccctggacttcctggatgctgagctggaggatgagaacaaggaggagatccgccgctccatgattgatggcaacaagggccacaagcagatccgcaccctggtgaagagcctggatgagcgctacattgatgaggtgaccaggaactacacctgggtgcccatccgcagcaccaactacagcctgggcctggtgctgcccccctacagcaccttctacctgcaggccaacctgagtgaccagatcctgcaggtgaagtactttgagttcctgctgcccagcagctttgagagcgagggccacgtgttcatcgccccccgggagtactgcaaggacctgaatgccagtgacaacaacacagagttcctgaagaacttcatcgagctgatggagaaggtgaccccagacagcaagcagtgcaacaacttcctgctgcacaacctgatcctggacaccggcatcacccagcagctggtggagcgggtgtggagggaccaggacctgaacacctacagcctgctggccgtgtttgctgccacagatggcggcatcaccagggtcttccccaacaaggctgctgaggactggacagagaaccctgagcccttcaatgccagcttctacagaagaagcctggacaaccacggctacgtgttcaagccaccccaccaggatgccctgctgcggcccctggagctggagaatgacacagtgggcatcctggtgtccacagctgtggagctgagcctgggccgccgcaccctgcggcctgctgtggtgggcgtgaagctggacctggaggcctgggccgagaagttcaaggtgctggccagcaacagaacccaccaggaccagccccagaagtgtggccccaacagccactgtgagatggactgtgaggtgaacaatgaagacctgctgtgtgtgctgattgatgatggcggcttcctggtgctgagcaaccagaaccaccagtgggaccaggtgggccgcttcttcagcgaggtggatgccaacctgatgctggccctgtacaacaacagcttctacaccaggaaggagagctatgactaccaggccgcctgtgccccccagcccccaggcaacctgggcgccgccccccggggcgtgtttgtgcccaccgtggccgacttcctgaacctggcctggtggaccagcgctgctgcctggagcctcttccagcagctgctgtatggcctcatctaccacagctggttccaggccgaccctgctgaggccgagggcagccctgagacccgggagagcagctgtgtgatgaagcagacccagtactacttcggctctgtgaatgccagctacaatgccatcatcgactgtggcaactgcagccgcctcttccacgcccagaggctgaccaacaccaacctgctgtttgtggtggccgagaagcccctgtgcagccagtgtgaggccggccgcctgctgcagaaggagacccactgcccagcagatggccctgagcagtgtgagctggtgcagaggccccgctaccgccggggcccccacatctgctttgactacaatgccacagaggacaccagtgactgtggccgcggggccagcttcccccccagcctgggcgtgctggtgtccctgcagctgctgctgctgctgggcctgcccccccggccccagccccaggtgctggtgcacgccagccggcggctgtag

SEQ ID NO: 109423 - DNA, 3231 bp, Artificial Sequence
  derived and/or modified sequence
atgcagcactgggcccggcggctggagcaggaggtggacggcgtgatgcgcatttttggtggagtgcagcagctgcgcgagatttacaaggataataggaatttatttgaagtccaagaaaacgagcctcagaaactggttgaaaaagtcgcaggtgacatcgagtctttgctggatcgaaaagtccaggcacttaaaaggctagctgatgctgcggagaattttcagaaagcccaccggtggcaggacaacattaaggaagaggacattgtttactacgacgccaaggccgacgccgaactcgatgacccagaatctgaggacgtcgaacgcggcagtaaggccagcactctgcgtctcgacttcatcgaagatccgaacttcaagaacaaggtgaactatagctatgcagcagttcagatccccactgacatctataagggctccaccgtgattttgaacgaactcaattggacagaggccctggaaaacgtgtttatggagaaccggcgccaagaccccacgctgctctggcaggtgttcggctcagccaccggcgttacaaggtattatccagcgaccccttggcgcgctccaaaaaagatcgatctctacgatgtcaggagaagaccatggtacattcagggggcatcttcccccaaggacatggtcatcatagtggacgtctcagggtcagtaagcggtctaaccctgaagttgatgaagacctcagtgtgtgagatgttggatacactctctgatgatgattatgtcaacgtggcatccttcaatgaaaaggcgcagccagtatcatgttttacccatcttgtccaggcaaacgtgcgcaacaaaaaggtgttcaaagaagccgtacaaggcatggtggcaaagggcaccactgggtataaagccggattcgagtacgcctttgatcagctccagaatagtaatattacgcgcgcaaactgcaacaagatgattatgatgttcacagatggaggagaagacagggtccaggatgttttcgaaaaatataattggcctaatcgcactgtgagagtcttcactttctcagtggggcagcacaattatgacgtgactcccctacaatggatggcatgtgctaataagggatattattttgaaatcccctccatcggagcaattaggattaatacccaggagtatctggatgtgcttggacgacctatggtactcgcaggcaaggaggcgaagcaagtgcagtggactaatgtgtacgaagacgccctggggcttgggctcgtggtgacgggtaccctgccagtgtttaatttgactcaagacggtcctggcgagaaaaaaaatcagctcatcctgggtgttatgggaatcgatgtggcacttaatgatatcaaaagactgacgcctaattatacactaggagcaaatggctatgtttttgccattgacttgaatggatacgtgctactgcacccaaatctgaaaccccagacgacaaattttagagagcccgtcactttggacttcttagacgccgagctcgaggacgaaaacaaagaggagattcgcagatctatgatcgacgggaacaagggccacaaacagattaggaccctggtgaaaagtctggatgaaaggtatatagatgaggtcaccagaaattatacctgggtgcctatcaggtcaacaaattatagtctgggcctggttctgcccccgtactccaccttttacctccaagcaaatctgtcggaccagattctccaagtcaaatacttcgagttcctgctgccatcgtcatttgagagcgaaggccatgtattcattgcaccaagggaatactgtaaggatcttaatgcctcagacaataacacagaatttctcaagaacttcatcgaactgatggagaaggtgacccccgatagcaagcagtgcaataacttcctgttacacaacctcatccttgacactggcataacacagcagctcgtcgagagagtgtggcgggaccaagatctaaatacttacagcttgctggccgtgttcgccgctaccgacggcggcatcacccgggtgtttcccaataaggctgccgaggactggaccgaaaatccagagcccttcaatgccagcttttatcggagatccctcgacaatcatggatatgtgttcaagccccctcaccaggatgcgttacttcgacccctggaactggagaacgacactgtcggcatcctggtaagtacggccgtggagctgtctcttgggagacgcaccctgcggccagcagtcgtcggcgtgaagctggatttggaggcatgggcagaaaagttcaaggtattagcatcgaatcgtacccaccaagatcagccccaaaagtgcggccccaattcgcattgtgaaatggactgcgaagtgaacaacgaagatctgctctgtgtcttgatcgacgacggcggcttcctggtcctctccaaccagaatcatcagtgggatcaagtgggccggtttttctcagaggtggatgctaatctaatgctggcactttacaataattctttttacacaagaaaagaatcatatgactatcaggctgcctgtgctccccagcctccaggaaatctcggggctgctcctcgaggggtgttcgttcctaccgtcgccgatttcttgaatttggcttggtggacgtccgctgctgcctggagtctttttcagcaattactgtatggcctcatatatcactcttggttccaggcggatcctgcagaggccgagggttcccctgaaactcgcgagtcgagctgcgtgatgaagcagacacagtattattttggcagtgtgaacgcctcctataacgctatcatagactgcggaaattgttcccgtctctttcacgcccaaagactcactaacaccaatctgctctttgttgttgccgagaaacctctgtgttcacagtgcgaggccggaagacttctgcaaaaggagacccactgcccagccgacggaccggagcaatgcgagctggtccagaggccgcggtaccgcagggggccacacatttgttttgactacaatgccacagaggacacctccgactgcggtcgcggcgcctccttcccccccagcctgggggttttggtttctctacagctcctgctgctcctgggtttaccacctcggcctcaaccacaggtattggtacatgctagcagacggctctag

SEQ ID NO: 109424 - DNA, 3231 bp, Artificial Sequence
  derived and/or modified sequence
atgcaacactgggcacggagactcgagcaggaggtcgacggggtgatgcggatttttggcggagttcagcagcttcgcgagatatataaggataatcgaaacttgttcgaagtgcaggaaaacgaacctcaaaagctggtcgagaaagtagctggcgatatcgaatcactcctggacaggaaggtccaggctctcaaacggttggcggacgctgcggaaaattttcagaaggcgcatcgttggcaggacaatatcaaagaggaagatatcgtctactacgatgccaaagccgacgcagagctggacgacccggagtctgaggatgttgaacgaggatcaaaagcctcaacgctgcgactggatttcattgaggaccctaactttaaaaataaagtgaactactcttatgccgctgtccaaattccgactgatatctataaaggaagtaccgtcatactcaatgagctgaattggaccgaggcacttgagaacgtattcatggagaacaggcgacaggatcccacactcttgtggcaggtgtttggaagcgctaccggggtcactcggtactaccccgcaacgccgtggcgggcaccgaaaaaaatcgacctgtacgacgtgaggcgtcgcccttggtacattcaaggagccagtagccccaaagatatggtaattattgtcgatgtgagcgggtcagtcagcggactgacgctgaaactgatgaagacatccgtgtgcgagatgttggacactctctcagatgatgactacgtgaatgtagcctcttttaacgagaaggctcagccggtgtcttgcttcactcacctcgtacaggccaatgtgcgcaacaagaaagtgtttaaagaagcagtgcaggggatggtagccaaagggacaacagggtataaggccggttttgaatatgcctttgaccaacttcaaaacagcaatattacgagagcaaattgtaataaaatgattatgatgttcactgacggtggagaggaccgagtccaggatgttttcgaaaagtacaattggccaaacagaaccgttcgcgtgtttactttcagcgtggggcagcacaactatgatgtaacacctctccagtggatggcgtgcgccaacaagggatactattttgagattccatcaatcggagccatcaggataaacacacaggaatatctggacgtgctgggcaggcccatggtgctggctggaaaggaggccaagcaagtgcaatggacaaatgtctacgaagacgctctggggctgggcctggtcgtgacaggtactctcccagtcttcaatctaacccaagatggcccaggcgaaaagaaaaaccaattgatactgggtgtgatgggaattgacgtggcacttaatgatatcaaaagactgactccaaattatacactgggggcaaatggatacgtcttcgccattgatctgaacggatatgtgttgctgcacccaaacctcaaaccacaaaccacaaactttagggaacccgtgactctcgatttcctggacgcagaactggaagatgaaaataaggaggagatcagacgctctatgatcgatgggaataaaggtcacaaacaaattcggacactagtcaagagcttagacgagcgatatattgatgaggttacacgcaactatacctgggtacctatcaggtcaacaaattactcactgggcctggttcttcctccatacagcaccttctacttgcaagccaaccttagtgatcagattcttcaggtgaaatactttgaatttctcctcccatcctcttttgagtcggagggccacgtgttcatcgcccctagagaatattgcaaagacttgaatgcctccgataataacaccgaatttttaaagaattttatcgagcttatggagaaagttacacctgactcgaaacaatgcaacaactttttgttgcataatctgatcctggatacaggcattacccaacagctcgtggaaagagtctggcgagatcaggacctgaatacctacagcctgctggccgtgttcgccgctacggatgggggaattaccagagttttccccaataaagccgcagaggactggaccgaaaaccccgaaccgttcaatgcttcgttctatagaaggagtttggataaccatggatatgtttttaagccaccccatcaggacgcgctgcttagacctctggagctggagaacgatactgtgggtattctggttagcaccgctgtcgaattaagtctgggcagacgaactctaagacccgctgttgtgggggtgaagttggacctagaggcttgggccgaaaagtttaaggtactggcaagtaaccgtactcatcaggaccagccccagaagtgtgggccaaactctcactgtgagatggactgcgaggtgaacaatgaggacctcctgtgtgtactgatcgatgacggcggtttcctggtgctgagcaatcagaatcatcagtgggatcaagtaggacggtttttttcagaagtggacgccaatctcatgctggccctttacaacaacagtttctacaccaggaaagagtcctatgactaccaagccgcttgtgctccacaaccccctggcaatttgggagccgctccccgtggcgtctttgttcctaccgtggccgacttcttgaatcttgcatggtggaccagtgctgccgcttggtctttattccagcagctgctatacggcctgatctaccacagctggttccaggcggaccctgctgaagccgagggctctccggaaacacgcgagagcagttgtgtcatgaaacagacccagtattacttcggttctgtcaatgcctcttataacgccataattgactgtggcaattgctctagattgtttcatgcacagcgcttgaccaataccaatctcctcttcgtcgtggccgagaagcctttgtgctcgcaatgcgaagccggacgactattgcagaaagagacacattgccctgccgacgggcctgaacaatgcgaacttgtacagcgtccccgttatcgcaggggaccacacatttgtttcgactacaacgccactgaggatacctccgattgtggtagaggtgctagttttcccccttcccttggtgtgttggtaagtcttcagcttcttctgcttctggggctccccccaagacctcagccacaagttctcgtacatgccagccgacgactgtag

SEQ ID NO: 109425 - DNA, 5272 bp, Artificial Sequence
  derived and/or modified sequence
gcgaagcgagtggctgcagagggctgcatcctgccgtccccagccccccacaaccgtacagccgtgcccaggtttccgcttagggaaccaggaggtccaggccctttctgccagcagccgggcgtgcaagcccccgacagagagaaatcttaaagatagctagagccacgggggctgatgcagcactgggcccggcgtctggagcaggaggtcgacggcgtgatgcggatttttggaggcgtccagcagctccgtgagatttacaaggacaaccggaacctgttcgaggtacaggagaatgagcctcagaagttggtggagaaggtggcaggggacattgagagccttctggacaggaaggtgcaggccctgaagagactggctgatgctgcagagaacttccagaaagcacaccgctggcaggacaacatcaaggaggaagacatcgtgtactatgacgccaaggctgacgctgagctggacgaccctgagagtgaggatgtggaaagggggtctaaggccagcaccctaaggctggacttcatcgaggacccaaacttcaagaacaaggtcaactattcatacgcggctgtacagatccctacggacatctacaaaggctccactgtcatcctcaatgagctcaactggacagaggccctggagaatgtgttcatggaaaaccgcagacaagaccccacactgctgtggcaggtcttcggcagcgccacaggagtcactcgctactacccggccaccccgtggcgagcccccaagaagatcgacctgtacgatgtccgaaggagaccctggtatatccagggggcctcgtcacccaaagacatggtcatcatcgtggatgtgagtggcagtgtgagcggcctgaccctgaagctgatgaagacatctgtctgcgagatgctggacacgctgtctgatgatgactatgtgaatgtggcctcgttcaacgagaaggcacagcctgtgtcatgcttcacacacctggtgcaggccaatgtgcgcaacaagaaggtgttcaaggaagctgtgcagggcatggtggccaagggcaccacaggctacaaggccggctttgagtatgcctttgaccagctgcagaactccaacatcactcgggccaactgcaacaagatgatcatgatgttcacggatggtggtgaggaccgcgtgcaggacgtctttgagaagtacaattggccaaaccggacggtgcgcgtgtttactttctccgtggggcagcataactatgacgtcacaccgctgcagtggatggcctgtgccaacaaaggctactattttgagatcccttccatcggagccatccgcatcaacacacaggaatatctagatgtgttgggcaggcccatggtgctggcaggcaaggaggccaagcaggtgcagtggaccaacgtgtatgaggatgcactgggactggggttggtggtaacagggaccctccctgttttcaacctgacacaggatggccctggggaaaagaagaaccagctgatcctgggcgtgatgggcattgacgtggctctgaatgacatcaagaggctgacccccaactacacgcttggagccaacggctatgtgtttgccattgacctgaacggctacgtgttgctgcaccccaatctcaagccccagaccaccaacttccgggagcctgtgactctggacttcctggatgcggagctagaggatgagaacaaggaagagatccgtcggagcatgattgatggcaacaagggccacaagcagatcagaacgttggtcaagtccctggatgagaggtacatagatgaggtgacacggaactacacctgggtgcctataaggagcactaactacagcctggggctggtgctcccaccctacagcaccttctacctccaagccaatctcagtgaccagatcctgcaggtcaagtattttgagttcctgctccccagcagctttgagtctgaaggacacgttttcattgctcccagagagtactgcaaggacctgaatgcctcagacaacaacaccgagttcctgaaaaactttattgagctcatggagaaagtgactccagactccaagcagtgcaacaacttccttctgcacaacctgatcttggacacgggcatcacgcagcagctggtagagcgtgtgtggagggaccaggatctcaacacgtacagcctactggccgtgttcgctgccacagacggtggcatcacccgagtcttccccaacaaggcagctgaggactggacagagaaccctgagcccttcaatgccagcttctaccgccgcagcctggataaccacggttatgtcttcaagcccccacaccaggatgccctgttaaggccgctggagctggagaatgacactgtgggcatcctcgtcagcacagctgtggagctcagcctaggcaggcgcacactgaggccagcagtggtgggcgtcaagctggacctagaggcttgggctgagaagttcaaggtgctagccagcaaccgtacccaccaagaccagcctcagaagtgcggccccaacagccactgtgagatggactgcgaggttaacaatgaggacttactctgtgtcctcattgatgatggaggattcctggtgctgtcaaaccagaaccatcagtgggaccaggtgggcaggttcttcagtgaggtggatgccaacctgatgctggcactctacaataactccttctacacccgcaaggagtcctatgactatcaggcagcctgtgcccctcagccccctggcaacctgggtgctgcaccccggggtgtctttgtgcccaccgttgcagatttccttaacctggcctggtggacctctgctgccgcctggtccctgttccagcagcttctctacggcctcatctaccacagctggttccaagcagaccccgcggaggccgaggggagccccgagacgcgcgagagcagctgcgtcatgaaacagacccagtactacttcggctcggtaaacgcctcctacaacgccatcatcgactgcggaaactgctccaggctgttccacgcgcagagactgaccaacaccaatcttctctttgtggtggccgagaagccgctgtgcagccagtgcgaggctggccggctgctgcagaaggagacgcactgcccagcggacggcccggagcagtgtgagctagtgcagagaccgcgataccggagaggcccgcacatctgcttcgactacaacgcgacagaagatacctcagactgtggccgcggggcctccttcccgccgtcgctgggcgtcctggtctccctgcaactgctgctcctcctgggcctgccgccccggccgcagcctcaagtcctcgtccacgcctctcgccgcctctgagcaccctgccccaccccacctccactcccacctcacccggcctcttcgcctttcccaccctcctgccccacactccccgccttagagcctcgtccctccctcactgaaggacctgagctggccaggccctgagagtctggtctgcgccttgggatggggagtcccaaagcgggacgccgcaggtgtttggcacccaaatcacatctcacctccgaactgttcaagtgtccccagacccttcttgcctgctgggctccccccagtgggatgggacagggaggccacacgcactggtgccaaaaccaggcctctgctgccgcccttcctggaggctgcctatgttgggggggaccctgcctcagctgacccggcctctctgccccacccaagcccaaacttggtttctgtgagaatagtggaggaaggtgagatggccagtttgaagcctgtgcctcccagcttaaatcctagcaggagagaggctctggggcagcccccatgggctcctgcccctttcaggcctacagccacatccccaagcccaccaggtgtcaggatagtcacagtgataccagttcagacactaccccatatacacctggaacattgaggatggaaactggactcacattcgacataccccactgggcacacgcacaaacacacacactatggggtggggtgggtgtaggggcttacaaagccttacacagggcgaggggttggtgggagggttggcacctgcacactccatctcctgctcaccacctgcctctaatctgagctgcagcctggctggtcctcccatttctaaagctgaatgtcaaacagtgccaaatgctggggcagggggtgaagaaccctctgtcccacccctagccaccagtgtcctccaagtgccccctcacctctccaggtgctcattgtaaccatttctcactagtgtcaggcccccagtgggaccacatgccactgcctgcacctttcggcagaggaacccccaccagacatcaccctttgccttagcaggggtgactttgtctctcctggctgggccatccttccgccaatctggcccttacacactcaggcctgtgcccactccctatctccttcccacccctacacacacactccctgcttgcaggaggccaaactgtccctcccttgctgaacacacacacacacacacacacacaggtggggactgggcacagctcttcacaccattcattctggtcatttcccccaaaggcatcccagcctgggggccagtggggaactgagggcaaggggatatagtgatggggctcagatggactgggaggagggggagggtgatgcattaattaatggcttcgttaattaatgtcatgttgcttgtcgctttctcagtgtgtgtgtgtggtccatgcccactgctggtgccagggtgggtgtccatgtgcacccggcctggatgccagctgtgtccttcgggggcgtgcgtgtaactgtagtgtagtcaggtgctcaatggagaatataaacatatacagaaaaatatatattttaagtttaaaaaacagaaaaacagacaaaacaatccccatcaggtagctgtctaacccccagctgggtctaatccttctcattacccacccgacctggctgcccctcaccttgggctgggggactggggggccatttccttttctctgccctttttttgttgttctattttgtacagacaagttggaaaaacaacagcgacaaaaaagtcaagaaactttgtaaaatatcgtgtgtgtgattccttgtaaaatattttcaaatggtttattacagaagatcagttattaaataatgttcatattttcacttc

SEQ ID NO: 109426 - DNA, 3231 bp, Artificial Sequence
  derived and/or modified sequence
atgcagcactgggccagaagactggagcaggaggtggacggcgtgatgagaatcttcggcggcgtgcagcagctgagagagatctacaaggacaacagaaacctgttcgaggtgcaggagaacgagccccagaagctggtggagaaggtggccggcgacatcgagagcctgctggacagaaaggtgcaggccctgaagagactggccgacgccgccgagaacttccagaaggcccacagatggcaggacaacatcaaggaggaggacatcgtgtactacgacgccaaggccgacgccgagctggacgaccccgagagcgaggacgtggagagaggcagcaaggccagcaccctgagactggacttcatcgaggaccccaacttcaagaacaaggtgaactacagctacgccgccgtgcagatccccaccgacatctacaagggcagcaccgtgatcctgaacgagctgaactggaccgaggccctggagaacgtgttcatggagaacagaagacaggaccccaccctgctgtggcaggtgttcggcagcgccaccggcgtgaccagatactaccccgccaccccctggagagcccccaagaagatcgacctgtacgacgtgagaagaagaccctggtacatccagggcgccagcagccccaaggacatggtgatcatcgtggacgtgagcggcagcgtgagcggcctgaccctgaagctgatgaagaccagcgtgtgcgagatgctggacaccctgagcgacgacgactacgtgaacgtggccagcttcaacgagaaggcccagcccgtgagctgcttcacccacctggtgcaggccaacgtgagaaacaagaaggtgttcaaggaggccgtgcagggcatggtggccaagggcaccaccggctacaaggccggcttcgagtacgccttcgaccagctgcagaacagcaacatcaccagagccaactgcaacaagatgatcatgatgttcaccgacggcggcgaggacagagtgcaggacgtgttcgagaagtacaactggcccaacagaaccgtgagagtgttcaccttcagcgtgggccagcacaactacgacgtgacccccctgcagtggatggcctgcgccaacaagggctactacttcgagatccccagcatcggcgccatcagaatcaacacccaggagtacctggacgtgctgggcagacccatggtgctggccggcaaggaggccaagcaggtgcagtggaccaacgtgtacgaggacgccctgggcctgggcctggtggtgaccggcaccctgcccgtgttcaacctgacccaggacggccccggcgagaagaagaaccagctgatcctgggcgtgatgggcatcgacgtggccctgaacgacatcaagagactgacccccaactacaccctgggcgccaacggctacgtgttcgccatcgacctgaacggctacgtgctgctgcaccccaacctgaagccccagaccaccaacttcagagagcccgtgaccctggacttcctggacgccgagctggaggacgagaacaaggaggagatcagaagaagcatgatcgacggcaacaagggccacaagcagatcagaaccctggtgaagagcctggacgagagatacatcgacgaggtgaccagaaactacacctgggtgcccatcagaagcaccaactacagcctgggcctggtgctgcccccctacagcaccttctacctgcaggccaacctgagcgaccagatcctgcaggtgaagtacttcgagttcctgctgcccagcagcttcgagagcgagggccacgtgttcatcgcccccagagagtactgcaaggacctgaacgccagcgacaacaacaccgagttcctgaagaacttcatcgagctgatggagaaggtgacccccgacagcaagcagtgcaacaacttcctgctgcacaacctgatcctggacaccggcatcacccagcagctggtggagagagtgtggagagaccaggacctgaacacctacagcctgctggccgtgttcgccgccaccgacggcggcatcaccagagtgttccccaacaaggccgccgaggactggaccgagaaccccgagcccttcaacgccagcttctacagaagaagcctggacaaccacggctacgtgttcaagcccccccaccaggacgccctgctgagacccctggagctggagaacgacaccgtgggcatcctggtgagcaccgccgtggagctgagcctgggcagaagaaccctgagacccgccgtggtgggcgtgaagctggacctggaggcctgggccgagaagttcaaggtgctggccagcaacagaacccaccaggaccagccccagaagtgcggccccaacagccactgcgagatggactgcgaggtgaacaacgaggacctgctgtgcgtgctgatcgacgacggcggcttcctggtgctgagcaaccagaaccaccagtgggaccaggtgggcagattcttcagcgaggtggacgccaacctgatgctggccctgtacaacaacagcttctacaccagaaaggagagctacgactaccaggccgcctgcgccccccagccccccggcaacctgggcgccgcccccagaggcgtgttcgtgcccaccgtggccgacttcctgaacctggcctggtggaccagcgccgccgcctggagcctgttccagcagctgctgtacggcctgatctaccacagctggttccaggccgaccccgccgaggccgagggcagccccgagaccagagagagcagctgcgtgatgaagcagacccagtactacttcggcagcgtgaacgccagctacaacgccatcatcgactgcggcaactgcagcagactgttccacgcccagagactgaccaacaccaacctgctgttcgtggtggccgagaagcccctgtgcagccagtgcgaggccggcagactgctgcagaaggagacccactgccccgccgacggccccgagcagtgcgagctggtgcagagacccagatacagaagaggcccccacatctgcttcgactacaacgccaccgaggacaccagcgactgcggcagaggcgccagcttcccccccagcctgggcgtgctggtgagcctgcagctgctgctgctgctgggcctgccccccagaccccagccccaggtgctggtgcacgccagcagaagactgtag

SEQ ID NO: 109427 - protein, 376 aa, Artificial Sequence
  derived and/or modified sequence
MSAETPITLNIDPQDLQVQTFTVEKLLEPLIIQVTTLVNCPQNPSSRKKGRSKRASVLLASVEEATWNLLDKGEKIAQEATVLKDELTASLEEVRKESEALKVSAERFTDDPCFLPKREAVVQAARALLAAVTRLLILADMIDVMCLLQHVSAFQRTFESLKNVANKSDLQKTYQKLGKELENLDYLAFKRQQDLKSPNQRDEIAGARASLKENSPLLHSICSACLEHSDVASLKASKDTVCEEIQNALNVISNASQGIQNMTTPPEPQAATLGSALDELENLIVLNPLTVTEEEIRPSLEKRLEAIISGAALLADSSCTRDLHRERIIAECNAIRQALQDLLSEYMNNLCNQKSDLGLTGVKIKLLEECIIFWSL

SEQ ID NO: 109428 - DNA, 582 bp, Artificial Sequence
  derived and/or modified sequence
atgagcgctgagactcctataaccctgaatatagacccacaggacctgcaggtacagacgttcacagtggaaaaactcctcgaaccgttgattatccaggttactacgctcgtgaactgcccgcaaaatccatcttcgcgtaaaaagggacgctcaaagagggcaagtgtcctgcttgcatctgtcgaagaggccacatggaacctgttggacaagggagagaagatcgctcaggaagcaactgttctaaaggacgagctgactgcatccctggaggaggtgcgcaaggagtccgaggccctgaaggtctccgcggagcggtttacggatgatccctgctttctaccgaagcgggaagctgtggtgcaagcagctcgggcgctgctggccgccgtaacaaggctgctgatcttagcagatatgattgatgtgatgtgtcttttacaacacgttagcgctttccagcgcacgttcgaatcattgaaaaatgtggccaacaaatcagatcttcagaagacctaccagaagttgggcaaggagttggagaatttagactatctggccttcaagcgccagcagtag

SEQ ID NO: 109429 - DNA, 1131 bp, Artificial Sequence
  derived and/or modified sequence
atgagcgcagagacccccattaccctgaacattgatccacaggacctgcaagtccagaccttcaccgttgaaaagctgctggagccccttatcattcaggtgacgacgcttgtcaattgcccccagaacccttcatcgcggaaaaagggtaggtccaagcgggctagcgtgctgctggcatctgtagaagaggctacatggaatctgctggacaagggggaaaaaatagcccaggaggctactgtgctgaaggatgagctgactgctagtttggaagaggtgcggaaggagtctgaagcccttaaggtgtctgctgagcgcttcacagacgatccgtgtttcctgccaaagagggaagccgtagtgcaagccgcgagggccctcttagctgctgtgactcgcctgctgattctcgccgatatgattgacgtcatgtgtttgctgcagcatgtgtccgcgttccagcggacatttgaatccctcaagaatgtggccaacaaatctgatctacaaaaaacctaccagaagctggggaaggagctggaaaacttggactatctcgcgttcaagcgccagcaggacctgaagtctcctaatcagcgagatgaaatcgccggggcccgcgcaagtctgaaggagaactctccactgttgcatagcatctgtagcgcatgcctcgaacactcggacgtggcctcccttaaggctagcaaggatacggtgtgtgaagaaattcaaaatgcattgaatgtcattagcaatgctagccaggggattcagaacatgactacccctccagaacctcaggcagctaccctcggcagcgcactcgacgagctggaaaatctgatcgtcctgaatcccttgactgtaacagaggaggagattcgacccagcctagagaagcgcctggaagccatcatatccggcgctgctcttcttgcagatagttcatgcaccagagatctgcatagggaaagaattatcgccgaatgcaatgcgatcagacaggcccttcaggacctgctgagtgaatatatgaacaatctgtgtaatcagaaatccgaccttgggttaacgggcgtcaagattaagctactcgaggaatgcatcattttctggtccctctag

SEQ ID NO: 109430 - DNA, 582 bp, Artificial Sequence
  derived and/or modified sequence
atgagcgcagaaaccccaatcaccctgaatattgacccccaagacctgcaggtccaaactttcacagtggaaaaactgttagagccattgataatccaggtaactaccctggtcaactgtccccagaatccttcttcacgtaagaaaggacgcagtaaaagagctagcgtgctgctggcttctgtggaagaagcgacttggaatctgcttgacaaaggcgagaagattgctcaggaggccaccgtgctgaaggatgagttgacagcctcactggaggaggttagaaaggaatccgaggccctaaaggtcagcgcggagaggttcacggatgatccatgtttcctgccaaaacgcgaagcagtggtgcaggccgctcgagccctcttagccgcagtgacccggctgcttattttagctgatatgatcgatgtcatgtgtctactccaacatgttagcgcattccaaagaaccttcgagagccttaaaaatgtcgccaacaagtctgacttgcagaagacctaccagaaattggggaaggagctagaaaacttggactacctggcctttaagaggcagcagtag

SEQ ID NO: 109431 - DNA, 1131 bp, Artificial Sequence
  derived and/or modified sequence
atgtcagctgaaaccccaatcacattaaacatcgaccctcaggacctgcaggttcaaacatttaccgtggaaaaactactggaacctctgattatccaggtaacaaccctggttaactgccctcagaatcctagctctcgtaagaaaggtagatctaagagggcctccgtgctgctggcctctgtcgaagaggcaacgtggaacctactggataagggggaaaagatagcccaggaggccactgttctgaaggacgagctcactgctagcctcgaggaagtcagaaaggaatcagaggccctgaaagtctccgcagagcgtttcaccgatgatccgtgcttcttacctaagcgggaggcagttgtgcaggcggcccgggctctgctggctgcggtaacaaggttactgatcctggcagatatgatagatgtaatgtgcttactccagcatgtgagcgccttccagcggacattcgagtcactgaagaatgtcgccaacaagtcagatctccagaagacatatcagaagttagggaaggaactggaaaacctcgactaccttgctttcaagagacagcaggatcttaagagccctaaccagagagacgaaatagcaggcgcccgggcctctctgaaagaaaactctcccctgctgcatagtatctgttcggcttgcttggagcacagcgacgtggccagcctgaaggcgagcaaggacacggtgtgcgaggagatccagaatgcattaaatgtgatttccaacgcttcccagggtatccagaatatgactacccctcccgagcctcaagcggctaccttgggcagcgctctcgatgaactggagaaccttatcgtcctcaatcccctgacagttacagaagaggagataagaccttctctagagaaacgcttagaagccataatttccggagccgctctgttggccgacagctcttgcacacgggatctgcatcgggagcgcattatcgccgagtgcaatgcaattcgacaggccctccaggacttgctttcagaatacatgaacaacctgtgtaatcagaagagcgatcttggtctgaccggagtgaaaattaagcttctggaggaatgcattattttttggtccctgtag

SEQ ID NO: 109432 - DNA, 582 bp, Artificial Sequence
  derived and/or modified sequence
atgtctgctgagacccccatcaccctgaacatcgacccccaggacctgcaggtgcagaccttcaccgtggagaagctgctggagcccctcatcatccaggtgaccaccctggtgaactgcccccagaaccccagcagcaggaagaagggccgcagcaagagggcctctgtgctgctggcctctgtggaggaggccacctggaacctgctggacaagggggagaagatcgcccaggaggccaccgtgctgaaggatgagctgacagccagcctggaggaggtgaggaaggagagcgaggccctgaaggtgtctgctgagcgcttcacagatgacccctgcttcctgcccaagcgggaggccgtggtgcaggccgcccgggccctgctggccgctgtgacccggctgctgatcctggccgacatgattgatgtgatgtgcctgctgcagcacgtgtctgccttccagaggacctttgagagcctgaagaatgtggccaacaagagtgacctgcagaagacctaccagaagctgggcaaggagctggagaacctggactacctggccttcaagaggcagcagtag

SEQ ID NO: 109433 - DNA, 1131 bp, Artificial Sequence
  derived and/or modified sequence
atgtctgctgagacccccatcaccctgaacatcgacccccaggacctgcaggtgcagaccttcaccgtggagaagctgctggagcccctcatcatccaggtgaccaccctggtgaactgcccccagaaccccagcagcaggaagaagggccgcagcaagagggcctctgtgctgctggcctctgtggaggaggccacctggaacctgctggacaagggggagaagatcgcccaggaggccaccgtgctgaaggatgagctgacagccagcctggaggaggtgaggaaggagagcgaggccctgaaggtgtctgctgagcgcttcacagatgacccctgcttcctgcccaagcgggaggccgtggtgcaggccgcccgggccctgctggccgctgtgacccggctgctgatcctggccgacatgattgatgtgatgtgcctgctgcagcacgtgtctgccttccagaggacctttgagagcctgaagaatgtggccaacaagagtgacctgcagaagacctaccagaagctgggcaaggagctggagaacctggactacctggccttcaagaggcagcaggacctgaagagccccaaccagagagatgaaattgctggggcccgggccagcctgaaggagaacagccccctgctgcacagcatctgcagcgcctgcctggagcacagtgatgtggccagcctgaaggccagcaaggacacagtgtgtgaggagatccagaatgccctgaatgtcatcagcaatgccagccagggcatccagaacatgaccaccccacctgagccccaggccgccaccctgggcagcgccctggatgagctggagaacctgattgtgctgaaccccctgactgtgacagaggaggagatccggcccagcctggagaagaggctggaggccatcatctctggagctgccctgctggccgacagcagctgcacccgggacctgcaccgggagcgcatcatcgcagaatgtaatgccatccggcaggccctgcaggacctgctgtctgagtacatgaacaacctgtgcaaccagaagagtgacctgggcctgactggagtgaagatcaagctgctggaggagtgcatcatcttctggagcctgtag

SEQ ID NO: 109434 - DNA, 582 bp, Artificial Sequence
  derived and/or modified sequence
atgagcgccgagacccccatcaccctgaacatcgacccccaggacctccaggtgcagacctttaccgtcgaaaagctactggagcccctaatcatccaagtgaccacattggtgaattgtcctcaaaacccgagctccagaaagaagggtcgttcaaaacgggcctccgtcttgctagcttccgtggaggaagcaacttggaatctcttagacaaaggcgaaaaaatcgcgcaggaagccactgtcctgaaggatgaactgactgccagtctggaggaagttaggaaagagtccgaggccctcaaagtgagcgctgaaagatttaccgacgacccatgtttcctgccaaagagagaggccgtcgtgcaggccgcccgggctctgctcgccgcagtaacaagactcctgattctggctgacatgatagatgtgatgtgcctcctgcagcacgtctcggctttccaaagaacatttgaatccctgaagaatgtagccaacaagagtgacctgcaaaaaacatatcagaagctgggcaaagaactggagaacctcgattatctggcattcaaacggcagcagtag

SEQ ID NO: 109435 - DNA, 1131 bp, Artificial Sequence
  derived and/or modified sequence
atgagcgccgagacccccatcaccctgaacatcgacccccaggacctgcaggtgcaaacgttcacagtggaaaagctgttggagccgttgatcattcaggttactactctagtgaactgccctcagaatcctagctcaagaaagaagggccgatctaagagagcgtctgtcttgctagcgtctgtggaggaagcaacctggaatctgctggataagggagaaaagatcgcacaggaagctaccgtccttaaagacgagttgacagcttctctggaagaggtccgtaaggaatcagaagccctcaaagtttcagcagagaggtttacagatgatccatgtttcctgcctaaacgggaagctgtggtgcaggccgcccgggccctcctggctgcagtaacccgcctgttgatcctggcagacatgatagatgtgatgtgcctgcttcaacacgtgagtgcattccaacggacattcgagagtttgaagaatgtcgcaaataagagcgacctgcaaaagacatatcagaagcttggcaaggaattagagaacctggactatctcgctttcaaacgtcagcaggatctaaaaagtcctaatcagcgggacgagatagctggggctcgggcatcccttaaggagaattcacccctgctgcattctatatgtagcgcatgcttagaacactctgatgtagcgtccctgaaagcttccaaggacacagtatgtgaggaaatacaaaatgcattaaatgtgattagcaatgcctcccaggggatccaaaatatgactacaccacccgaacctcaagcagctacactcggatctgccttagatgagcttgagaacctgatcgtgctgaatcccctcaccgtaacggaagaagaaattcgcccgtccctggaaaagaggctcgaagccattatatcaggcgctgccttgttggctgactcctcctgcaccagagacctccatcgggaacgcattatcgctgagtgtaacgcaatccgccaggcactgcaggatttactcagcgagtatatgaacaacctgtgtaaccaaaagagcgatcttggcctgacaggtgttaagatcaagcttttagaggagtgtattatcttttggtccctgtag

SEQ ID NO: 109436 - DNA, 582 bp, Artificial Sequence
  derived and/or modified sequence
atgagcgccgagacccccatcaccctgaacatcgacccccaggacctgcaggtgcagactttcaccgttgaaaaactgctggaacctctcattatacaggtgactaccctcgtcaactgcccacaaaaccccagttcccggaaaaaaggtagaagtaagagagcctccgtactgctcgcgtcagttgaggaagctacctggaacctgcttgacaagggggagaagatcgcacaggaggctacagtgcttaaggacgaactgactgcttccctggaagaagtgcgcaaggaaagcgaagcgctgaaggttagtgccgagcgatttaccgacgacccatgcttcctgccaaaacgagaggcggtggtgcaagccgccagagcgctgctggcagccgtaacccgccttctcattttagccgacatgatcgacgtaatgtgcttgctgcagcatgtgtctgccttccagcgcacattcgaaagtttaaagaacgtggctaacaaaagcgacctccagaaaacttatcaaaagctgggtaaggaattggagaatctggattacctagccttcaaaagacagcagtag

SEQ ID NO: 109437 - DNA, 1131 bp, Artificial Sequence
  derived and/or modified sequence
atgagcgccgagacccccatcaccctgaacatcgacccccaggacctgcaggtccagacctttacagtggagaaactactggaacccctgattatccaggtgactaccctggtcaactgtcctcagaatccaagcagtagaaagaagggaaggagtaaaagagcatccgttctgctggcctccgtggaggaggcaacctggaatctcctcgacaaaggggagaaaattgcccaggaagccaccgtgcttaaagacgagcttacagcttcgctggaagaggtgagaaaggagtcagaagcactcaaagtctccgctgaacgattcactgacgacccctgtttcctgcctaaaagagaggcagtagtccaggctgctcgcgccctgctcgcggccgtgacccggctgctaatcctggctgacatgattgatgtgatgtgtctcctccaacacgtctctgccttccagcggacctttgagtcccttaagaatgttgctaacaaatcagacctacagaagacctatcagaagctgggcaaggagttggagaatctggattatctggcattcaagcggcaacaggacctgaagagcccgaatcaacgggacgagatcgccggagcaagagcaagccttaaggaaaacagtccattactgcactccatttgcagcgcctgccttgaacactccgatgtggccagtctaaaggctagcaaagacacagtctgcgaggaaatccagaacgccttgaacgtgatcagtaacgcctcacaggggatacagaacatgactactccgcctgagccacaagctgctacgctcggaagcgcactcgatgaattggagaacttgatcgtcctgaatccactgaccgtgaccgaagaagagattagaccaagcctcgaaaaacgtctcgaagccataatttctggcgccgccctgctcgcagattcttcctgtaccagggacctgcaccgagagcggatcattgccgagtgtaacgctatccggcaggccctgcaggatcttttgtcagagtacatgaataatctctgtaatcagaaatctgatttaggcctcacaggtgtgaaaataaaattactcgaggagtgtatcattttttggtcgttatag

SEQ ID NO: 109438 - DNA, 582 bp, Artificial Sequence
  derived and/or modified sequence
atgagtgcagaaacgccaatcaccctgaatattgaccctcaggacctgcaagttcagaccttcacagtggagaagctgctggagcctctgatcattcaggtaaccacactggtgaactgcccacaaaacccatcttcccgcaagaagggacgaagcaagcgggcttccgtgctactcgctagcgtggaggaagcgacgtggaacctgttagataagggagagaagattgctcaggaagccacagtccttaaggacgaactgacagccagcttagaggaagtcaggaaggaatcagaggccttgaaggtcagcgcggaacggttcactgatgacccctgctttttgccaaagagggaggctgtggtgcaggcggctcgcgctttgctggcagccgtgactaggttgctgatcctggctgatatgatcgatgtgatgtgcctcctgcagcacgtgtctgctttccagcgtacatttgagtccctgaagaacgtggccaataaatcagacttacagaagacatatcagaagctgggcaaagagctcgaaaacttggactatctggccttcaagagacagcaatag

SEQ ID NO: 109439 - DNA, 1131 bp, Artificial Sequence
  derived and/or modified sequence
atgtccgcggaaacccccatcactcttaacatcgacccccaagatctccaggtccagactttcacggtagagaagctgttggagcctctgatcatccaggtgaccacactggtcaactgtccacagaatccctcctctaggaagaagggcagaagtaaaagagcctccgtgttgctggcctcagtggaagaagccacctggaatctacttgacaagggagaaaagatagcccaggaagctaccgtactgaaagacgagctgactgcatcccttgaggaagtcagaaaggagtctgaggctcttaaagtcagcgctgaacggttcaccgatgacccctgcttcctcccaaaaagggaggctgtggttcaagctgcgagagcgctgcttgctgctgtcacaagacttctgattctcgccgatatgattgacgttatgtgtctgctccaacacgtgtctgcctttcaaaggaccttcgagtctttgaaaaacgtggctaataagtcagatctgcagaaaacctatcagaaactcggaaaggaactcgagaacctggactacctggctttcaaacgccagcaagatctcaaatcacctaaccagagagacgaaatcgccggagctcgcgctagtttgaaagagaactcccctctgcttcactctatctgctctgcctgtcttgaacattccgatgtggccagcctaaaagcttcaaaagacaccgtgtgtgaggaaatccaaaatgcactcaacgtcatctcgaacgcttcccaaggcatacaaaatatgaccacacctcccgaaccacaggccgctactctgggcagtgctctggatgagctggagaacttgatcgttctcaatcccctaactgttactgaggaagagatccgccctagtttggaaaaaaggctcgaagccatcataagtggcgctgcactacttgccgatagtagctgcaccagagatctgcatcgtgagaggatcatcgccgagtgtaatgccatcagacaggccttgcaagatctgctttccgagtacatgaacaatctgtgtaatcagaagagcgatctcggactgaccggtgtgaaaatcaaactgctggaggagtgtatcattttttggtcactgtag

SEQ ID NO: 109440 - DNA, 582 bp, Artificial Sequence
  derived and/or modified sequence
atgagcgccgagacgcctattaccttaaacattgacccacaggatctacaagtacagactttcactgtggagaaactgcttgaaccactcataatccaggtgacaaccctcgtcaattgccctcagaatccatctagtaggaagaagggtcggtctaagcgtgcctccgtgctattggcttccgtggaagaagccacctggaacctgttggataagggcgaaaaaatcgcccaggaggccactgtgctgaaggatgagcttacggccagccttgaggaggtgcgaaaagagtccgaggccctcaaggtgtcagcagagcgttttactgatgatccctgcttcttgccaaaaagggaggcggtcgtgcaggccgctcgggctcttttggcagcagtcacaagactgttgatcttggctgatatgatagacgtgatgtgcttgttgcagcacgtctctgcattccagcgtacatttgaaagtctgaaaaacgtggctaacaagtccgatctgcagaaaacctaccaaaaactgggcaaggagctggagaacctggattatctagccttcaaacgtcagcagtag

SEQ ID NO: 109441 - DNA, 1131 bp, Artificial Sequence
  derived and/or modified sequence
atgtcagccgaaacgcctattacattgaacattgaccctcaggacctgcaggtgcaaacattcactgtggaaaaactgctggagccgttgatcattcaggtgacgacactggttaactgtccacagaatcctagctctagaaagaaaggccgatcgaagagagccagcgtcttactagcctcagtagaggaggcaacgtggaatcttctggacaaaggcgaaaagattgcacaagaagcgactgtcctcaaagatgagcttactgccagtctggaagaggtgagaaaggaatctgaggcccttaaagttagcgccgagcgctttacagacgacccttgttttctgccgaagcgggaggcagtagtgcaagccgcaagagctctgctggctgccgtgaccaggctccttatactcgctgacatgattgatgtgatgtgtctgttgcagcatgtctccgcttttcaacgcacgtttgagagtctgaagaacgttgcaaacaaaagtgacctacagaaaacatatcagaagctggggaaggagttagaaaacttggattatctggcattcaagagacagcaggatcttaaatcccctaatcaacgggatgagatcgccggtgcccgagcatctctgaaggagaattcccccctgctgcactcaatctgcagtgcgtgtttggaacatagcgacgtggcctccctcaaggctagcaaggacacggtgtgtgaagaaattcagaacgctttgaacgtcatcagcaatgcatcacagggcatccagaacatgaccactccccctgagcctcaggctgctaccctcgggtctgccttggacgagctggaaaatcttatcgtcttaaaccccctgacagtcactgaggaggaaatccgcccttccctggaaaagcggctggaggcaatcatctcaggtgccgctttgctggctgactcgagttgtacaagggacctgcatagagagaggatcatcgccgagtgtaacgcaattaggcaagcactccaagacttattatccgagtacatgaataacctgtgcaaccagaagagcgatctgggcctgactggcgtgaaaattaagttactagaagagtgcattattttttggagcctctag

SEQ ID NO: 109442 - DNA, 697 bp, Artificial Sequence
  derived and/or modified sequence
atcataagccaaattgtgagccatgatagtggcactgaatttctaaatacaagaaattgcttagacaattggtttagtatctgtatatgggcaatactctgtcctgcagtaggcagcatgtcagctgaaacaccaatcacattgaatatcgatcctcaggatctgcaggtccaaacattcaccgtggagaagctactggagcctctcataatccaggttaccacacttgtaaactgtccccagaacccttccagcaggaaaaaaggacgttcgaaaagagccagtgtccttctagcttctgtggaggaagcaacttggaatttattagacaagggagagaagattgcccaggaagctacagttttaaaggatgagcttacggcttcacttgaggaagttcgcaaagaaagtgaagctctgaaagtatcagctgagagatttacagatgacccctgttttctcccaaaaagggaggctgtggttcaagctgcccgtgccttgctggctgcggtgacgagactccttatccttgcggacatgattgatgtcatgtgcctcttgcaacatgtgtcagcttttcaaaggacatttgagtctctcaaaaatgttgccaacaaatctgacctccagaaaacctaccagaagcttgggaaggagctggaaaatttggattatttagccttcaaacgtcagcagg

SEQ ID NO: 109443 - DNA, 2363 bp, Artificial Sequence
  derived and/or modified sequence
agggtgcttgtcaggctgtttgcttacagatgcatcataagccaaattgtgagccatgatagtggcactgaatttctaaatacaagaaattgcttagacaattggtttagtatctgtatatgggcaatactctgtcctgcagtagctgaatcgctgagaaaagagaccatgtttctacttttagaaggagaatgaaatcaacgcaaaggagagagaaacaaggcagcatgtcagctgaaacaccaatcacattgaatatcgatcctcaggatctgcaggtccaaacattcaccgtggagaagctactggagcctctcataatccaggttaccacacttgtaaactgtccccagaacccttccagcaggaaaaaaggacgttcgaaaagagccagtgtccttctagcttctgtggaggaagcaacttggaatttattagacaagggagagaagattgcccaggaagctacagttttaaaggatgagcttacggcttcacttgaggaagttcgcaaagaaagtgaagctctgaaagtatcagctgagagatttacagatgacccctgttttctcccaaaaagggaggctgtggttcaagctgcccgtgccttgctggctgcggtgacgagactccttatccttgcggacatgattgatgtcatgtgcctcttgcaacatgtgtcagcttttcaaaggacatttgagtctctcaaaaatgttgccaacaaatctgacctccagaaaacctaccagaagcttgggaaggagctggaaaatttggattatttagccttcaaacgtcagcaggacttaaaatctccaaatcagagagatgaaattgcaggagcccgagcttcactgaaggagaactctcccctcttgcattcaatttgttcagcttgtttggagcattctgatgttgcttccctcaaagcaagcaaggacacagtttgtgaagaaattcagaatgctctcaatgtaatttcaaatgcttcacaagggatccagaatatgacaaccccaccagaacctcaggcagcaaccctgggaagtgcccttgatgagctggagaatttaattgtcctgaatccactcacagtaactgaggaggaaatacgaccatcactagagaaacgccttgaagccattatcagtggggctgctctgctggcggattcttcatgtacgagggacttacaccgagagcggattatcgcagaatgcaacgccattcgccaggctcttcaggatctgctttcagagtacatgaacaacctctgtaatcaaaagtctgacctgggcctcactggagtaaaaatcaaattgttggaggaatgcattattttctggagtctctagggaagagtccattatttttgccttttccagtttctagaggtcaccctcattccttggctcatggccctctgcctccatcttctaagccagcaacgtcatgtttctctgaccctgcttccaacctcacatctctttctctgaccacaccttggaaagattctcttctttttaggactcatgtgattagtgggagccacccagattatccaggataatcctcccatctgaaggcccttaaccttaattacatctgcaaaatccctcttgccatgtcaggtaacatattcataggttctgggaatttgaatgtggacatctctgggagactcacaacattatatcaatactagtcttccctagtctctttggtggaatcattatcaatcctttcatttcgaatccattatagacagcatccctcatacactttaagctctgtgcaggcagatcacatgtctgttttgtttagttttatcccaagcctcaggcacaatgcatagaatttagaaaaagctgaattgtatttttggatgaaagagtgaatgaaatgattgcatgttgtatatgccatgtaatggagaaacagcctctctgacattaactgaaatgagtttcaagcatctactacatttatacaatggactgcctgttataaaaggtcttattttgcaaagcattaaatctcttctggaaatcaatgtaaatatccagaaataaattcttttttatcttaatctctgcatttggatgtgttagataggtgacatataattattagtaaagttaatattcaggtgatacatgactataggggattattagaactgagtgagagataatgctgctagagtaaacaagtcagatctgagctccatgcaggaactaatttgcatttctggacctctcatccacccacttgtttcttctcttggtgttttatgtggaagcacattgttggttctcattacgtatttgctgagtgaataaagaatcaaatggactggc

SEQ ID NO: 109444 - DNA, 745 bp, Artificial Sequence
  derived and/or modified sequence
gtggcactgaatttctaaatacaagaaattgcttagacaattggtttagtatctgtatatgggcaatactctgtcctgcagtagctgaatcgctgagaaaagagaccatgtttctacttttagaaggagaatgaaatcaacgcaaaggagagagaaacaaggcagcatgtcagctgaaacaccaatcacattgaatatcgatcctcaggatctgcaggtccaaacattcaccgtggagaagctactggagcctctcataatccaggttaccacacttgtaaactgtccccagaacccttccagcaggaaaaaaggacgttcgaaaagagccagtgtccttctagcttctgtggaggaagcaacttggaatttattagacaagggagagaagattgcccaggaagctacagttttaaaggatgagcttacggcttcacttgaggaagttcgcaaagaaagtgaagctctgaaagtatcagctgagagatttacagatgacccctgttttctcccaaaaagggaggctgtggttcaagctgcccgtgccttgctggctgcggtgacgagactccttatccttgcggacatgattgatgtcatgtgcctcttgcaacatgtgtcagcttttcaaaggacatttgagtctctcaaaaatgttgccaacaaatctgacctccagaaaacctaccagaagcttgggaaggagctggaaaatttggattatttagccttcaaacgtcagcag

SEQ ID NO: 109445 - DNA, 1131 bp, Artificial Sequence
  derived and/or modified sequence
atgtcagctgaaacaccaatcacattgaatatcgatcctcaggatctgcaggtccaaacattcaccgtggagaagctactggagcctctcataatccaggttaccacacttgtaaactgtccccagaacccttccagcaggaaaaaaggacgttcgaaaagagccagtgtccttctagcttctgtggaggaagcaacttggaatttattagacaagggagagaagattgcccaggaagctacagttttaaaggatgagcttacggcttcacttgaggaagttcgcaaagaaagtgaagctctgaaagtatcagctgagagatttacagatgacccctgttttctcccaaaaagggaggctgtggttcaagctgcccgtgccttgctggctgcggtgacgagactccttatccttgcggacatgattgatgtcatgtgcctcttgcaacatgtgtcagcttttcaaaggacatttgagtctctcaaaaatgttgccaacaaatctgacctccagaaaacctaccagaagcttgggaaggagctggaaaatttggattatttagccttcaaacgtcagcaggacttaaaatctccaaatcagagagatgaaattgcaggagcccgagcttcactgaaggagaactctcccctcttgcattcaatttgttcagcttgtttggagcattctgatgttgcttccctcaaagcaagcaaggacacagtttgtgaagaaattcagaatgctctcaatgtaatttcaaatgcttcacaagggatccagaatatgacaaccccaccagaacctcaggcagcaaccctgggaagtgcccttgatgagctggagaatttaattgtcctgaatccactcacagtaactgaggaggaaatacgaccatcactagagaaacgccttgaagccattatcagtggggctgctctgctggcggattcttcatgtacgagggacttacaccgagagcggattatcgcagaatgcaacgccattcgccaggctcttcaggatctgctttcagagtacatgaacaacctctgtaatcaaaagtctgacctgggcctcactggagtaaaaatcaaattgttggaggaatgcattattttctggagtctctag

SEQ ID NO: 109446 - DNA, 582 bp, Artificial Sequence
  derived and/or modified sequence
atgagcgccgagacccccatcaccctgaacatcgacccccaggacctgcaggtgcagaccttcaccgtggagaagctgctggagcccctgatcatccaggtgaccaccctggtgaactgcccccagaaccccagcagcagaaagaagggcagaagcaagagagccagcgtgctgctggccagcgtggaggaggccacctggaacctgctggacaagggcgagaagatcgcccaggaggccaccgtgctgaaggacgagctgaccgccagcctggaggaggtgagaaaggagagcgaggccctgaaggtgagcgccgagagattcaccgacgacccctgcttcctgcccaagagagaggccgtggtgcaggccgccagagccctgctggccgccgtgaccagactgctgatcctggccgacatgatcgacgtgatgtgcctgctgcagcacgtgagcgccttccagagaaccttcgagagcctgaagaacgtggccaacaagagcgacctgcagaagacctaccagaagctgggcaaggagctggagaacctggactacctggccttcaagagacagcagtag

SEQ ID NO: 109447 - DNA, 1131 bp, Artificial Sequence
  derived and/or modified sequence
atgagcgccgagacccccatcaccctgaacatcgacccccaggacctgcaggtgcagaccttcaccgtggagaagctgctggagcccctgatcatccaggtgaccaccctggtgaactgcccccagaaccccagcagcagaaagaagggcagaagcaagagagccagcgtgctgctggccagcgtggaggaggccacctggaacctgctggacaagggcgagaagatcgcccaggaggccaccgtgctgaaggacgagctgaccgccagcctggaggaggtgagaaaggagagcgaggccctgaaggtgagcgccgagagattcaccgacgacccctgcttcctgcccaagagagaggccgtggtgcaggccgccagagccctgctggccgccgtgaccagactgctgatcctggccgacatgatcgacgtgatgtgcctgctgcagcacgtgagcgccttccagagaaccttcgagagcctgaagaacgtggccaacaagagcgacctgcagaagacctaccagaagctgggcaaggagctggagaacctggactacctggccttcaagagacagcaggacctgaagagccccaaccagagagacgagatcgccggcgccagagccagcctgaaggagaacagccccctgctgcacagcatctgcagcgcctgcctggagcacagcgacgtggccagcctgaaggccagcaaggacaccgtgtgcgaggagatccagaacgccctgaacgtgatcagcaacgccagccagggcatccagaacatgaccaccccccccgagccccaggccgccaccctgggcagcgccctggacgagctggagaacctgatcgtgctgaaccccctgaccgtgaccgaggaggagatcagacccagcctggagaagagactggaggccatcatcagcggcgccgccctgctggccgacagcagctgcaccagagacctgcacagagagagaatcatcgccgagtgcaacgccatcagacaggccctgcaggacctgctgagcgagtacatgaacaacctgtgcaaccagaagagcgacctgggcctgaccggcgtgaagatcaagctgctggaggagtgcatcatcttctggagcctgtag

SEQ ID NO: 109448 - protein, 1435 aa, Artificial Sequence
  derived and/or modified sequence
MNQPPQIAPKRERKTIRIRDPNQGGKDITEEIMSGARTASTPTPPQTGGGLEPQANGETPQVAVIVRPDDRSQGAIIADRPGLPGPEHSPSESQPSSPSPTPSPSPVLEPGSEPNLAVLSIPGDTMTTIQMSVEESTPISRETGEPYRLSPEPTPLAEPILEVEVTLSKPVPESEFSSSPLQAPTPLASHTVEIHEPNGMVPSEDLEPEVESSPELAPPPACPSESPVPIAPTAQPEELLNGAPSPPAVDLSPVSEPEEQAKEVTASMAPPTIPSATPATAPSATSPAQEEEMEEEEEEEEGEAGEAGEAESEKGGEELLPPESTPIPANLSQNLEAAAATQVAVSVPKRRRKIKELNKKEAVGDLLDAFKEANPAVPEVENQPPAGSNPGPESEGSGVPPRPEEADETWDSKEDKIHNAENIQPGEQKYEYKSDQWKPLNLEEKKRYDREFLLGFQFIFASMQKPEGLPHISDVVLDKANKTPLRPLDPTRLQGINCGPDFTPSFANLGRTTLSTRGPPRGGPGGELPRGPAGLGPRRSQQGPRKEPRKIIATVLMTEDIKLNKAEKAWKPSSKRTAADKDRGEEDADGSKTQDLFRRVRSILNKLTPQMFQQLMKQVTQLAIDTEERLKGVIDLIFEKAISEPNFSVAYANMCRCLMALKVPTTEKPTVTVNFRKLLLNRCQKEFEKDKDDDEVFEKKQKEMDEAATAEERGRLKEELEEARDIARRRSLGNIKFIGELFKLKMLTEAIMHDCVVKLLKNHDEESLECLCRLLTTIGKDLDFEKAKPRMDQYFNQMEKIIKEKKTSSRIRFMLQDVLDLRGSNWVPRRGDQGPKTIDQIHKEAEMEEHREHIKVQQLMAKGSDKRRGGPPGPPISRGLPLVDDGGWNTVPISKGSRPIDTSRLTKITKPGSIDSNNQLFAPGGRLSWGKGSSGGSGAKPSDAASEAARPATSTLNRFSALQQAVPTESTDNRRVVQRSSLSRERGEKAGDRGDRLERSERGGDRGDRLDRARTPATKRSFSKEVEERSRERPSQPEGLRKAASLTEDRDRGRDAVKREAALPPVSPLKAALSEEELEKKSKAIIEEYLHLNDMKEAVQCVQELASPSLLFIFVRHGVESTLERSAIAREHMGQLLHQLLCAGHLSTAQYYQGLYEILELAEDMEIDIPHVWLYLAELVTPILQEGGVPMGELFREITKPLRPLGKAASLLLEILGLLCKSMGPKKVGTLWREAGLSWKEFLPEGQDIGAFVAEQKVEYTLGEESEAPGQRALPSEELNRQLEKLLKEGSSNQRVFDWIEANLSEQQIVSNTLVRALMTAVCYSAIIFETPLRVDVAVLKARAKLLQKYLCDEQKELQALYALQALVVTLEQPPNLLRMFFDALYDEDVVKEDAFYSWESSKDPAEQQGKGVALKSVTAFFKWLREAEEESDHN

SEQ ID NO: 109449 - protein, 1512 aa, Artificial Sequence
  derived and/or modified sequence
MMIPSQISYPASQGAYYIPGQGRSTYVVPTQQYPVQPGAPGFYPGASPTEFGTYAGAYYPAQGVQQFPTGVAPTPVLMNQPPQIAPKRERKTIRIRDPNQGGKDITEEIMSGARTASTPTPPQTGGGLEPQANGETPQVAVIVRPDDRSQGAIIADRPGLPGPEHSPSESQPSSPSPTPSPSPVLEPGSEPNLAVLSIPGDTMTTIQMSVEESTPISRETGEPYRLSPEPTPLAEPILEVEVTLSKPVPESEFSSSPLQAPTPLASHTVEIHEPNGMVPSEDLEPEVESSPELAPPPACPSESPVPIAPTAQPEELLNGAPSPPAVDLSPVSEPEEQAKEVTASMAPPTIPSATPATAPSATSPAQEEEMEEEEEEEEGEAGEAGEAESEKGGEELLPPESTPIPANLSQNLEAAAATQVAVSVPKRRRKIKELNKKEAVGDLLDAFKEANPAVPEVENQPPAGSNPGPESEGSGVPPRPEEADETWDSKEDKIHNAENIQPGEQKYEYKSDQWKPLNLEEKKRYDREFLLGFQFIFASMQKPEGLPHISDVVLDKANKTPLRPLDPTRLQGINCGPDFTPSFANLGRTTLSTRGPPRGGPGGELPRGPAGLGPRRSQQGPRKEPRKIIATVLMTEDIKLNKAEKAWKPSSKRTAADKDRGEEDADGSKTQDLFRRVRSILNKLTPQMFQQLMKQVTQLAIDTEERLKGVIDLIFEKAISEPNFSVAYANMCRCLMALKVPTTEKPTVTVNFRKLLLNRCQKEFEKDKDDDEVFEKKQKEMDEAATAEERGRLKEELEEARDIARRRSLGNIKFIGELFKLKMLTEAIMHDCVVKLLKNHDEESLECLCRLLTTIGKDLDFEKAKPRMDQYFNQMEKIIKEKKTSSRIRFMLQDVLDLRGSNWVPRRGDQGPKTIDQIHKEAEMEEHREHIKVQQLMAKGSDKRRGGPPGPPISRGLPLVDDGGWNTVPISKGSRPIDTSRLTKITKPGSIDSNNQLFAPGGRLSWGKGSSGGSGAKPSDAASEAARPATSTLNRFSALQQAVPTESTDNRRVVQRSSLSRERGEKAGDRGDRLERSERGGDRGDRLDRARTPATKRSFSKEVEERSRERPSQPEGLRKAASLTEDRDRGRDAVKREAALPPVSPLKAALSEEELEKKSKAIIEEYLHLNDMKEAVQCVQELASPSLLFIFVRHGVESTLERSAIAREHMGQLLHQLLCAGHLSTAQYYQGLYEILELAEDMEIDIPHVWLYLAELVTPILQEGGVPMGELFREITKPLRPLGKAASLLLEILGLLCKSMGPKKVGTLWREAGLSWKEFLPEGQDIGAFVAEQKVEYTLGEESEAPGQRALPSEELNRQLEKLLKEGSSNQRVFDWIEANLSEQQIVSNTLVRALMTAVCYSAIIFETPLRVDVAVLKARAKLLQKYLCDEQKELQALYALQALVVTLEQPPNLLRMFFDALYDEDVVKEDAFYSWESSKDPAEQQGKGVALKSVTAFFKWLREAEEESDHN

SEQ ID NO: 109450 - protein, 1559 aa, Artificial Sequence
  derived and/or modified sequence
MNTPSQPRQHFYPSRAQPPSSAASRVQSAAPARPGPAAHVYPAGSQVMMIPSQISYPASQGAYYIPGQGRSTYVVPTQQYPVQPGAPGFYPGASPTEFGTYAGAYYPAQGVQQFPTGVAPTPVLMNQPPQIAPKRERKTIRIRDPNQGGKDITEEIMSGARTASTPTPPQTGGGLEPQANGETPQVAVIVRPDDRSQGAIIADRPGLPGPEHSPSESQPSSPSPTPSPSPVLEPGSEPNLAVLSIPGDTMTTIQMSVEESTPISRETGEPYRLSPEPTPLAEPILEVEVTLSKPVPESEFSSSPLQAPTPLASHTVEIHEPNGMVPSEDLEPEVESSPELAPPPACPSESPVPIAPTAQPEELLNGAPSPPAVDLSPVSEPEEQAKEVTASMAPPTIPSATPATAPSATSPAQEEEMEEEEEEEEGEAGEAGEAESEKGGEELLPPESTPIPANLSQNLEAAAATQVAVSVPKRRRKIKELNKKEAVGDLLDAFKEANPAVPEVENQPPAGSNPGPESEGSGVPPRPEEADETWDSKEDKIHNAENIQPGEQKYEYKSDQWKPLNLEEKKRYDREFLLGFQFIFASMQKPEGLPHISDVVLDKANKTPLRPLDPTRLQGINCGPDFTPSFANLGRTTLSTRGPPRGGPGGELPRGPAGLGPRRSQQGPRKEPRKIIATVLMTEDIKLNKAEKAWKPSSKRTAADKDRGEEDADGSKTQDLFRRVRSILNKLTPQMFQQLMKQVTQLAIDTEERLKGVIDLIFEKAISEPNFSVAYANMCRCLMALKVPTTEKPTVTVNFRKLLLNRCQKEFEKDKDDDEVFEKKQKEMDEAATAEERGRLKEELEEARDIARRRSLGNIKFIGELFKLKMLTEAIMHDCVVKLLKNHDEESLECLCRLLTTIGKDLDFEKAKPRMDQYFNQMEKIIKEKKTSSRIRFMLQDVLDLRGSNWVPRRGDQGPKTIDQIHKEAEMEEHREHIKVQQLMAKGSDKRRGGPPGPPISRGLPLVDDGGWNTVPISKGSRPIDTSRLTKITKPGSIDSNNQLFAPGGRLSWGKGSSGGSGAKPSDAASEAARPATSTLNRFSALQQAVPTESTDNRRVVQRSSLSRERGEKAGDRGDRLERSERGGDRGDRLDRARTPATKRSFSKEVEERSRERPSQPEGLRKAASLTEDRDRGRDAVKREAALPPVSPLKAALSEEELEKKSKAIIEEYLHLNDMKEAVQCVQELASPSLLFIFVRHGVESTLERSAIAREHMGQLLHQLLCAGHLSTAQYYQGLYEILELAEDMEIDIPHVWLYLAELVTPILQEGGVPMGELFREITKPLRPLGKAASLLLEILGLLCKSMGPKKVGTLWREAGLSWKEFLPEGQDIGAFVAEQKVEYTLGEESEAPGQRALPSEELNRQLEKLLKEGSSNQRVFDWIEANLSEQQIVSNTLVRALMTAVCYSAIIFETPLRVDVAVLKARAKLLQKYLCDEQKELQALYALQALVVTLEQPPNLLRMFFDALYDEDVVKEDAFYSWESSKDPAEQQGKGVALKSVTAFFKWLREAEEESDHN

SEQ ID NO: 109451 - protein, 87 aa, Artificial Sequence
  derived and/or modified sequence
MNTPSQPRQHFYPSRAQPPSSAASRVQSAAPARPGPAAHVYPAGSQVMMIPSQISYPASQGAYYIPGQGRSTYVVPTQQYPVQPGAP

SEQ ID NO: 109452 - DNA, 4308 bp, Artificial Sequence
  derived and/or modified sequence
atgaaccagcccccccagatcgcccccaagagagagagaaagaccatcagaatcagagaccccaaccagggcggcaaggacatcaccgaggagatcatgagcggcgccagaaccgccagcacccccacccccccccagaccggcggcggcctggagccccaggccaacggcgagaccccccaggtggccgtgatcgtgagacccgacgacagaagccagggcgccatcatcgccgacagacccggcctgcccggccccgagcacagccccagcgagagccagcccagcagccccagccccacccccagccccagccccgtgctggagcccggcagcgagcccaacctggccgtgctgagcatccccggcgacaccatgaccaccatccagatgagcgtggaggagagcacccccatcagcagagagaccggcgagccctacagactgagccccgagcccacccccctggccgagcccatcctggaggtggaggtgaccctgagcaagcccgtgcccgagagcgagttcagcagcagccccctgcaggcccccacccccctggccagccacaccgtggagatccacgagcccaacggcatggtgcccagcgaggacctggagcccgaggtggagagcagccccgagctggcccccccccccgcctgccccagcgagagccccgtgcccatcgcccccaccgcccagcccgaggagctgctgaacggcgcccccagcccccccgccgtggacctgagccccgtgagcgagcccgaggagcaggccaaggaggtgaccgccagcatggccccccccaccatccccagcgccacccccgccaccgcccccagcgccaccagccccgcccaggaggaggagatggaggaggaggaggaggaggaggagggcgaggccggcgaggccggcgaggccgagagcgagaagggcggcgaggagctgctgccccccgagagcacccccatccccgccaacctgagccagaacctggaggccgccgccgccacccaggtggccgtgagcgtgcccaagagaagaagaaagatcaaggagctgaacaagaaggaggccgtgggcgacctgctggacgccttcaaggaggccaaccccgccgtgcccgaggtggagaaccagccccccgccggcagcaaccccggccccgagagcgagggcagcggcgtgccccccagacccgaggaggccgacgagacctgggacagcaaggaggacaagatccacaacgccgagaacatccagcccggcgagcagaagtacgagtacaagagcgaccagtggaagcccctgaacctggaggagaagaagagatacgacagagagttcctgctgggcttccagttcatcttcgccagcatgcagaagcccgagggcctgccccacatcagcgacgtggtgctggacaaggccaacaagacccccctgagacccctggaccccaccagactgcagggcatcaactgcggccccgacttcacccccagcttcgccaacctgggcagaaccaccctgagcaccagaggcccccccagaggcggccccggcggcgagctgcccagaggccccgccggcctgggccccagaagaagccagcagggccccagaaaggagcccagaaagatcatcgccaccgtgctgatgaccgaggacatcaagctgaacaaggccgagaaggcctggaagcccagcagcaagagaaccgccgccgacaaggacagaggcgaggaggacgccgacggcagcaagacccaggacctgttcagaagagtgagaagcatcctgaacaagctgaccccccagatgttccagcagctgatgaagcaggtgacccagctggccatcgacaccgaggagagactgaagggcgtgatcgacctgatcttcgagaaggccatcagcgagcccaacttcagcgtggcctacgccaacatgtgcagatgcctgatggccctgaaggtgcccaccaccgagaagcccaccgtgaccgtgaacttcagaaagctgctgctgaacagatgccagaaggagttcgagaaggacaaggacgacgacgaggtgttcgagaagaagcagaaggagatggacgaggccgccaccgccgaggagagaggcagactgaaggaggagctggaggaggccagagacatcgccagaagaagaagcctgggcaacatcaagttcatcggcgagctgttcaagctgaagatgctgaccgaggccatcatgcacgactgcgtggtgaagctgctgaagaaccacgacgaggagagcctggagtgcctgtgcagactgctgaccaccatcggcaaggacctggacttcgagaaggccaagcccagaatggaccagtacttcaaccagatggagaagatcatcaaggagaagaagaccagcagcagaatcagattcatgctgcaggacgtgctggacctgagaggcagcaactgggtgcccagaagaggcgaccagggccccaagaccatcgaccagatccacaaggaggccgagatggaggagcacagagagcacatcaaggtgcagcagctgatggccaagggcagcgacaagagaagaggcggcccccccggcccccccatcagcagaggcctgcccctggtggacgacggcggctggaacaccgtgcccatcagcaagggcagcagacccatcgacaccagcagactgaccaagatcaccaagcccggcagcatcgacagcaacaaccagctgttcgcccccggcggcagactgagctggggcaagggcagcagcggcggcagcggcgccaagcccagcgacgccgccagcgaggccgccagacccgccaccagcaccctgaacagattcagcgccctgcagcaggccgtgcccaccgagagcaccgacaacagaagagtggtgcagagaagcagcctgagcagagagagaggcgagaaggccggcgacagaggcgacagactggagagaagcgagagaggcggcgacagaggcgacagactggacagagccagaacccccgccaccaagagaagcttcagcaaggaggtggaggagagaagcagagagagacccagccagcccgagggcctgagaaaggccgccagcctgaccgaggacagagacagaggcagagacgccgtgaagagagaggccgccctgccccccgtgagccccctgaaggccgccctgagcgaggaggagctggagaagaagagcaaggccatcatcgaggagtacctgcacctgaacgacatgaaggaggccgtgcagtgcgtgcaggagctggccagccccagcctgctgttcatcttcgtgagacacggcgtggagagcaccctggagagaagcgccatcgccagagagcacatgggccagctgctgcaccagctgctgtgcgccggccacctgagcaccgcccagtactaccagggcctgtacgagatcctggagctggccgaggacatggagatcgacatcccccacgtgtggctgtacctggccgagctggtgacccccatcctgcaggagggcggcgtgcccatgggcgagctgttcagagagatcaccaagcccctgagacccctgggcaaggccgccagcctgctgctggagatcctgggcctgctgtgcaagagcatgggccccaagaaggtgggcaccctgtggagagaggccggcctgagctggaaggagttcctgcccgagggccaggacatcggcgccttcgtggccgagcagaaggtggagtacaccctgggcgaggagagcgaggcccccggccagagagccctgcccagcgaggagctgaacagacagctggagaagctgctgaaggagggcagcagcaaccagagagtgttcgactggatcgaggccaacctgagcgagcagcagatcgtgagcaacaccctggtgagagccctgatgaccgccgtgtgctacagcgccatcatcttcgagacccccctgagagtggacgtggccgtgctgaaggccagagccaagctgctgcagaagtacctgtgcgacgagcagaaggagctgcaggccctgtacgccctgcaggccctggtggtgaccctggagcagccccccaacctgctgagaatgttcttcgacgccctgtacgacgaggacgtggtgaaggaggacgccttctacagctgggagagcagcaaggaccccgccgagcagcagggcaagggcgtggccctgaagagcgtgaccgccttcttcaagtggctgagagaggccgaggaggagagcgaccacaactag

SEQ ID NO: 109453 - DNA, 4539 bp, Artificial Sequence
  derived and/or modified sequence
atgatgatccccagccagatcagctaccccgccagccagggcgcctactacatccccggccagggcagaagcacctacgtggtgcccacccagcagtaccccgtgcagcccggcgcccccggcttctaccccggcgccagccccaccgagttcggcacctacgccggcgcctactaccccgcccagggcgtgcagcagttccccaccggcgtggcccccacccccgtgctgatgaaccagcccccccagatcgcccccaagagagagagaaagaccatcagaatcagagaccccaaccagggcggcaaggacatcaccgaggagatcatgagcggcgccagaaccgccagcacccccacccccccccagaccggcggcggcctggagccccaggccaacggcgagaccccccaggtggccgtgatcgtgagacccgacgacagaagccagggcgccatcatcgccgacagacccggcctgcccggccccgagcacagccccagcgagagccagcccagcagccccagccccacccccagccccagccccgtgctggagcccggcagcgagcccaacctggccgtgctgagcatccccggcgacaccatgaccaccatccagatgagcgtggaggagagcacccccatcagcagagagaccggcgagccctacagactgagccccgagcccacccccctggccgagcccatcctggaggtggaggtgaccctgagcaagcccgtgcccgagagcgagttcagcagcagccccctgcaggcccccacccccctggccagccacaccgtggagatccacgagcccaacggcatggtgcccagcgaggacctggagcccgaggtggagagcagccccgagctggcccccccccccgcctgccccagcgagagccccgtgcccatcgcccccaccgcccagcccgaggagctgctgaacggcgcccccagcccccccgccgtggacctgagccccgtgagcgagcccgaggagcaggccaaggaggtgaccgccagcatggccccccccaccatccccagcgccacccccgccaccgcccccagcgccaccagccccgcccaggaggaggagatggaggaggaggaggaggaggaggagggcgaggccggcgaggccggcgaggccgagagcgagaagggcggcgaggagctgctgccccccgagagcacccccatccccgccaacctgagccagaacctggaggccgccgccgccacccaggtggccgtgagcgtgcccaagagaagaagaaagatcaaggagctgaacaagaaggaggccgtgggcgacctgctggacgccttcaaggaggccaaccccgccgtgcccgaggtggagaaccagccccccgccggcagcaaccccggccccgagagcgagggcagcggcgtgccccccagacccgaggaggccgacgagacctgggacagcaaggaggacaagatccacaacgccgagaacatccagcccggcgagcagaagtacgagtacaagagcgaccagtggaagcccctgaacctggaggagaagaagagatacgacagagagttcctgctgggcttccagttcatcttcgccagcatgcagaagcccgagggcctgccccacatcagcgacgtggtgctggacaaggccaacaagacccccctgagacccctggaccccaccagactgcagggcatcaactgcggccccgacttcacccccagcttcgccaacctgggcagaaccaccctgagcaccagaggcccccccagaggcggccccggcggcgagctgcccagaggccccgccggcctgggccccagaagaagccagcagggccccagaaaggagcccagaaagatcatcgccaccgtgctgatgaccgaggacatcaagctgaacaaggccgagaaggcctggaagcccagcagcaagagaaccgccgccgacaaggacagaggcgaggaggacgccgacggcagcaagacccaggacctgttcagaagagtgagaagcatcctgaacaagctgaccccccagatgttccagcagctgatgaagcaggtgacccagctggccatcgacaccgaggagagactgaagggcgtgatcgacctgatcttcgagaaggccatcagcgagcccaacttcagcgtggcctacgccaacatgtgcagatgcctgatggccctgaaggtgcccaccaccgagaagcccaccgtgaccgtgaacttcagaaagctgctgctgaacagatgccagaaggagttcgagaaggacaaggacgacgacgaggtgttcgagaagaagcagaaggagatggacgaggccgccaccgccgaggagagaggcagactgaaggaggagctggaggaggccagagacatcgccagaagaagaagcctgggcaacatcaagttcatcggcgagctgttcaagctgaagatgctgaccgaggccatcatgcacgactgcgtggtgaagctgctgaagaaccacgacgaggagagcctggagtgcctgtgcagactgctgaccaccatcggcaaggacctggacttcgagaaggccaagcccagaatggaccagtacttcaaccagatggagaagatcatcaaggagaagaagaccagcagcagaatcagattcatgctgcaggacgtgctggacctgagaggcagcaactgggtgcccagaagaggcgaccagggccccaagaccatcgaccagatccacaaggaggccgagatggaggagcacagagagcacatcaaggtgcagcagctgatggccaagggcagcgacaagagaagaggcggcccccccggcccccccatcagcagaggcctgcccctggtggacgacggcggctggaacaccgtgcccatcagcaagggcagcagacccatcgacaccagcagactgaccaagatcaccaagcccggcagcatcgacagcaacaaccagctgttcgcccccggcggcagactgagctggggcaagggcagcagcggcggcagcggcgccaagcccagcgacgccgccagcgaggccgccagacccgccaccagcaccctgaacagattcagcgccctgcagcaggccgtgcccaccgagagcaccgacaacagaagagtggtgcagagaagcagcctgagcagagagagaggcgagaaggccggcgacagaggcgacagactggagagaagcgagagaggcggcgacagaggcgacagactggacagagccagaacccccgccaccaagagaagcttcagcaaggaggtggaggagagaagcagagagagacccagccagcccgagggcctgagaaaggccgccagcctgaccgaggacagagacagaggcagagacgccgtgaagagagaggccgccctgccccccgtgagccccctgaaggccgccctgagcgaggaggagctggagaagaagagcaaggccatcatcgaggagtacctgcacctgaacgacatgaaggaggccgtgcagtgcgtgcaggagctggccagccccagcctgctgttcatcttcgtgagacacggcgtggagagcaccctggagagaagcgccatcgccagagagcacatgggccagctgctgcaccagctgctgtgcgccggccacctgagcaccgcccagtactaccagggcctgtacgagatcctggagctggccgaggacatggagatcgacatcccccacgtgtggctgtacctggccgagctggtgacccccatcctgcaggagggcggcgtgcccatgggcgagctgttcagagagatcaccaagcccctgagacccctgggcaaggccgccagcctgctgctggagatcctgggcctgctgtgcaagagcatgggccccaagaaggtgggcaccctgtggagagaggccggcctgagctggaaggagttcctgcccgagggccaggacatcggcgccttcgtggccgagcagaaggtggagtacaccctgggcgaggagagcgaggcccccggccagagagccctgcccagcgaggagctgaacagacagctggagaagctgctgaaggagggcagcagcaaccagagagtgttcgactggatcgaggccaacctgagcgagcagcagatcgtgagcaacaccctggtgagagccctgatgaccgccgtgtgctacagcgccatcatcttcgagacccccctgagagtggacgtggccgtgctgaaggccagagccaagctgctgcagaagtacctgtgcgacgagcagaaggagctgcaggccctgtacgccctgcaggccctggtggtgaccctggagcagccccccaacctgctgagaatgttcttcgacgccctgtacgacgaggacgtggtgaaggaggacgccttctacagctgggagagcagcaaggaccccgccgagcagcagggcaagggcgtggccctgaagagcgtgaccgccttcttcaagtggctgagagaggccgaggaggagagcgaccacaactag

SEQ ID NO: 109454 - DNA, 4680 bp, Artificial Sequence
  derived and/or modified sequence
atgaacacccccagccagcccagacagcacttctaccccagcagagcccagccccccagcagcgccgccagcagagtgcagagcgccgcccccgccagacccggccccgccgcccacgtgtaccccgccggcagccaggtgatgatgatccccagccagatcagctaccccgccagccagggcgcctactacatccccggccagggcagaagcacctacgtggtgcccacccagcagtaccccgtgcagcccggcgcccccggcttctaccccggcgccagccccaccgagttcggcacctacgccggcgcctactaccccgcccagggcgtgcagcagttccccaccggcgtggcccccacccccgtgctgatgaaccagcccccccagatcgcccccaagagagagagaaagaccatcagaatcagagaccccaaccagggcggcaaggacatcaccgaggagatcatgagcggcgccagaaccgccagcacccccacccccccccagaccggcggcggcctggagccccaggccaacggcgagaccccccaggtggccgtgatcgtgagacccgacgacagaagccagggcgccatcatcgccgacagacccggcctgcccggccccgagcacagccccagcgagagccagcccagcagccccagccccacccccagccccagccccgtgctggagcccggcagcgagcccaacctggccgtgctgagcatccccggcgacaccatgaccaccatccagatgagcgtggaggagagcacccccatcagcagagagaccggcgagccctacagactgagccccgagcccacccccctggccgagcccatcctggaggtggaggtgaccctgagcaagcccgtgcccgagagcgagttcagcagcagccccctgcaggcccccacccccctggccagccacaccgtggagatccacgagcccaacggcatggtgcccagcgaggacctggagcccgaggtggagagcagccccgagctggcccccccccccgcctgccccagcgagagccccgtgcccatcgcccccaccgcccagcccgaggagctgctgaacggcgcccccagcccccccgccgtggacctgagccccgtgagcgagcccgaggagcaggccaaggaggtgaccgccagcatggccccccccaccatccccagcgccacccccgccaccgcccccagcgccaccagccccgcccaggaggaggagatggaggaggaggaggaggaggaggagggcgaggccggcgaggccggcgaggccgagagcgagaagggcggcgaggagctgctgccccccgagagcacccccatccccgccaacctgagccagaacctggaggccgccgccgccacccaggtggccgtgagcgtgcccaagagaagaagaaagatcaaggagctgaacaagaaggaggccgtgggcgacctgctggacgccttcaaggaggccaaccccgccgtgcccgaggtggagaaccagccccccgccggcagcaaccccggccccgagagcgagggcagcggcgtgccccccagacccgaggaggccgacgagacctgggacagcaaggaggacaagatccacaacgccgagaacatccagcccggcgagcagaagtacgagtacaagagcgaccagtggaagcccctgaacctggaggagaagaagagatacgacagagagttcctgctgggcttccagttcatcttcgccagcatgcagaagcccgagggcctgccccacatcagcgacgtggtgctggacaaggccaacaagacccccctgagacccctggaccccaccagactgcagggcatcaactgcggccccgacttcacccccagcttcgccaacctgggcagaaccaccctgagcaccagaggcccccccagaggcggccccggcggcgagctgcccagaggccccgccggcctgggccccagaagaagccagcagggccccagaaaggagcccagaaagatcatcgccaccgtgctgatgaccgaggacatcaagctgaacaaggccgagaaggcctggaagcccagcagcaagagaaccgccgccgacaaggacagaggcgaggaggacgccgacggcagcaagacccaggacctgttcagaagagtgagaagcatcctgaacaagctgaccccccagatgttccagcagctgatgaagcaggtgacccagctggccatcgacaccgaggagagactgaagggcgtgatcgacctgatcttcgagaaggccatcagcgagcccaacttcagcgtggcctacgccaacatgtgcagatgcctgatggccctgaaggtgcccaccaccgagaagcccaccgtgaccgtgaacttcagaaagctgctgctgaacagatgccagaaggagttcgagaaggacaaggacgacgacgaggtgttcgagaagaagcagaaggagatggacgaggccgccaccgccgaggagagaggcagactgaaggaggagctggaggaggccagagacatcgccagaagaagaagcctgggcaacatcaagttcatcggcgagctgttcaagctgaagatgctgaccgaggccatcatgcacgactgcgtggtgaagctgctgaagaaccacgacgaggagagcctggagtgcctgtgcagactgctgaccaccatcggcaaggacctggacttcgagaaggccaagcccagaatggaccagtacttcaaccagatggagaagatcatcaaggagaagaagaccagcagcagaatcagattcatgctgcaggacgtgctggacctgagaggcagcaactgggtgcccagaagaggcgaccagggccccaagaccatcgaccagatccacaaggaggccgagatggaggagcacagagagcacatcaaggtgcagcagctgatggccaagggcagcgacaagagaagaggcggcccccccggcccccccatcagcagaggcctgcccctggtggacgacggcggctggaacaccgtgcccatcagcaagggcagcagacccatcgacaccagcagactgaccaagatcaccaagcccggcagcatcgacagcaacaaccagctgttcgcccccggcggcagactgagctggggcaagggcagcagcggcggcagcggcgccaagcccagcgacgccgccagcgaggccgccagacccgccaccagcaccctgaacagattcagcgccctgcagcaggccgtgcccaccgagagcaccgacaacagaagagtggtgcagagaagcagcctgagcagagagagaggcgagaaggccggcgacagaggcgacagactggagagaagcgagagaggcggcgacagaggcgacagactggacagagccagaacccccgccaccaagagaagcttcagcaaggaggtggaggagagaagcagagagagacccagccagcccgagggcctgagaaaggccgccagcctgaccgaggacagagacagaggcagagacgccgtgaagagagaggccgccctgccccccgtgagccccctgaaggccgccctgagcgaggaggagctggagaagaagagcaaggccatcatcgaggagtacctgcacctgaacgacatgaaggaggccgtgcagtgcgtgcaggagctggccagccccagcctgctgttcatcttcgtgagacacggcgtggagagcaccctggagagaagcgccatcgccagagagcacatgggccagctgctgcaccagctgctgtgcgccggccacctgagcaccgcccagtactaccagggcctgtacgagatcctggagctggccgaggacatggagatcgacatcccccacgtgtggctgtacctggccgagctggtgacccccatcctgcaggagggcggcgtgcccatgggcgagctgttcagagagatcaccaagcccctgagacccctgggcaaggccgccagcctgctgctggagatcctgggcctgctgtgcaagagcatgggccccaagaaggtgggcaccctgtggagagaggccggcctgagctggaaggagttcctgcccgagggccaggacatcggcgccttcgtggccgagcagaaggtggagtacaccctgggcgaggagagcgaggcccccggccagagagccctgcccagcgaggagctgaacagacagctggagaagctgctgaaggagggcagcagcaaccagagagtgttcgactggatcgaggccaacctgagcgagcagcagatcgtgagcaacaccctggtgagagccctgatgaccgccgtgtgctacagcgccatcatcttcgagacccccctgagagtggacgtggccgtgctgaaggccagagccaagctgctgcagaagtacctgtgcgacgagcagaaggagctgcaggccctgtacgccctgcaggccctggtggtgaccctggagcagccccccaacctgctgagaatgttcttcgacgccctgtacgacgaggacgtggtgaaggaggacgccttctacagctgggagagcagcaaggaccccgccgagcagcagggcaagggcgtggccctgaagagcgtgaccgccttcttcaagtggctgagagaggccgaggaggagagcgaccacaactag

SEQ ID NO: 109455 - DNA, 4212 bp, Artificial Sequence
  derived and/or modified sequence
atgagcggcgccagaaccgccagcacccccacccccccccagaccggcggcggcctggagccccaggccaacggcgagaccccccaggtggccgtgatcgtgagacccgacgacagaagccagggcgccatcatcgccgacagacccggcctgcccggccccgagcacagccccagcgagagccagcccagcagccccagccccacccccagccccagccccgtgctggagcccggcagcgagcccaacctggccgtgctgagcatccccggcgacaccatgaccaccatccagatgagcgtggaggagagcacccccatcagcagagagaccggcgagccctacagactgagccccgagcccacccccctggccgagcccatcctggaggtggaggtgaccctgagcaagcccgtgcccgagagcgagttcagcagcagccccctgcaggcccccacccccctggccagccacaccgtggagatccacgagcccaacggcatggtgcccagcgaggacctggagcccgaggtggagagcagccccgagctggcccccccccccgcctgccccagcgagagccccgtgcccatcgcccccaccgcccagcccgaggagctgctgaacggcgcccccagcccccccgccgtggacctgagccccgtgagcgagcccgaggagcaggccaaggaggtgaccgccagcatggccccccccaccatccccagcgccacccccgccaccgcccccagcgccaccagccccgcccaggaggaggagatggaggaggaggaggaggaggaggagggcgaggccggcgaggccggcgaggccgagagcgagaagggcggcgaggagctgctgccccccgagagcacccccatccccgccaacctgagccagaacctggaggccgccgccgccacccaggtggccgtgagcgtgcccaagagaagaagaaagatcaaggagctgaacaagaaggaggccgtgggcgacctgctggacgccttcaaggaggccaaccccgccgtgcccgaggtggagaaccagccccccgccggcagcaaccccggccccgagagcgagggcagcggcgtgccccccagacccgaggaggccgacgagacctgggacagcaaggaggacaagatccacaacgccgagaacatccagcccggcgagcagaagtacgagtacaagagcgaccagtggaagcccctgaacctggaggagaagaagagatacgacagagagttcctgctgggcttccagttcatcttcgccagcatgcagaagcccgagggcctgccccacatcagcgacgtggtgctggacaaggccaacaagacccccctgagacccctggaccccaccagactgcagggcatcaactgcggccccgacttcacccccagcttcgccaacctgggcagaaccaccctgagcaccagaggcccccccagaggcggccccggcggcgagctgcccagaggccccgccggcctgggccccagaagaagccagcagggccccagaaaggagcccagaaagatcatcgccaccgtgctgatgaccgaggacatcaagctgaacaaggccgagaaggcctggaagcccagcagcaagagaaccgccgccgacaaggacagaggcgaggaggacgccgacggcagcaagacccaggacctgttcagaagagtgagaagcatcctgaacaagctgaccccccagatgttccagcagctgatgaagcaggtgacccagctggccatcgacaccgaggagagactgaagggcgtgatcgacctgatcttcgagaaggccatcagcgagcccaacttcagcgtggcctacgccaacatgtgcagatgcctgatggccctgaaggtgcccaccaccgagaagcccaccgtgaccgtgaacttcagaaagctgctgctgaacagatgccagaaggagttcgagaaggacaaggacgacgacgaggtgttcgagaagaagcagaaggagatggacgaggccgccaccgccgaggagagaggcagactgaaggaggagctggaggaggccagagacatcgccagaagaagaagcctgggcaacatcaagttcatcggcgagctgttcaagctgaagatgctgaccgaggccatcatgcacgactgcgtggtgaagctgctgaagaaccacgacgaggagagcctggagtgcctgtgcagactgctgaccaccatcggcaaggacctggacttcgagaaggccaagcccagaatggaccagtacttcaaccagatggagaagatcatcaaggagaagaagaccagcagcagaatcagattcatgctgcaggacgtgctggacctgagaggcagcaactgggtgcccagaagaggcgaccagggccccaagaccatcgaccagatccacaaggaggccgagatggaggagcacagagagcacatcaaggtgcagcagctgatggccaagggcagcgacaagagaagaggcggcccccccggcccccccatcagcagaggcctgcccctggtggacgacggcggctggaacaccgtgcccatcagcaagggcagcagacccatcgacaccagcagactgaccaagatcaccaagcccggcagcatcgacagcaacaaccagctgttcgcccccggcggcagactgagctggggcaagggcagcagcggcggcagcggcgccaagcccagcgacgccgccagcgaggccgccagacccgccaccagcaccctgaacagattcagcgccctgcagcaggccgtgcccaccgagagcaccgacaacagaagagtggtgcagagaagcagcctgagcagagagagaggcgagaaggccggcgacagaggcgacagactggagagaagcgagagaggcggcgacagaggcgacagactggacagagccagaacccccgccaccaagagaagcttcagcaaggaggtggaggagagaagcagagagagacccagccagcccgagggcctgagaaaggccgccagcctgaccgaggacagagacagaggcagagacgccgtgaagagagaggccgccctgccccccgtgagccccctgaaggccgccctgagcgaggaggagctggagaagaagagcaaggccatcatcgaggagtacctgcacctgaacgacatgaaggaggccgtgcagtgcgtgcaggagctggccagccccagcctgctgttcatcttcgtgagacacggcgtggagagcaccctggagagaagcgccatcgccagagagcacatgggccagctgctgcaccagctgctgtgcgccggccacctgagcaccgcccagtactaccagggcctgtacgagatcctggagctggccgaggacatggagatcgacatcccccacgtgtggctgtacctggccgagctggtgacccccatcctgcaggagggcggcgtgcccatgggcgagctgttcagagagatcaccaagcccctgagacccctgggcaaggccgccagcctgctgctggagatcctgggcctgctgtgcaagagcatgggccccaagaaggtgggcaccctgtggagagaggccggcctgagctggaaggagttcctgcccgagggccaggacatcggcgccttcgtggccgagcagaaggtggagtacaccctgggcgaggagagcgaggcccccggccagagagccctgcccagcgaggagctgaacagacagctggagaagctgctgaaggagggcagcagcaaccagagagtgttcgactggatcgaggccaacctgagcgagcagcagatcgtgagcaacaccctggtgagagccctgatgaccgccgtgtgctacagcgccatcatcttcgagacccccctgagagtggacgtggccgtgctgaaggccagagccaagctgctgcagaagtacctgtgcgacgagcagaaggagctgcaggccctgtacgccctgcaggccctggtggtgaccctggagcagccccccaacctgctgagaatgttcttcgacgccctgtacgacgaggacgtggtgaaggaggacgccttctacagctgggagagcagcaaggaccccgccgagcagcagggcaagggcgtggccctgaagagcgtgaccgccttcttcaagtggctgagagaggccgaggaggagagcgaccacaactag

SEQ ID NO: 109456 - DNA, 264 bp, Artificial Sequence
  derived and/or modified sequence
atgaacacccccagccagcccagacagcacttctaccccagcagagcccagccccccagcagcgccgccagcagagtgcagagcgccgcccccgccagacccggccccgccgcccacgtgtaccccgccggcagccaggtgatgatgatccccagccagatcagctaccccgccagccagggcgcctactacatccccggccagggcagaagcacctacgtggtgcccacccagcagtaccccgtgcagcccggcgccccctag

SEQ ID NO: 109457 - DNA, 4308 bp, Artificial Sequence
  derived and/or modified sequence
atgaaccagccaccacagatcgcccccaaaagagaaagaaaaacaatccggatcagagacccaaatcagggcggaaaagatattacagaggagatcatgagcggtgctaggactgccagcacacccacccctccacagactggcggtggccttgaaccgcaggctaatggggaaacgcctcaggtcgcggtgattgtgaggcctgacgacagatctcagggagcaattatcgcagaccgcccgggcctgcccgggccagagcacagcccctctgagtcacagccttcaagtccatcaccaaccccatctccaagccctgtgttagagcccggctctgaaccgaatctcgctgtcttatccatccccggcgatacaatgaccaccatacagatgtccgtcgaggagtcgactcctatctcacgtgagacgggagaaccctaccggttgtctcctgagccaaccccactcgcagaacccatcctggaggtggaggtgacactctctaaacctgtccccgagtctgaattcagttcgtctccactacaagcccctacgcccctcgccagtcacactgtggaaatccatgagcctaacggtatggtaccatccgaggacctggaacctgaggttgagagcagtccggagctggccccaccgccagcatgtccaagtgagagtcctgtgcctatagcacccacagcacagccagaggaactgttgaacggagccccatccccgcccgcagtcgacctgtctcccgtgtcagaacccgaggaacaggcaaaggaagtgactgcctctatggcccctccaactattccctctgccacgccggctaccgcgcccagtgccacgtcaccagcccaggaagaggaaatggaggaggaagaggaagaagaggagggagaagccggggaagccggagaggctgagagtgagaaaggcggcgaagaactgctgccgcctgaatctactccaatccccgctaatctgtcccaaaatttagaagcagcggccgccactcaggtggccgtgagcgttcccaagagaagacggaagattaaggaattgaacaaaaaggaggcagttggcgacctcctcgatgccttcaaggaggccaatccagcagtccctgaagtggaaaaccagccgccagcaggctctaaccctggtcctgaatccgagggctcaggcgtgcccccccgtcctgaagaagcggacgaaacctgggattcaaaggaggataagatacataacgccgagaacatccagccgggcgaacaaaagtatgaatataagagcgatcagtggaagccactgaacctggaagagaaaaagagatacgatcgggaatttctgcttgggtttcaattcatatttgcatctatgcaaaagccagaggggctcccccacatcagtgatgtggtgctggataaggccaacaagaccccgttgcgaccactggacccaacccgactgcaggggattaactgcggccccgactttacaccctcatttgctaacctgggtcggacaacactgtctacccggggcccgcctcgaggtggccctgggggagaacttcctagggggccagccggcctaggaccaagacgctcacaacagggacctcgaaaggagccgcgaaagattattgcgaccgttttgatgactgaggatattaagcttaataaggccgaaaaggcgtggaagccaagcagcaaaagaaccgcggccgacaaagataggggagaagaagatgccgacggcagcaagacacaggacctctttaggcgagtgcgttctattctgaataaactcactccccagatgtttcagcagctcatgaaacaggtgactcagttggcaattgacaccgaagaacggctaaaaggggtgattgatctcatttttgagaaggctattagtgagccaaacttcagtgtagcctacgctaatatgtgcagatgcctgatggctttgaaggttcctaccacagaaaaaccaaccgtcactgtgaatttccggaagctgcttctgaatagatgtcagaaagagttcgagaaggacaaggacgacgatgaggtgtttgagaagaagcagaaagaaatggacgaagcagccactgctgaggagagagggcgactaaaggaagagctagaggaggcccgggatatagcccgccgcagatcgctgggcaatatcaaattcatcggagagctttttaaactgaagatgctcactgaggctattatgcatgactgcgtggtgaaactcctcaaaaatcatgacgaagaatctctagagtgcctttgtcggctcctcaccaccatcggcaaggatcttgatttcgagaaagccaaacctagaatggatcagtacttcaaccagatggaaaagatcatcaaggaaaaaaaaacttcaagccggatccggtttatgttacaggacgttctagacctgagaggctcaaactgggtgccccgtcggggtgatcaggggcccaaaactatcgaccaaatccacaaggaagcagagatggaagagcaccgggagcacatcaaggttcagcagttaatggcgaaaggctccgacaagcgacggggcggacctccagggcccccgatctcccgaggtctcccgcttgttgacgacggaggttggaacactgtcccaatcagtaagggaagcagaccgatcgacacctctcgcttgaccaagattaccaagccaggctccattgacagcaacaaccagctctttgccccaggtggcaggctgtcctgggggaagggatcatctggcggctcgggtgcgaaaccatcggacgcagcttcagaggctgcgcggcccgctacgagtactctgaatcgattcagcgcactgcagcaggccgtgcctaccgagagcactgacaatcgaagggttgtgcagaggtcttctctgtccagagagcggggcgagaaagccggcgaccggggtgatagactggagcggtccgagagggggggagacagaggcgaccgtctggatcgcgctcgcacccctgccacaaaaagaagtttcagcaaagaggtcgaggaaagatcccgggaacggccctcacaaccagagggcctccgtaaagctgcctctctgacagaggatcgtgataggggcagagatgccgtcaagagggaagccgctctgccccccgtctccccattgaaagcagctctgtccgaggaggagcttgaaaaaaagtccaaggcgatcatcgaagaatacttgcacttgaatgacatgaaagaggcggtgcaatgtgtccaagagctggcctccccatcactcctttttatctttgtccgacacggggtggaatctaccttagaaagaagcgccatagcccgagaacatatgggtcaactactgcaccagctgctgtgtgcgggccacctgtccaccgctcaatactatcagggcctctatgaaattttagaactagccgaggacatggagattgatatcccccacgtctggctgtacctcgccgaactggtaactccaatcctgcaagagggcggagtaccaatgggcgagttgtttcgggagataactaaacccttacgccctctgggcaaagccgcctctttactcctggagatccttggactcctgtgcaaatcgatgggcccgaagaaggtgggcacactgtggagagaagcagggctgtcctggaaagagtttctgccagagggacaggatatcggagccttcgtggcagagcagaaggtcgaatacactctgggagaagaaagcgaagcacccggccagcgcgcgctacccagcgaagaactgaacagacagctggaaaaactgttgaaggaaggatcctctaatcaacgcgtctttgattggattgaggcgaatttgtcagagcagcaaatcgtctctaatactctggtgcgggcgttaatgacagctgtgtgctactctgccatcatcttcgaaactccgttgcgggtcgatgtggcagtgctgaaagcaagagctaaactcctacagaagtatctgtgtgatgaacaaaaggagctgcaggctctgtatgcactgcaagcattggtcgtaactctggaacagcctccaaatctcctgcgaatgttctttgacgctttgtacgacgaagatgtagtcaaagaggatgctttttattcatgggagagcagcaaggaccccgcggagcagcaaggcaagggtgtggccttgaagtcagtcactgcgttttttaaatggctcagggaagcggaggaagaatccgaccataactag

SEQ ID NO: 109458 - DNA, 4539 bp, Artificial Sequence
  derived and/or modified sequence
atgatgatcccctctcaaatctcgtatccagcctctcagggagcttactacatcccgggacagggaaggtctacctacgtggtgcctacccagcagtacccagtccaaccaggcgcccctggcttctaccctggcgccagccctactgagttcggcacctatgctggtgcgtactatccagcacagggcgtgcagcagtttccaactggagtagcccctacacctgtgttgatgaaccagccgccacagatcgcacctaagcgcgagaggaaaactattaggatcagagatccaaaccaggggggaaaagacattacggaggagattatgtccggagcgcgaacagcctctaccccaactccaccccagacaggaggcggactggagccacaggctaatggggaaaccccacaggtggcagtgattgtcagaccagacgacaggtcacagggggcgatcatagctgatcgaccaggcctaccaggacctgagcacagtccctcagagagccagcccagctcaccttctccaacaccatccccgtctcctgtcttagaaccaggatccgagcctaatctggcagttctcagtattccaggggatacgatgaccacaatacagatgtctgtcgaggaatcaaccccaataagcagagaaactggcgaaccgtatcgcctctcccccgagccgactcccctggctgaacctatccttgaggtcgaagtgactctcagcaaaccggtgcccgaaagcgaattctccagcagccccctgcaggcccccacccctttggctagccacaccgtcgagattcacgaacctaacgggatggtgccatctgaggatctggaacctgaagtagagtcatcccctgagctggccccgccaccggcatgtccctccgagtcccccgttcccattgctcctactgctcagcccgaggaactactcaacggcgcgccatccccacccgccgtggacctatctcctgtaagcgagcccgaagaacaggctaaagaggtgacagccagcatggcacctccaacgattcctagcgccactcctgcaactgcaccgagcgcaacaagccctgctcaggaagaggagatggaagaagaagaggaggaagaagagggggaagccggtgaagccggagaggccgaaagcgagaaagggggtgaagagctgttgccccccgagtctactccaatccctgctaacctaagtcaaaaccttgaagccgcggcggcgacacaggtcgccgtgtccgtccctaagcgtagaaggaaaattaaagaattaaataaaaaggaggcagtgggagaccttttggatgcatttaaggaggctaaccccgctgtcccagaagtggaaaatcagcccccagctggctccaaccccggtccagaatctgagggttctggcgtgccgccccgccccgaagaggccgatgaaacctgggattctaaagaggataagatccacaacgccgagaatattcagcctggtgagcaaaaatatgaatataagtcagaccagtggaagcccttgaatctggaagaaaaaaaacggtatgaccgtgaatttctgctcgggttccagtttatcttcgcctcaatgcagaagccagaaggcctgccacacatctccgacgttgtgctcgataaagcaaataagacccctctcagaccactagacccaacgcgcctgcaggggataaactgcggaccagacttcacccccagttttgctaacctgggaagaaccaccttgtcaacccgtgggccacctagaggcgggccgggcggggagctgcccagggggccagctggacttggtcccagaaggtctcagcagggccctagaaaggagccaaggaagatcatcgccactgtgctgatgactgaagacatcaagctaaataaagctgagaaagcatggaagcctagctcaaaaaggacggccgctgacaaggatagaggggaagaagacgccgatggatcgaagacccaggacctgttcaggcgggttcggtctatcctgaacaagctcaccccccaaatgttccagcaactgatgaagcaggtaactcaattagcaattgacactgaagaacgcctgaaaggcgtgatcgatttaatcttcgagaaagccatttctgagcctaatttctctgttgcttatgccaacatgtgtcgctgtctcatggcgttgaaagtgcctaccaccgagaagcctactgtcactgtcaactttcgtaaattactactcaacaggtgccaaaaggagttcgaaaaggacaaggacgatgacgaagtgttcgagaagaagcaaaaagagatggacgaggccgccacagctgaggagaggggtcgtctaaaagaagaactggaagaagctcgagatattgcgcgcaggcggtccttggggaatatcaagtttattggagagttattcaaacttaaaatgctgaccgaagccatcatgcacgactgcgtagtgaagctcctgaagaatcacgacgaagagtccctggaatgcctttgtcggcttctgaccaccattgggaaagatttggacttcgaaaaggcaaagccaagaatggatcagtactttaatcagatggaaaaaattattaaggagaagaagacctccagccggattcgtttcatgctacaggatgttcttgatctacgaggctcgaactgggtgccgaggaggggtgatcaaggaccaaagaccattgatcagatacacaaggaagccgagatggaggagcatcgagagcatattaaagtccagcagcttatggcaaagggatcggacaagcggaggggaggtccacccgggcccccaataagtcgcggcttacctctcgtagacgacggaggctggaatacggtgccaatatcaaagggctccagacctatcgacacttctaggctgactaaaataactaaacccggcagcattgattcgaataaccagttgtttgcgccgggcggcagactgtcctgggggaaaggtagtagtgggggctccggagccaaaccgagcgacgctgcttccgaggctgctagaccagcaacctccactttgaataggttcagcgccctgcagcaggcggttcctaccgaaagcacagataaccgcagggttgttcagaggtccagtcttagtcgcgaacgtggggagaaggctggagacagaggcgataggctggagaggtctgagagaggcggggatcgcggagatcgtctggacagggcaagaacgcctgccacaaagaggtcattcagcaaggaggtggaggaaaggagccgcgagaggcctagtcagccagagggactgcgcaaggcagcaagtctgacagaagatagggacaggggcagggatgccgtcaagagagaggctgccctcccccccgtgagccccctgaaagctgcccttagcgaggaggaactcgaaaaaaaaagcaaagcaatcatcgaggaatatcttcaccttaacgatatgaaggaggccgtgcagtgcgttcaggagctggctagccctagcttgttgttcatattcgtccggcacggggtcgagagcacccttgaacggagtgcaatagcccgagaacacatgggtcaattgctccaccagctgctttgtgctgggcacctatctaccgcccagtactaccaaggactctatgaaatcttggagctagccgaggatatggagatcgatatccctcatgtctggctttacctggcggagcttgtgactcccatattgcaggagggcggagtgcccatgggagagctcttcagggagattacaaagccactgaggcccctgggcaaggctgcttctctgttgctggagatactgggcctcctgtgcaagtccatgggtcccaagaaggttggcaccctctggcgcgaggcaggcttgagctggaaggaattcttgcccgaaggtcaggacatcggtgcattcgtggcagaacaaaaggtggagtataccctaggggaagagagcgaagcgcctggccagcgcgctctgccctctgaggaactcaatagacagctcgagaagctgctgaaggagggctcctctaatcaaagggtattcgactggatcgaagcgaacctctccgaacagcagattgtatccaatactcttgtgcgggctctgatgacggctgtctgctacagcgccattattttcgagacaccactcagggtggatgtagctgttttgaaagcgagggctaaactcctacaaaagtatctctgtgacgaacagaaagagctgcaggccttatatgccttacaggccctggttgtgaccctggaacaacctcccaacctgctgaggatgttctttgatgccctttacgacgaggatgtagttaaagaggatgccttttattcttgggagtcaagtaaggaccccgcagaacagcaggggaagggcgtcgctctgaaatctgtgaccgctttcttcaagtggcttagagaggccgaagaggagtcggaccacaattag

SEQ ID NO: 109459 - DNA, 4539 bp, Artificial Sequence
  derived and/or modified sequence
atgatgatcccttctcaaataagttacccagcgtctcagggtgcttactatattccaggccaggggagaagtacctacgtggtgccgacacagcagtatccagtccagcccggcgcacctggattttatcctggagcgtcacccactgagtttggaacctatgcaggcgcttattatccagcgcaaggcgttcagcagttccctacaggtgtggcacctacacccgttctgatgaaccagcctccacagatcgccccaaaacgggaaagaaaaaccattagaattcgtgatccaaatcaagggggaaaggatattacagaggagatcatgagcggtgcccgaaccgcctcgacccccactccccctcaaaccgggggaggactggagccacaagcaaacggcgagactcctcaagtggccgtgattgtaaggccagatgaccgtagccagggcgcgattatagccgaccgcccaggattgccgggcccagaacactcaccctcagaaagccagccatcatcgccctctccaacacccagcccgagtccggtcctcgagcctggttccgaacctaacctggccgtactcagtattcccggagacacaatgactaccatccaaatgtctgtagaagaatccactcccatcagcagagaaacgggggagccttatagactgagcccagaaccaaccccgctcgcagaacccatcctggaggtggaagtgacacttagcaagcctgtccccgagagcgagttctcttcatcgcctttgcaggccccaacgcccctcgcgtctcataccgtagaaatccacgaacctaatgggatggtccctagcgaagacctggagcccgaggtggagtcttctcctgaactagcacctcccccagcttgcccctcagaaagccctgtacctattgcccctacggcccagccagaggaactgctgaatggcgcacccagcccccccgctgtggatctgagtccagtgtctgaaccagaggagcaggccaaagaggtcaccgctagcatggcaccacctactatcccctccgccacccctgccacggctccttccgccacgtcacccgcacaggaggaggagatggaggaggaggaggaagaggaagagggagaggcgggcgaggctggagaagccgaaagcgaaaagggaggtgaggagctactaccccctgagtccacacctatccctgccaatctgtcccagaacttggaagctgccgctgccactcaggtggccgttagcgttccgaaacgtcgtcgaaaaataaaggaactgaacaaaaaggaggcggtgggtgacttattggatgcgttcaaagaagcgaaccctgccgtgccagaagtggagaaccagccccccgcagggtcgaaccctgggcctgaatccgaaggcagcggcgtgccccctcgccctgaggaagcggacgagacttgggacagcaaagaggacaaaatccataacgccgaaaatatccagcccggcgagcagaagtacgaatacaaaagcgatcagtggaaacctctgaacttggaggaaaagaagcgttacgaccgcgaatttctgttaggcttccaattcatttttgctagtatgcagaagccagaaggactaccccatatctctgacgtggtgctggacaaggcgaacaagacaccgctgcggcccctggacccaacaagactgcaggggatcaactgcggaccagattttactccaagcttcgcgaaccttggccggaccacattaagcacacggggccccccccgcggtggaccaggaggggagctgcctcgcgggcccgcagggctcggcccgcgacgatcccagcagggccctaggaaggagccaagaaagatcatagccactgtgctgatgacagaagatatcaaactgaacaaagccgagaaagcttggaagccatcctctaagcggacagccgcagacaaagatcgcggtgaggaggacgcggacggctcgaaaactcaggatctgttcagacgcgtgcgctctatcctgaacaagttgacaccccaaatgttccagcagcttatgaagcaagtaacccagctggctatagataccgaagagcgccttaagggagttattgacctcatctttgaaaaggcaattagtgagcccaacttttcagtggcttatgccaatatgtgccgatgtctgatggccctgaaggtgcctacaacagaaaaacctactgtcacagtgaacttccgcaagctcctgcttaacagatgccagaaggagtttgagaaggacaaggacgatgatgaagtctttgaaaagaagcagaaggaaatggatgaggctgcaactgccgaagagcgcggtaggctgaaggaagagcttgaggaagcccgcgacatcgcccgccgtcggagtctgggaaacataaaatttattggcgagctgttcaagcttaagatgctgaccgaagccattatgcacgactgtgtggtgaaactgctgaagaaccatgacgaagagagcctggagtgcctttgtaggctcctgaccactatagggaaggacctggactttgagaaagcaaagccacgcatggaccagtactttaaccaaatggaaaagatcataaaagagaagaagacttctagtcggattagatttatgcttcaggacgtcttggatttgcgcggaagtaactgggtaccacgccggggcgatcagggccccaagaccattgaccagatccacaaggaagctgagatggaggagcacagagaacatattaaggtgcagcagttgatggccaaaggaagtgacaaacgtcggggtggacctcctgggccacccatttcacgggggttgcccctcgtggatgacggagggtggaacaccgtgcctatttctaaaggcagcaggccgatagacacgtcacgacttaccaaaattaccaagccaggctccatagacagcaacaaccaactattcgccccagggggccgactgagctgggggaaagggagtagcggaggcagtggagccaagccgtctgatgccgcatctgaagcagcaagaccagctacaagcacactcaataggtttagcgccctgcagcaggctgttcccaccgaatctaccgataaccggagagtcgtgcagagatcaagcctgtccagagagaggggggagaaagccggagatcggggcgaccggcttgagcgcagcgagcgcgggggggaccggggggatcgtttagacagggcacgaacacccgcaacaaagcgctcgttctccaaggaggtggaggagagaagtagggagcgacctagccagcctgagggactgcgcaaggctgcctccctcaccgaggatagggatcgaggcagagatgctgtgaagcgggaagccgctcttccacctgtgagtcccctcaaggccgccctcagcgaggaggagctcgagaagaagtctaaggcaatcatcgaagagtatctgcatctgaatgacatgaaggaggctgtgcagtgtgtccaggagctggcctctcccagcctgctcttcatatttgtcagacatggagtggagtccacccttgagaggtcagcaatcgcccgtgagcacatgggccagctgctgcatcagctactgtgcgcaggacacctgagcacagcacagtactatcaaggcctgtacgagatactggagctggctgaggatatggaaatagatatcccccatgtgtggctgtacctcgcagagttagttactcccattcttcaggagggtggggtacccatgggggagcttttccgggagattactaaacccttacgtccgctgggcaaagccgcttccctcctccttgagatcctcggcctgctctgcaaaagcatgggccccaagaaggtgggcacgctatggcgcgaggccggacttagctggaaggagttcttaccagaagggcaggacatcggcgcttttgttgcagaacagaaggtggagtacactctgggagaggaatccgaggcccccggccagagggcactgcccagcgaggaactcaatcgccagttggaaaaacttctcaaggaggggagcagcaatcagcgagtcttcgactggatcgaggctaatttgagcgagcagcagattgtttcaaacacccttgtaagggcacttatgactgcagtgtgctactctgccattatcttcgagacccctctgagggttgacgtggccgttctgaaagcaagagcaaagctgctgcaaaaatatctttgtgacgagcaaaaggagctgcaggccctgtacgctttacaggccctcgtcgtaactctcgagcagccgcctaatttactccggatgttcttcgatgcactgtacgatgaggacgtggtaaaagaggacgccttctattcatgggaatcgtcaaaagaccccgctgagcaacagggcaagggtgtcgctctgaaatccgtcaccgcattcttcaaatggttaagggaagccgaagaagagtcagatcataactag

SEQ ID NO: 109460 - DNA, 4680 bp, Artificial Sequence
  derived and/or modified sequence
atgaatactccttcccagccacgacagcacttttacccatcgagggctcagcctccttcttcggccgccagccgtgttcagtctgccgctcccgcacgccccggacccgctgcacacgtctatccagctgggtcacaagtgatgatgattccatcacagatcagttacccagctagccagggagcatactacatccctgggcaggggcgatccacttacgtcgtgcccacacaacagtatcccgttcagcccggcgcgccaggtttttatccaggcgcctctcccacggagtttgggacttacgccggggcctattaccctgctcagggagtgcaacagtttccaaccggagtggcccccacacctgtgttgatgaatcagcctccacagatcgctccgaaaagggaaagaaagactattcgcatcagagatcccaatcagggagggaaggatatcactgaggaaattatgagcggggccagaacagcgagcacaccaacacctccacaaacaggcggcggcctcgagccccaggccaacggtgaaacgccccaggtagccgtgatcgtgcggcctgacgacagaagccagggcgctatcattgcagatcggccgggtcttccaggccccgaacatagcccaagcgagtcccagccaagttcgccatctcccacaccatctccctcgcccgtcctggaacctggtagcgaaccaaacctggctgttctctcaattccaggcgatactatgacaactatccaaatgtcggtcgaagaaagtactccaatctcaagggagacaggggaaccctaccggctcagccctgaacccactccactggccgaaccaattctcgaggtggaagtgacattaagcaagccagtgcctgaatccgaattctcctcctcccccctccaggcccctactccactggccagccatacggtagagatccacgagcctaacggtatggtgcctagcgaggaccttgaacctgaagtcgagtcctcacccgagctggctccaccaccagcctgtccctccgagagccctgtccctatcgccccaaccgctcagccggaggagctcctgaacggtgcgcctagtcctccagcggtagacctatctccagtgagtgaacctgaggagcaggctaaggaagtgactgcttctatggctcccccaaccattccttctgctacgcctgcaactgctccctccgctacttcaccagcacaggaggaggagatggaagaggaagaagaggaggaggagggggaggccggcgaagccggggaggctgagtccgaaaaaggaggggaagaactgctcccccccgaaagcacaccaattccagccaatctctctcagaacctggaagctgcggctgctacgcaagtagccgtctcggtccctaagcgcagaaggaaaatcaaggagttgaacaaaaaagaggctgtaggcgacctgctcgacgctttcaaagaggcgaaccccgccgtgcccgaggttgaaaaccagccaccagctggctccaaccctggtccggagtctgaaggctcaggcgtgcctccccggccagaggaggcagacgagacgtgggatagcaaagaggacaagatccacaacgctgagaacatccagcccggtgagcaaaagtatgagtacaaatccgatcagtggaagccgctgaatctggaggaaaagaaaaggtatgacagagagttcctcctcggttttcagtttatctttgcgtcaatgcagaaaccagagggactgccacacatctcagatgttgtgctagacaaggccaataaaacccctctgcggcccctggatcccacgcgccttcaagggattaattgcggaccggacttcaccccaagcttcgcaaatctgggaagaacaactctgagtacccgtgggcccccaaggggcgggcctggcggtgagctgccacggggccccgccggcttagggccgagaagatcccagcagggccctagaaaggaacccaggaagatcatagcgacagtgctcatgaccgaagatatcaagctaaataaggccgagaaggcatggaagccatctagcaagcgcacagctgctgataaggaccggggcgaagaggacgccgatggctcaaagacacaagatctattccgacgcgtccgatccatcctaaacaaactaacaccacagatgtttcagcagctgatgaagcaggtaacccagctggctattgacaccgaggaaagattgaagggagtcatcgaccttattttcgagaaggcaataagtgagcccaatttctctgtggcttatgccaatatgtgcaggtgtttgatggctctcaaagtacccaccaccgaaaagcccactgtgacagtgaacttcagaaaactcttactcaatcgctgtcagaaagaattcgagaaagataaggacgatgatgaagtctttgagaagaaacagaaggaaatggatgaggcagccaccgccgaggagcgtggaaggcttaaagaggaactcgaggaggctagagacatagcccgccgtagaagcttagggaacatcaaatttattggggagctgtttaaactgaaaatgttgacagaagcaatcatgcatgactgcgtggtgaaactattaaaaaaccacgatgaggagtctctcgagtgcttgtgccgacttctaaccacaatcggaaaagacctggactttgagaaggcaaagccacggatggatcagtactttaatcagatggaaaaaataattaaagagaagaagacttcttcacggattaggttcatgttgcaggatgtgctggatctcaggggctccaactgggttccccggaggggcgatcaggggccaaaaactatcgaccagattcacaaagaggccgaaatggaggagcatcgggaacatatcaaggtgcagcagttaatggccaagggttcagacaaacgccggggaggtcctccagggccaccaatctcacgaggactacccctcgtggacgacggtggttggaacacagtccccatctccaaaggcagccggcctattgacacctctcgtctcacgaagattacaaagcctgggagcatagactcaaacaatcagctgttcgcaccaggcggccggctgtcttggggaaaggggtcttctggggggtccggagctaagcctagtgatgccgcaagtgaagcagctagacctgctacgagcaccctcaatcggtttagcgcattgcagcaggctgtcccaacagagtctacagataataggagagtggttcaacggtctagcttgagccgagaaagaggcgagaaagcgggagaccgtggagacaggctggagcgctccgagagagggggcgataggggggacagattggatcgcgccagaacgcctgccacaaagcgaagcttttccaaggaagttgaagagcgttcaagagagagaccctcgcagcctgagggacttcggaaagcggcctctctgaccgaggacagggacaggggccgtgatgccgtgaagagggaggctgccctcccacctgtcagccctcttaaagctgctctcagtgaggaggaactcgaaaaaaagtcgaaggcaatcattgaggaatatctccatctaaacgacatgaaggaagcagtgcagtgcgtgcaggagctggcatcaccttcccttttgtttatcttcgtgcggcacggagtggaatcaacccttgaaaggagcgccatcgctagggagcacatggggcaattgttacaccagcttttgtgtgcagggcacctgagtactgcgcagtattaccaggggctctatgaaatactggagctggctgaagacatggagatagacattccacatgtatggttatacctcgccgaactggtgacgcctatcctccaggagggaggcgtccctatgggcgagctcttcagggagataacgaaacctcttcgacccctcggaaaagccgcgagccttctgctggagattctcggcttgctctgcaaatccatgggccctaaaaaggtgggaaccctgtggagagaggcaggtttgtcctggaaggaatttctgcctgagggtcaggacatcggggcatttgtagctgagcagaaggtcgagtacaccctgggagaggagtctgaggcacccgggcagagagctttgccaagcgaggagctgaatcgccagctagagaaacttttaaaggagggatcatccaaccaacgcgtgtttgactggattgaagccaacctctcagaacagcaaatagtttcaaacaccttagtcagggccttgatgacggctgtgtgctatagcgccattatttttgagacccccctgcgggtcgatgtggctgtcttgaaagcccgggccaagcttttacagaagtatctgtgtgatgaacagaaagagcttcaggctctttatgccttgcaggcgctggttgtgaccttggagcagcctcctaatcttttacgcatgttttttgatgcactgtatgacgaggatgtggttaaggaagatgccttctatagctgggagagtagtaaagaccctgccgagcaacagggaaagggtgtcgccttgaaaagcgtgacagcattctttaaatggttgcgggaagccgaggaggagtctgatcacaattag

SEQ ID NO: 109461 - DNA, 4212 bp, Artificial Sequence
  derived and/or modified sequence
atgtctggagctagaacagcctctacgccgacccccccccagacgggcgggggactcgagccccaggccaacggcgagaccccccaggtggcagttattgttagacctgatgaccgcagtcagggtgctattatcgctgatagacctggcctgcccggtcctgaacacagcccctcagaatcccagccgtcgtcaccttcccctactccgtcccctagtcccgtcttggagccgggttctgaacccaatcttgctgtcctctccatcccaggggacacaatgaccacaatacagatgtccgtggaagagtctacccctatcagtagggaaactggggagccttatagactgagccccgagcccacaccgctggccgagcctatcctggaggtggaggttacactgagcaagccagtgcccgaaagtgagttttcatccagccccctgcaggccccaacccccttggcatcacatactgtagagattcacgagccaaacggcatggtaccatccgaggatctggagcccgaagtcgaaagttctcccgaactcgcacctcctccagcctgcccgagcgagtctcccgtgccgatcgccccaaccgcccaacctgaagagctgctgaatggcgctccatctccacctgccgtcgatctttcccccgtgtccgaaccagaggagcaagcaaaggaggtgacagcttctatggctcctcccaccatccctagtgcaacccctgccactgcgcccagcgcaaccagccccgcacaggaggaggagatggaagaggaagaggaggaggaggagggggaggccggggaggctggggaggccgaatcagaaaaggggggggaagagctgctccctccagagagcaccccaatcccagctaacctatcccagaacctggaggccgcggccgcaacccaggtggcagtatctgtcccgaagcggaggaggaagatcaaggaattgaataagaaggaggcagtcggggacctgctcgacgctttcaaggaggcaaaccccgctgtgcccgaagtggagaaccagccacccgctgggtccaatcctggacctgagtccgaaggttcaggagtgccacccagaccagaggaggcggatgaaacctgggattccaaagaggacaaaattcataacgcagagaatatccagccaggggagcagaagtacgagtataagtcagaccagtggaagccattgaacttagaggagaaaaaacgttatgaccgcgagtttttgcttggattccagttcatctttgcctcaatgcagaagcccgaaggactgccacatatctctgatgtggttctagacaaagccaacaagactcccctccgcccactggatccgactcggctgcaagggatcaattgcggaccggacttcacccctagctttgccaatttggggcgaactaccctgagcacccggggcccccccagaggggggccaggcggagagctgcctagaggcccagcaggtttaggcccgcgaagatcacaacaggggccaagaaaagaaccacggaagatcatcgcaaccgttctgatgactgaggatataaaactgaataaagctgaaaaggcctggaagcctagctccaaaaggacagctgcagataaggatcggggcgaagaagatgcagacggctcaaagacccaggacctgttcaggcgcgtacgcagcatcttaaacaagctcactccccagatgtttcaacagttgatgaaacaggtgactcagttggccatcgacactgaagagcggctgaagggggttattgatctcatatttgagaaggcaatctcggaacccaacttcagcgtcgcatacgccaacatgtgtcgctgcctgatggcattaaaggtcccaaccacagagaaaccgaccgtgaccgtgaattttcggaagctcctcttaaacaggtgccagaaggaattcgagaaggacaaggatgacgacgaagtgttcgaaaagaagcagaaggagatggatgaggcagccaccgctgaagagaggggcagactcaaagaagagttggaagaggcccgcgatattgcacgaagaaggtccctagggaatattaaatttataggagagctatttaagcttaagatgctgaccgaggccattatgcacgattgcgtggtgaagctgctgaagaatcacgatgaggagtcattagagtgtctgtgccggctgctcacgaccatcggtaaggatctggactttgagaaagctaagcctcgcatggaccagtatttcaaccagatggagaagataattaaggagaagaaaacaagcagcaggataagattcatgctccaggacgttctcgatcttcggggttctaattgggttcctagacggggagatcaaggccctaagacaatcgatcagatacacaaggaggctgagatggaggaacatagagaacacatcaaggtgcaacaactaatggctaagggatctgataaacgcaggggagggcctcctggacccccaattagccgcggactacctctggtagacgacggtggatggaacacagtacccatcagtaagggatctaggccaatcgacacgtctcggctgacaaagataacaaagccagggtccatcgacagcaataatcagcttttcgcacctggtggcaggctgagctgggggaaaggcagtagcggcgggagtggtgcaaagccgagcgacgcggcctctgaggctgcccgcccagccacatcaaccctgaatcggttttccgcactacagcaggctgtcccaactgagagcactgataacagaagggtggtgcagaggtctagcctaagccgagagagaggagaaaaggctggagaccgcggagatagactggagcgcagtgaaagaggcggagacaggggggatcggctggaccgagctcgaactccagcaaccaaaagatccttttccaaggaggtggaggagcgctcccgggaaagacccagccagccggagggcctgcgaaaagccgcatctctgacggaagatagggaccggggcagggacgccgttaaaagagaggccgcccttccccccgtcagcccactaaaggccgcgctgagtgaggaggaactcgagaaaaagtcaaaagctattattgaagaatatctgcacctgaacgacatgaaggaagcagtacaatgcgtacaggagctagccagtccaagcttgctgttcatctttgtcagacacggcgttgagagcaccttggagcgctccgccatcgcaagagagcatatgggccagctattacaccagctgctgtgcgcaggacacctctctactgcacaatactaccagggtctttatgagatcttggagctggccgaagacatggagattgatattccccacgtctggctatacctggccgaattggtcacgcccatactgcaggagggaggcgtccccatgggcgagttgtttcgggagataactaaaccactgaggcccctcggcaaagctgcaagtttgttactggagattttgggactgctatgcaagtcgatggggccgaaaaaggtgggcacattatggagagaggcgggcttgtcttggaaagaattcctgcctgaagggcaggacataggcgctttcgtggccgaacagaaggtggagtacacacttggcgaggagagcgaggctcccgggcagcgggcactaccgtccgaagaactcaatcggcaactggagaaacttcttaaggaaggatcttctaatcaacgcgtctttgactggattgaagcaaacctttctgagcagcagatcgtgtctaataccctggtccgagccctcatgacggctgtatgttattccgctatcattttcgagactcccctacgggtggacgtcgccgtgctaaaggcacgcgctaagttactgcagaagtacctctgtgacgagcagaaggagttgcaggccctttatgccctgcaggctctggtggtcacattagagcaacccccaaatctgcttagaatgtttttcgacgccctgtacgatgaggatgttgtgaaggaggacgctttttactcttgggagagttccaaggatccggccgagcagcagggcaagggcgttgccctgaagtctgtgactgcgttctttaaatggctccgtgaagctgaagaggaatccgatcataattag

SEQ ID NO: 109462 - DNA, 264 bp, Artificial Sequence
  derived and/or modified sequence
atgaacacaccaagccagcctcgacagcacttctacccttctagagcccagcccccaagttctgctgcctcacgggtacagagtgctgccccagcacgccccggacctgcggcccacgtgtaccctgccggctcgcaggtgatgatgattccctcccaaattagttatccagcctcccagggagcctactacattccaggacagggtaggagcacttacgttgtgccgactcaacagtatcccgtgcagccgggggctccctag

SEQ ID NO: 109463 - DNA, 4990 bp, Artificial Sequence
  derived and/or modified sequence
ggaaatggttgtggactacgtctgtgcggctgcgtggggctcggccgcgcggactgaaggagactgaaggggcgttccacatacgttgtcccgacacagcagtaccctgtgcagccaggagccccaggcttctatccaggtgcaagccctacagaatttgggacctacgctggcgcctactatccagcccaaggggtgcagcagtttcccactggcgtggcccccaccccagttttgatgaaccagccaccccagattgctcccaagagggagcgtaagacgatccgaattcgagatccaaaccaaggaggaaaggatatcacagaggagatcatgtctggggcccgcactgcctccacacccacccctccccagacgggaggcggtctggagcctcaagctaatggggagacgccccaggttgctgtcattgtccggccagatgaccggtcacagggagcaatcattgctgaccggccagggctgcctggcccagagcatagcccttcagaatcccagccttcgtcgccttctccgaccccatcaccatccccagtcttggaaccggggtctgagcctaatctcgcagtcctctctattcctggggacactatgacaactatacaaatgtctgtagaagaatcaacccccatctcccgtgaaactggggagccatatcgcctctctccagaacccactcctctcgccgaacccatactggaagtagaagtgacacttagcaaaccggttccagaatctgagttttcttccagtcctctccaggctcccacccctttggcatctcacacagtggaaattcatgagcctaatggcatggtcccatctgaagatctggaaccagaggtggagtcaagcccagagcttgctcctcccccagcttgcccctccgaatcccctgtgcccattgctccaactgcccaacctgaggaactgctcaacggagccccctcgccaccagctgtggacttaagcccagtcagtgagccagaggagcaggccaaggaggtgacagcatcaatggcgccccccaccatcccctctgctactccagctacggctccttcagctacttccccagctcaggaggaggaaatggaagaagaagaagaagaggaagaaggagaagcaggagaagcaggagaagctgagagtgagaaaggaggagaggaactgctccccccagagagtacccctattccagccaacttgtctcagaatttggaggcagcagcagccactcaagtggcagtatctgtgccaaagaggagacggaaaattaaggagctaaataagaaggaggctgttggagaccttctggatgccttcaaggaggcgaacccggcagtaccagaggtggaaaatcagcctcctgcaggcagcaatccaggcccagagtctgagggcagtggtgtgcccccacgtcctgaggaagcagatgagacctgggactcaaaggaagacaaaattcacaatgctgagaacatccagcccggggaacagaagtatgaatataagtcagatcagtggaagcctctaaacctagaggagaaaaaacgttacgaccgtgagttcctgcttggttttcagttcatctttgccagtatgcagaagccagagggattgccacatatcagtgacgtggtgctggacaaggccaataaaacaccactgcggccactggatcccactagactacaaggcataaattgtggcccagacttcactccatcctttgccaaccttggccggacaacccttagcacccgtgggcccccaaggggtgggccaggtggggagctgccccgtgggccggctggcctgggaccccggcgctctcagcagggaccccgaaaagaaccacgcaagatcattgccacagtgttaatgaccgaagatataaaactgaacaaagcagagaaagcctggaaacccagcagcaagcggacggcggctgataaggatcgaggggaagaagatgctgatggcagcaaaacccaggacctattccgcagggtgcgctccatcctgaataaactgacaccccagatgttccagcagctgatgaagcaagtgacgcagctggccatcgacaccgaggaacgcctcaaaggggtcattgacctcatttttgagaaggccatttcagagcccaacttctctgtggcctatgccaacatgtgccgctgcctcatggcgctgaaagtgcccactacggaaaagccaacagtgactgtgaacttccgaaagctgttgttgaatcgatgtcagaaggagtttgagaaagacaaagatgatgatgaggtttttgagaagaagcaaaaagagatggatgaagctgctacggcagaggaacgaggacgcctgaaggaagagctggaagaggctcgggacatagcccggcggcgctctttagggaatatcaagtttattggagagttgttcaaactgaagatgttaacagaggcaataatgcatgactgtgtggtcaaactgcttaagaaccatgatgaagagtcccttgagtgcctttgtcgtctgctcaccaccattggcaaagacctggactttgaaaaagccaagccccgaatggatcagtatttcaaccagatggaaaaaatcattaaagaaaagaagacgtcatcccgcatccgctttatgctgcaggacgtgctggatctgcgagggagcaattgggtgccacgccgaggggatcagggtcccaagaccattgaccagatccataaggaggctgagatggaagaacatcgagagcacatcaaagtgcagcagctcatggccaagggcagtgacaagcgtcggggcggtcctccaggccctcccatcagccgtggacttccccttgtggatgatggtggctggaacacagttcccatcagcaaaggtagccgccccattgacacctcacgactcaccaagatcaccaagcctggctccatcgattctaacaaccagctctttgcacctggagggcgactgagctggggcaagggcagcagcggaggctcaggagccaagccctcagacgcagcatcagaagctgctcgcccagctactagtactttgaatcgcttctcagcccttcaacaagcggtacccacagaaagcacagataatagacgtgtggtgcagaggagtagcttgagccgagaacgaggcgagaaagctggagaccgaggagaccgcctagagcggagtgaacggggaggggaccgtggggaccggcttgatcgtgcgcggacacctgctaccaagcggagcttcagcaaggaagtggaggagcggagtagagaacggccctcccagcctgaggggctgcgcaaggcagctagcctcacggaggatcgggaccgtgggcgggatgccgtgaagcgagaagctgccctacccccagtgagccccctgaaggcggctctctctgaggaggagttagagaagaaatccaaggctatcattgaggaatatctccatctcaatgacatgaaagaggcagtccagtgcgtgcaggagctggcctcaccctccttgctcttcatctttgtacggcatggtgtcgagtctacgctggagcgcagtgccattgctcgtgagcatatggggcagctgctgcaccagctgctctgtgctgggcatctgtctactgctcagtactaccaagggttgtatgaaatcttggaattggctgaggacatggaaattgacatcccccacgtgtggctctacctagcggaactggtaacacccattctgcaggaaggtggggtgcccatgggggagctgttcagggagattacaaagcctctgagaccgttgggcaaagctgcttccctgttgctggagatcctgggcctcctgtgcaaaagcatgggtcctaaaaaggtggggacgctgtggcgagaagccgggcttagctggaaggaatttctacctgaaggccaggacattggtgcattcgtcgctgaacagaaggtggagtataccctgggagaggagtcggaagcccctggccagagggcactcccctccgaggagctgaacaggcagctggagaagctgctgaaggagggcagcagtaaccagcgggtgttcgactggatagaggccaacctgagtgagcagcagatagtatccaacacgttagttcgagccctcatgacggctgtctgctattctgcaattatttttgagactcccctccgagtggacgttgcagtgctgaaagcgcgagcgaagctgctgcagaaatacctgtgtgacgagcagaaggagctacaggcgctctacgccctccaggcccttgtagtgaccttagaacagcctcccaacctgctgcggatgttctttgacgcactgtatgacgaggacgtggtgaaggaggatgccttctacagttgggagagtagcaaggaccccgctgagcagcagggcaagggtgtggcccttaaatctgtcacagccttcttcaagtggctccgtgaagcagaggaggagtctgaccacaactgagggctggtggggccggggacctggagccccatggacacacagatggcccggctagccgcctggactgcaggggggcggcagcagcggcggtggcagtgggtgcctgtagtgtgatgtgtctgaactaataaagtggctgaagaggcaggatggcttggggctgcctgggcccccctccaggatgccgccaggtgtccctctcctccccctggggcacagagatatattatatataaagtcttgaaatttggtgtgtcttggggtggggaggggcaccaacgcctgcccctggggtccttttttttattttctgaaaatcactctcgggactgccgtcctcgctgctgggggcatatgccccagcccctgtaccacccctgctgttgcctgggcagggggaagggggggcacggtgcctgtaattattaaacatgaattcaattaa

SEQ ID NO: 109464 - DNA, 4668 bp, Artificial Sequence
  derived and/or modified sequence
atatcacagaggagatcatgtctggggcccgcactgcctccacacccacccctccccagacgggaggcggtctggagcctcaagctaatggggagacgccccaggttgctgtcattgtccggccagatgaccggtcacagggagcaatcattgctgaccggccagggctgcctggcccagagcatagcccttcagaatcccagccttcgtcgccttctccgaccccatcaccatccccagtcttggaaccggggtctgagcctaatctcgcagtcctctctattcctggggacactatgacaactatacaaatgtctgtagaagaatcaacccccatctcccgtgaaactggggagccatatcgcctctctccagaacccactcctctcgccgaacccatactggaagtagaagtgacacttagcaaaccggttccagaatctgagttttcttccagtcctctccaggctcccacccctttggcatctcacacagtggaaattcatgagcctaatggcatggtcccatctgaagatctggaaccagaggtggagtcaagcccagagcttgctcctcccccagcttgcccctccgaatcccctgtgcccattgctccaactgcccaacctgaggaactgctcaacggagccccctcgccaccagctgtggacttaagcccagtcagtgagccagaggagcaggccaaggaggtgacagcatcaatggcgccccccaccatcccctctgctactccagctacggctccttcagctacttccccagctcaggaggaggaaatggaagaagaagaagaagaggaagaaggagaagcaggagaagcaggagaagctgagagtgagaaaggaggagaggaactgctccccccagagagtacccctattccagccaacttgtctcagaatttggaggcagcagcagccactcaagtggcagtatctgtgccaaagaggagacggaaaattaaggagctaaataagaaggaggctgttggagaccttctggatgccttcaaggaggcgaacccggcagtaccagaggtggaaaatcagcctcctgcaggcagcaatccaggcccagagtctgagggcagtggtgtgcccccacgtcctgaggaagcagatgagacctgggactcaaaggaagacaaaattcacaatgctgagaacatccagcccggggaacagaagtatgaatataagtcagatcagtggaagcctctaaacctagaggagaaaaaacgttacgaccgtgagttcctgcttggttttcagttcatctttgccagtatgcagaagccagagggattgccacatatcagtgacgtggtgctggacaaggccaataaaacaccactgcggccactggatcccactagactacaaggcataaattgtggcccagacttcactccatcctttgccaaccttggccggacaacccttagcacccgtgggcccccaaggggtgggccaggtggggagctgccccgtgggccggctggcctgggaccccggcgctctcagcagggaccccgaaaagaaccacgcaagatcattgccacagtgttaatgaccgaagatataaaactgaacaaagcagagaaagcctggaaacccagcagcaagcggacggcggctgataaggatcgaggggaagaagatgctgatggcagcaaaacccaggacctattccgcagggtgcgctccatcctgaataaactgacaccccagatgttccagcagctgatgaagcaagtgacgcagctggccatcgacaccgaggaacgcctcaaaggggtcattgacctcatttttgagaaggccatttcagagcccaacttctctgtggcctatgccaacatgtgccgctgcctcatggcgctgaaagtgcccactacggaaaagccaacagtgactgtgaacttccgaaagctgttgttgaatcgatgtcagaaggagtttgagaaagacaaagatgatgatgaggtttttgagaagaagcaaaaagagatggatgaagctgctacggcagaggaacgaggacgcctgaaggaagagctggaagaggctcgggacatagcccggcggcgctctttagggaatatcaagtttattggagagttgttcaaactgaagatgttaacagaggcaataatgcatgactgtgtggtcaaactgcttaagaaccatgatgaagagtcccttgagtgcctttgtcgtctgctcaccaccattggcaaagacctggactttgaaaaagccaagccccgaatggatcagtatttcaaccagatggaaaaaatcattaaagaaaagaagacgtcatcccgcatccgctttatgctgcaggacgtgctggatctgcgagggagcaattgggtgccacgccgaggggatcagggtcccaagaccattgaccagatccataaggaggctgagatggaagaacatcgagagcacatcaaagtgcagcagctcatggccaagggcagtgacaagcgtcggggcggtcctccaggccctcccatcagccgtggacttccccttgtggatgatggtggctggaacacagttcccatcagcaaaggtagccgccccattgacacctcacgactcaccaagatcaccaagcctggctccatcgattctaacaaccagctctttgcacctggagggcgactgagctggggcaagggcagcagcggaggctcaggagccaagccctcagacgcagcatcagaagctgctcgcccagctactagtactttgaatcgcttctcagcccttcaacaagcggtacccacagaaagcacagataatagacgtgtggtgcagaggagtagcttgagccgagaacgaggcgagaaagctggagaccgaggagaccgcctagagcggagtgaacggggaggggaccgtggggaccggcttgatcgtgcgcggacacctgctaccaagcggagcttcagcaaggaagtggaggagcggagtagagaacggccctcccagcctgaggggctgcgcaaggcagctagcctcacggaggatcgggaccgtgggcgggatgccgtgaagcgagaagctgccctacccccagtgagccccctgaaggcggctctctctgaggaggagttagagaagaaatccaaggctatcattgaggaatatctccatctcaatgacatgaaagaggcagtccagtgcgtgcaggagctggcctcaccctccttgctcttcatctttgtacggcatggtgtcgagtctacgctggagcgcagtgccattgctcgtgagcatatggggcagctgctgcaccagctgctctgtgctgggcatctgtctactgctcagtactaccaagggttgtatgaaatcttggaattggctgaggacatggaaattgacatcccccacgtgtggctctacctagcggaactggtaacacccattctgcaggaaggtggggtgcccatgggggagctgttcagggagattacaaagcctctgagaccgttgggcaaagctgcttccctgttgctggagatcctgggcctcctgtgcaaaagcatgggtcctaaaaaggtggggacgctgtggcgagaagccgggcttagctggaaggaatttctacctgaaggccaggacattggtgcattcgtcgctgaacagaaggtggagtataccctgggagaggagtcggaagcccctggccagagggcactcccctccgaggagctgaacaggcagctggagaagctgctgaaggagggcagcagtaaccagcgggtgttcgactggatagaggccaacctgagtgagcagcagatagtatccaacacgttagttcgagccctcatgacggctgtctgctattctgcaattatttttgagactcccctccgagtggacgttgcagtgctgaaagcgcgagcgaagctgctgcagaaatacctgtgtgacgagcagaaggagctacaggcgctctacgccctccaggcccttgtagtgaccttagaacagcctcccaacctgctgcggatgttctttgacgcactgtatgacgaggacgtggtgaaggaggatgccttctacagttgggagagtagcaaggaccccgctgagcagcagggcaagggtgtggcccttaaatctgtcacagccttcttcaagtggctccgtgaagcagaggaggagtctgaccacaactgagggctggtggggccggggacctggagccccatggacacacagatggcccggctagccgcctggactgcaggggggcggcagcagcggcggtggcagtgggtgcctgtagtgtgatgtgtctgaactaataaagtggctgaagaggcaggatggcttggggctgcctgggcccccctccaggatgccgccaggtgtccctctcctccccctggggcacagagatatattatatataaagtcttgaaatttggtgtgtcttggggtggggaggggcaccaacgcctgcccctggggtccttttttttattttctgaaaatcactctcgggactgccgtcctcgctgctgggggcatatgccccagcccctgtaccacccctgctgttgcctgggcagggggaagggggggcacggtgcctgtaattattaaacatgaattc

SEQ ID NO: 109465 - DNA, 4308 bp, Artificial Sequence
  derived and/or modified sequence
atgaaccagcccccccagatcgcccccaagcgggagaggaagaccatccgcatccgggaccccaaccagggcggcaaggacatcacagaggagatcatgtctggggccaggacagccagcacccccaccccaccccagacaggaggcggcctggagccccaggccaacggggagaccccccaggtggccgtgattgtgcggccagatgacaggagccagggcgccatcatcgctgacaggcctggcctgcccggccctgagcacagccccagcgagagccagcccagcagccccagccccacccccagccccagccctgtgctggagcccggcagcgagcccaacctggccgtgctgagcatccctggggacaccatgaccaccatccagatgtctgtggaggagagcacccccatcagccgggagactggagagccctaccgcctgagccctgagcccacccccctggccgagcccatcctggaggtggaggtgaccctgagcaagcctgtgcctgagagcgagttcagcagcagccccctgcaggcccccacccccctggccagccacacagtggagatccacgagcccaacggcatggtgcccagcgaggacctggagcctgaggtggagagcagccctgagctggcccctcctccagcctgccccagcgagagccctgtgcccatcgcccccacagcccagcctgaggagctgctgaatggagcccccagccccccagctgtggacctgagccctgtgtctgagcctgaggagcaggccaaggaggtgacagcctccatggccccacccaccatccccagcgccaccccagccacagcccccagcgccaccagccctgcccaggaggaggagatggaggaggaggaggaggaggaggagggggaggccggggaggccggggaggccgagagcgagaagggcggggaggagctgctgcccccagagagcacccccatcccagccaacctgagccagaacctggaggccgctgctgccacccaggtggccgtgtctgtgcccaagagaagaaggaagatcaaggagctgaacaagaaggaggccgtgggggacctgctggatgccttcaaggaggccaacccagctgtgcctgaggtggagaaccagcccccagctggcagcaaccctggccctgagagcgagggcagcggcgtgccccccaggcctgaggaggctgatgagacctgggacagcaaggaggacaagatccacaatgctgagaacatccagcctggagagcagaagtatgagtacaagagtgaccagtggaagcccctgaacctggaggagaagaagagatatgaccgggagttcctgctgggcttccagttcatctttgcctccatgcagaagccagagggcctgccccacatcagtgatgtggtgctggacaaggccaacaagacccccctgcggcccctggaccccacccggctgcagggcatcaactgtggccctgacttcacccccagctttgccaacctgggccgcaccaccctgagcacccggggccccccccggggcggccctggaggagagctgccccggggccctgctggcctgggcccccggcgcagccagcagggccccaggaaggagcccaggaagatcatcgccaccgtgctgatgacagaggacatcaagctgaacaaggccgagaaggcctggaagcccagcagcaagaggacagctgctgacaaggacagaggagaggaggatgctgatggcagcaagacccaggacctcttccggcgggtgcgcagcatcctgaacaagctgaccccccagatgttccagcagctgatgaagcaggtgacccagctggccatcgacacagaggagcggctgaagggcgtcatcgacctgatctttgagaaggccatcagcgagcccaacttctctgtggcctatgccaacatgtgccgctgcctgatggccctgaaggtgcccaccacagagaagcccaccgtgacagtgaacttcaggaagctgctgctgaaccgctgccagaaggagtttgagaaggacaaggatgatgatgaggtgtttgagaagaagcagaaggagatggatgaagctgccacagctgaggagcggggccgcctgaaggaggagctggaggaggcccgggacatcgccaggagaagaagcctgggcaacatcaagttcatcggggagctgttcaagctgaagatgctgacagaggccatcatgcatgactgtgtggtgaagctgctgaagaaccatgatgaggagagcctggagtgcctgtgccgcctgctgaccaccatcggcaaggacctggactttgagaaggccaagcccaggatggaccagtacttcaaccagatggagaagatcatcaaggagaagaagaccagcagccgcatccgcttcatgctgcaggatgtgctggacctgcggggcagcaactgggtgcccaggagaggagaccagggccccaagaccatcgaccagatccacaaggaggccgagatggaggagcaccgggagcacatcaaggtgcagcagctgatggccaagggcagtgacaagagaagaggaggccccccaggcccccccatcagccggggcctgcccctggtggatgatggcggctggaacacagtgcccatcagcaagggcagccggcccatcgacaccagccggctgaccaagatcaccaagccaggcagcattgacagcaacaaccagctgtttgcccctgggggccgcctgtcctggggcaagggcagcagcggcggcagcggggccaagcccagtgatgctgccagcgaggccgcccggcctgccaccagcaccctgaaccgcttcagcgccctgcagcaggccgtgcccacagagagcacagacaacagaagagtggtgcagaggagcagcctgagccgggagcggggggagaaggccggggacagaggagaccggctggagaggtctgagcggggcggggacagaggagaccggctggaccgggcccggaccccagccaccaagaggagcttcagcaaggaggtggaggagaggagccgggagcggcccagccagcctgagggcctgaggaaggccgccagcctgacagaggaccgggaccggggcagagatgctgtgaagcgggaggccgccctgccccctgtgagccccctgaaggccgccctgtctgaggaggagctggagaagaagagcaaggccatcatcgaggagtacctgcacctgaatgacatgaaggaggccgtgcagtgtgtgcaggagctggccagccccagcctgctcttcatctttgtgagacatggagtggagagcaccctggagaggtctgccatcgcccgggagcacatgggccagctgctgcaccagctgctgtgtgccggccacctgagcacagcccagtactaccagggcctgtatgagatcctggagctggccgaggacatggagattgacatcccccacgtgtggctgtacctggccgagctggtgacccccatcctgcaggagggcggcgtgcccatgggagagctgttccgggagatcaccaagcccctgcggcccctgggcaaggccgccagcctgctgctggagatcctgggcctgctgtgcaagtccatgggccccaagaaggtgggcaccctgtggagggaggccggcctgtcctggaaggagttcctgcctgagggccaggacattggagcctttgtggccgagcagaaggtggagtacaccctgggggaggagagcgaggcccctggccagagggccctgcccagcgaggagctgaaccggcagctggagaagctgctgaaggagggcagcagcaaccagagggtgtttgactggattgaggccaacctgtctgagcagcagatcgtgagcaacaccctggtgcgggccctgatgacagctgtgtgctacagcgccatcatctttgagacccccctgcgggtggatgtggccgtgctgaaggcccgggccaagctgctgcagaagtacctgtgtgatgagcagaaggagctgcaggccctgtatgccctgcaggccctggtggtgaccctggagcagccccccaacctgctgaggatgttctttgatgccctgtatgatgaagatgtggtgaaggaggatgccttctacagctgggagagcagcaaggaccctgctgagcagcagggcaaaggagtggccctgaagtctgtgacagccttcttcaagtggctgcgggaggccgaggaggagagtgaccacaactag

SEQ ID NO: 109466 - DNA, 4539 bp, Artificial Sequence
  derived and/or modified sequence
atgatgatccccagccagatctcctacccagccagccagggcgcctactacatccctggccagggccgcagcacctacgtggtgcccacccagcagtaccctgtgcagcccggggcccctggcttctacccaggggccagccccacagaatttggcacctacgccggggcctactacccagcccagggcgtgcagcagttccccactggagtggcccccacccctgtgctgatgaaccagcccccccagatcgcccccaagcgggagaggaagaccatccgcatccgggaccccaaccagggcggcaaggacatcacagaggagatcatgtctggggccaggacagccagcacccccaccccaccccagacaggaggcggcctggagccccaggccaatggagagaccccccaggtggccgtcatcgtgcggccagatgacaggagccagggcgccatcatcgctgaccggcccggcctgcccggccctgagcacagccccagcgagagccagcccagcagccccagccccacccccagccccagccctgtgctggagcccggcagcgagcccaacctggccgtgctgagcatccctggggacaccatgaccaccatccagatgtctgtggaggagagcacccccatcagccgggagaccggggagccctaccgcctgagccctgagcccacccccctggccgagcccatcctggaggtggaggtgaccctgagcaagcctgtgcctgagagcgagttcagcagcagccccctgcaggcccccacccccctggccagccacacagtggagatccacgagcccaacggcatggtgcccagcgaggacctggagcctgaggtggagagcagccctgagctggcccctcctccagcctgccccagcgagagccctgtgcccatcgcccccacagcccagcctgaggagctgctgaatggagcccccagccccccagctgtggacctgagccctgtgtctgagcctgaggagcaggccaaggaggtgacagcctccatggccccacccaccatccccagcgccaccccagccacagcccccagcgccaccagccctgcccaggaggaggagatggaggaggaggaggaggaggaggagggggaggccggggaggccggggaggccgagagcgagaagggcggggaggagctgctgcccccagagagcacccccatcccagccaacctgagccagaacctggaggccgccgccgccacccaggtggccgtgtctgtgcccaagagaagaaggaagatcaaggagctgaacaagaaggaggccgtgggggacctgctggatgccttcaaggaggccaacccagctgtgcctgaggtggagaaccagcccccagctggcagcaaccctggccctgagagcgagggcagcggcgtgccccccaggcctgaggaggctgatgagacctgggacagcaaagaagacaagatccacaatgctgagaacatccagcccggggagcagaagtatgagtacaagagtgaccagtggaagcccctgaacctggaggagaagaagagatatgaccgggagttcctgctgggcttccagttcatctttgcctccatgcagaagccagagggcctgccccacatcagtgatgtggtgctggacaaggccaacaagacccccctgcggcccctggaccccacccggctgcagggcatcaactgtggccctgacttcacccccagctttgccaacctgggccgcaccaccctgagcacccggggccccccccggggcggccctggaggagagctgccccggggccctgctggcctgggccccaggaggagccagcagggccccaggaaggagcccaggaagatcatcgccaccgtgctgatgacagaggacatcaagctgaacaaggccgagaaggcctggaagcccagcagcaagaggacagctgctgacaaggacagaggagaagaagatgctgatggcagcaagacccaggacctcttcagaagagtgcgcagcatcctgaacaagctgaccccccagatgttccagcagctgatgaagcaggtgacccagctggccatcgacacagaggagcggctgaagggcgtgattgacctgatctttgagaaggccatcagcgagcccaacttctctgtggcctatgccaacatgtgccgctgcctgatggccctgaaggtgcccaccacagagaagcccaccgtgacagtgaacttcaggaagctgctgctgaaccgctgccagaaggagtttgagaaggacaaggatgatgatgaggtgtttgagaagaagcagaaggagatggatgaggccgccacagctgaggagcggggccgcctgaaggaggagctggaggaggcccgggacatcgcccggcggcgcagcctgggcaacatcaagttcatcggggagctgttcaagctgaagatgctgacagaggccatcatgcatgactgtgtggtgaagctgctgaagaaccatgatgaggagagcctggagtgcctgtgccgcctgctgaccaccatcggcaaggacctggactttgagaaggccaagcccaggatggaccagtacttcaaccagatggagaagatcatcaaggagaagaagaccagcagccgcatccgcttcatgctgcaggatgtgctggacctgcggggcagcaactgggtgccccggcggggggaccagggccccaagaccatcgaccagatccacaaggaggccgagatggaggagcaccgggagcacatcaaggtgcagcagctgatggccaagggcagtgacaagaggcggggcggccccccaggcccccccatcagccggggcctgcccctggtggatgatggcggctggaacacagtgcccatcagcaagggcagccggcccatcgacaccagccggctgaccaagatcaccaagccaggcagcattgacagcaacaaccagctgtttgcccctgggggccgcctgtcctggggcaagggcagcagcggcggcagcggggccaagcccagtgatgctgccagcgaggccgcccggcctgccaccagcaccctgaaccgcttcagcgccctgcagcaggccgtgcccacagagagcacagacaacagaagagtggtgcagaggagcagcctgagccgggagcggggggagaaggccggggacagaggagaccggctggagaggtctgagcggggcggggacagaggagaccggctggaccgggcccggaccccagccaccaagaggagcttcagcaaggaggtggaggagaggagccgggagcggcccagccagcctgagggcctgaggaaggccgccagcctgacagaagatcgggaccggggcagagatgctgtgaagcgggaggccgccctgccccctgtgagccccctgaaggccgccctgtctgaggaggagctggagaagaagagcaaggccatcatcgaggagtacctgcacctgaatgacatgaaggaggccgtgcagtgtgtgcaggagctggccagccccagcctgctcttcatctttgtgagacatggagtggagagcaccctggagaggtctgccatcgcccgggagcacatgggccagctgctgcaccagctgctgtgtgccggccacctgagcacagcccagtactaccagggcctgtatgagatcctggagctggccgaggacatggagattgacatcccccacgtgtggctgtacctggccgagctggtgacccccatcctgcaggagggcggcgtgcccatgggagagctgttccgggagatcaccaagcccctgcggcccctgggcaaggccgccagcctgctgctggagatcctgggcctgctgtgcaagtccatgggccccaagaaggtgggcaccctgtggagggaggccggcctgtcctggaaggagttcctgcctgagggccaggacatcggggcctttgtggccgagcagaaggtggagtacaccctgggggaggagagcgaggcccctggccagagggccctgcccagcgaggagctgaaccggcagctggagaagctgctgaaggagggcagcagcaaccagagggtgtttgactggattgaggccaacctgtctgagcagcagatcgtgagcaacaccctggtgcgggccctgatgacagctgtgtgctacagcgccatcatctttgagacccccctgcgggtggatgtggccgtgctgaaggcccgggccaagctgctgcagaagtacctgtgtgatgagcagaaggagctgcaggccctgtatgccctgcaggccctggtggtgaccctggagcagccccccaacctgctgaggatgttctttgatgccctgtatgatgaagatgtggtgaaggaggatgccttctacagctgggagagcagcaaggaccctgctgagcagcagggcaagggcgtggccctgaagtctgtgacagccttcttcaagtggctgcgggaggccgaggaggagagtgaccacaactag

SEQ ID NO: 109467 - DNA, 4680 bp, Artificial Sequence
  derived and/or modified sequence
atgaacacccccagccagccccggcagcacttctaccccagccgggcccagccccccagcagcgctgccagccgggtgcagagcgctgccccagcccggcccggccctgctgcccacgtgtacccagctggcagccaggtgatgatgatccccagccagatctcctacccagccagccagggcgcctactacatccctggccagggccgcagcacctacgtggtgcccacccagcagtaccctgtgcagcccggggcccctggcttctacccaggggccagccccacagaatttggcacctacgccggggcctactacccagcccagggcgtgcagcagttccccaccggggtggcccccacccctgtgctgatgaaccagcccccccagatcgcccccaagcgggagaggaagaccatccgcatccgggaccccaaccagggcggcaaggacatcacagaggagatcatgtctggggccaggacagccagcacccccaccccaccccagacaggaggcggcctggagccccaggccaacggggagaccccccaggtggccgtgattgtgcggccagatgacaggagccagggcgccatcatcgctgacaggcctggcctgcccggccctgagcacagccccagcgagagccagcccagcagccccagccccacccccagccccagccctgtgctggagcccggcagcgagcccaacctggccgtgctgagcatccctggggacaccatgaccaccatccagatgtctgtggaggagagcacccccatcagccgggagactggagagccctaccgcctgagccctgagcccacccccctggccgagcccatcctggaggtggaggtgaccctgagcaagcctgtgcctgagagcgagttcagcagcagccccctgcaggcccccacccccctggccagccacacagtggagatccacgagcccaacggcatggtgcccagcgaggacctggagcctgaggtggagagcagccctgagctggcccctcctccagcctgccccagcgagagccctgtgcccatcgcccccacagcccagcctgaggagctgctgaatggagcccccagccccccagctgtggacctgagccctgtgtctgagcctgaggagcaggccaaggaggtgacagcctccatggccccacccaccatccccagcgccaccccagccacagcccccagcgccaccagccctgcccaggaggaggagatggaggaggaggaggaggaggaggagggggaggccggggaggccggggaggccgagagcgagaagggcggggaggagctgctgcccccagagagcacccccatcccagccaacctgagccagaacctggaggccgctgctgccacccaggtggccgtgtctgtgcccaagagaagaaggaagatcaaggagctgaacaagaaggaggccgtgggggacctgctggatgccttcaaggaggccaacccagctgtgcctgaggtggagaaccagcccccagctggcagcaaccctggccctgagagcgagggcagcggcgtgccccccaggcctgaggaggctgatgagacctgggacagcaaggaggacaagatccacaatgctgagaacatccagcctggagagcagaagtatgagtacaagagtgaccagtggaagcccctgaacctggaggagaagaagagatatgaccgggagttcctgctgggcttccagttcatctttgcctccatgcagaagccagagggcctgccccacatcagtgatgtggtgctggacaaggccaacaagacccccctgcggcccctggaccccacccggctgcagggcatcaactgtggccctgacttcacccccagctttgccaacctgggccgcaccaccctgagcacccggggccccccccggggcggccctggaggagagctgccccggggccctgctggcctgggcccccggcgcagccagcagggccccaggaaggagcccaggaagatcatcgccaccgtgctgatgacagaggacatcaagctgaacaaggccgagaaggcctggaagcccagcagcaagaggacagctgctgacaaggacagaggagaggaggatgctgatggcagcaagacccaggacctcttccggcgggtgcgcagcatcctgaacaagctgaccccccagatgttccagcagctgatgaagcaggtgacccagctggccatcgacacagaggagcggctgaagggcgtcatcgacctgatctttgagaaggccatcagcgagcccaacttctctgtggcctatgccaacatgtgccgctgcctgatggccctgaaggtgcccaccacagagaagcccaccgtgacagtgaacttcaggaagctgctgctgaaccgctgccagaaggagtttgagaaggacaaggatgatgatgaggtgtttgagaagaagcagaaggagatggatgaagctgccacagctgaggagcggggccgcctgaaggaggagctggaggaggcccgggacatcgccaggagaagaagcctgggcaacatcaagttcatcggggagctgttcaagctgaagatgctgacagaggccatcatgcatgactgtgtggtgaagctgctgaagaaccatgatgaggagagcctggagtgcctgtgccgcctgctgaccaccatcggcaaggacctggactttgagaaggccaagcccaggatggaccagtacttcaaccagatggagaagatcatcaaggagaagaagaccagcagccgcatccgcttcatgctgcaggatgtgctggacctgcggggcagcaactgggtgcccaggagaggagaccagggccccaagaccatcgaccagatccacaaggaggccgagatggaggagcaccgggagcacatcaaggtgcagcagctgatggccaagggcagtgacaagagaagaggaggccccccaggcccccccatcagccggggcctgcccctggtggatgatggcggctggaacacagtgcccatcagcaagggcagccggcccatcgacaccagccggctgaccaagatcaccaagccaggcagcattgacagcaacaaccagctgtttgcccctgggggccgcctgtcctggggcaagggcagcagcggcggcagcggggccaagcccagtgatgctgccagcgaggccgcccggcctgccaccagcaccctgaaccgcttcagcgccctgcagcaggccgtgcccacagagagcacagacaacagaagagtggtgcagaggagcagcctgagccgggagcggggggagaaggccggggacagaggagaccggctggagaggtctgagcggggcggggacagaggagaccggctggaccgggcccggaccccagccaccaagaggagcttcagcaaggaggtggaggagaggagccgggagcggcccagccagcctgagggcctgaggaaggccgccagcctgacagaggaccgggaccggggcagagatgctgtgaagcgggaggccgccctgccccctgtgagccccctgaaggccgccctgtctgaggaggagctggagaagaagagcaaggccatcatcgaggagtacctgcacctgaatgacatgaaggaggccgtgcagtgtgtgcaggagctggccagccccagcctgctcttcatctttgtgagacatggagtggagagcaccctggagaggtctgccatcgcccgggagcacatgggccagctgctgcaccagctgctgtgtgccggccacctgagcacagcccagtactaccagggcctgtatgagatcctggagctggccgaggacatggagattgacatcccccacgtgtggctgtacctggccgagctggtgacccccatcctgcaggagggcggcgtgcccatgggagagctgttccgggagatcaccaagcccctgcggcccctgggcaaggccgccagcctgctgctggagatcctgggcctgctgtgcaagtccatgggccccaagaaggtgggcaccctgtggagggaggccggcctgtcctggaaggagttcctgcctgagggccaggacattggagcctttgtggccgagcagaaggtggagtacaccctgggggaggagagcgaggcccctggccagagggccctgcccagcgaggagctgaaccggcagctggagaagctgctgaaggagggcagcagcaaccagagggtgtttgactggattgaggccaacctgtctgagcagcagatcgtgagcaacaccctggtgcgggccctgatgacagctgtgtgctacagcgccatcatctttgagacccccctgcgggtggatgtggccgtgctgaaggcccgggccaagctgctgcagaagtacctgtgtgatgagcagaaggagctgcaggccctgtatgccctgcaggccctggtggtgaccctggagcagccccccaacctgctgaggatgttctttgatgccctgtatgatgaagatgtggtgaaggaggatgccttctacagctgggagagcagcaaggaccctgctgagcagcagggcaaaggagtggccctgaagtctgtgacagccttcttcaagtggctgcgggaggccgaggaggagagtgaccacaactag

SEQ ID NO: 109468 - DNA, 4212 bp, Artificial Sequence
  derived and/or modified sequence
atgtctggggccaggacagccagcacccccaccccaccccagacaggaggcggcctggagccccaggccaacggggagaccccccaggtggccgtgattgtgcggccagatgacaggagccagggcgccatcatcgctgacaggcctggcctgcccggccctgagcacagccccagcgagagccagcccagcagccccagccccacccccagccccagccctgtgctggagcccggcagcgagcccaacctggccgtgctgagcatccctggggacaccatgaccaccatccagatgtctgtggaggagagcacccccatcagccgggagactggagagccctaccgcctgagccctgagcccacccccctggccgagcccatcctggaggtggaggtgaccctgagcaagcctgtgcctgagagcgagttcagcagcagccccctgcaggcccccacccccctggccagccacacagtggagatccacgagcccaacggcatggtgcccagcgaggacctggagcctgaggtggagagcagccctgagctggcccctcctccagcctgccccagcgagagccctgtgcccatcgcccccacagcccagcctgaggagctgctgaatggagcccccagccccccagctgtggacctgagccctgtgtctgagcctgaggagcaggccaaggaggtgacagcctccatggccccacccaccatccccagcgccaccccagccacagcccccagcgccaccagccctgcccaggaggaggagatggaggaggaggaggaggaggaggagggggaggccggggaggccggggaggccgagagcgagaagggcggggaggagctgctgcccccagagagcacccccatcccagccaacctgagccagaacctggaggccgctgctgccacccaggtggccgtgtctgtgcccaagagaagaaggaagatcaaggagctgaacaagaaggaggccgtgggggacctgctggatgccttcaaggaggccaacccagctgtgcctgaggtggagaaccagcccccagctggcagcaaccctggccctgagagcgagggcagcggcgtgccccccaggcctgaggaggctgatgagacctgggacagcaaggaggacaagatccacaatgctgagaacatccagcctggagagcagaagtatgagtacaagagtgaccagtggaagcccctgaacctggaggagaagaagagatatgaccgggagttcctgctgggcttccagttcatctttgcctccatgcagaagccagagggcctgccccacatcagtgatgtggtgctggacaaggccaacaagacccccctgcggcccctggaccccacccggctgcagggcatcaactgtggccctgacttcacccccagctttgccaacctgggccgcaccaccctgagcacccggggccccccccggggcggccctggaggagagctgccccggggccctgctggcctgggcccccggcgcagccagcagggccccaggaaggagcccaggaagatcatcgccaccgtgctgatgacagaggacatcaagctgaacaaggccgagaaggcctggaagcccagcagcaagaggacagctgctgacaaggacagaggagaggaggatgctgatggcagcaagacccaggacctcttccggcgggtgcgcagcatcctgaacaagctgaccccccagatgttccagcagctgatgaagcaggtgacccagctggccatcgacacagaggagcggctgaagggcgtcatcgacctgatctttgagaaggccatcagcgagcccaacttctctgtggcctatgccaacatgtgccgctgcctgatggccctgaaggtgcccaccacagagaagcccaccgtgacagtgaacttcaggaagctgctgctgaaccgctgccagaaggagtttgagaaggacaaggatgatgatgaggtgtttgagaagaagcagaaggagatggatgaagctgccacagctgaggagcggggccgcctgaaggaggagctggaggaggcccgggacatcgccaggagaagaagcctgggcaacatcaagttcatcggggagctgttcaagctgaagatgctgacagaggccatcatgcatgactgtgtggtgaagctgctgaagaaccatgatgaggagagcctggagtgcctgtgccgcctgctgaccaccatcggcaaggacctggactttgagaaggccaagcccaggatggaccagtacttcaaccagatggagaagatcatcaaggagaagaagaccagcagccgcatccgcttcatgctgcaggatgtgctggacctgcggggcagcaactgggtgcccaggagaggagaccagggccccaagaccatcgaccagatccacaaggaggccgagatggaggagcaccgggagcacatcaaggtgcagcagctgatggccaagggcagtgacaagagaagaggaggccccccaggcccccccatcagccggggcctgcccctggtggatgatggcggctggaacacagtgcccatcagcaagggcagccggcccatcgacaccagccggctgaccaagatcaccaagccaggcagcattgacagcaacaaccagctgtttgcccctgggggccgcctgtcctggggcaagggcagcagcggcggcagcggggccaagcccagtgatgctgccagcgaggccgcccggcctgccaccagcaccctgaaccgcttcagcgccctgcagcaggccgtgcccacagagagcacagacaacagaagagtggtgcagaggagcagcctgagccgggagcggggggagaaggccggggacagaggagaccggctggagaggtctgagcggggcggggacagaggagaccggctggaccgggcccggaccccagccaccaagaggagcttcagcaaggaggtggaggagaggagccgggagcggcccagccagcctgagggcctgaggaaggccgccagcctgacagaggaccgggaccggggcagagatgctgtgaagcgggaggccgccctgccccctgtgagccccctgaaggccgccctgtctgaggaggagctggagaagaagagcaaggccatcatcgaggagtacctgcacctgaatgacatgaaggaggccgtgcagtgtgtgcaggagctggccagccccagcctgctcttcatctttgtgagacatggagtggagagcaccctggagaggtctgccatcgcccgggagcacatgggccagctgctgcaccagctgctgtgtgccggccacctgagcacagcccagtactaccagggcctgtatgagatcctggagctggccgaggacatggagattgacatcccccacgtgtggctgtacctggccgagctggtgacccccatcctgcaggagggcggcgtgcccatgggagagctgttccgggagatcaccaagcccctgcggcccctgggcaaggccgccagcctgctgctggagatcctgggcctgctgtgcaagtccatgggccccaagaaggtgggcaccctgtggagggaggccggcctgtcctggaaggagttcctgcctgagggccaggacattggagcctttgtggccgagcagaaggtggagtacaccctgggggaggagagcgaggcccctggccagagggccctgcccagcgaggagctgaaccggcagctggagaagctgctgaaggagggcagcagcaaccagagggtgtttgactggattgaggccaacctgtctgagcagcagatcgtgagcaacaccctggtgcgggccctgatgacagctgtgtgctacagcgccatcatctttgagacccccctgcgggtggatgtggccgtgctgaaggcccgggccaagctgctgcagaagtacctgtgtgatgagcagaaggagctgcaggccctgtatgccctgcaggccctggtggtgaccctggagcagccccccaacctgctgaggatgttctttgatgccctgtatgatgaagatgtggtgaaggaggatgccttctacagctgggagagcagcaaggaccctgctgagcagcagggcaaaggagtggccctgaagtctgtgacagccttcttcaagtggctgcgggaggccgaggaggagagtgaccacaactag

SEQ ID NO: 109469 - DNA, 264 bp, Artificial Sequence
  derived and/or modified sequence
atgaacacccccagccagccccggcagcacttctaccccagccgggcccagccccccagcagcgctgccagccgggtgcagagcgctgccccagcccggcccggccctgctgcccacgtgtacccagctggcagccaggtgatgatgatccccagccagatctcctacccagccagccagggcgcctactacatccctggccagggccgcagcacctacgtggtgcccacccagcagtaccctgtgcagcccggggccccctag

SEQ ID NO: 109470 - DNA, 4308 bp, Artificial Sequence
  derived and/or modified sequence
atgaaccagcccccccagatcgcccccaagcgggagcggaagaccattcgtatccgtgatccgaaccagggcggtaaggacatcaccgaggagataatgtcgggagctcgcacagcttctacccccacacctcctcagacaggcggggggttggagccccaggcaaacggcgagactcctcaggttgccgttatcgttagacccgacgaccgaagccagggggccattattgctgaccgaccggggctccccggcccagagcattctcccagcgaatcgcagcccagctcgcctagcccgacaccgtcgccctcgcccgtgttggagcctggatccgaacccaatcttgccgtgctatctattccgggcgacaccatgactactattcagatgagtgttgaggagtctactcctatttcaagagagaccggtgagccataccgcctatcccctgagcctaccccactggccgagcctattctggaagtggaggtgactttatctaaaccggtgcccgaatccgagttctcatcctctcccttgcaagctccaacccctttggcaagccataccgtcgagatacatgagccgaatgggatggtacctagcgaagacctggagcccgaagtcgaatcctcccccgaactcgcaccccccccggcctgtcccagcgagagtccagttcccatcgcacccacagcacaaccagaggagctactcaacggagcgccctcaccgccagccgtggatctgtctccagtgtccgaacccgaagaacaggctaaggaggtaacagccagcatggccccccccaccatccctagcgccaccccagccaccgcccctagtgccacctctcctgcccaagaggaggaaatggaggaggaggaagaggaagaggaaggcgaggcaggggaggcaggtgaggccgagtccgaaaaaggaggagaggaactgctgccccctgagtcaacgccaataccggccaatttgagtcaaaatctggaagccgccgctgctacgcaggtcgccgtctcagttcctaagcggcgtcggaagataaaggagctcaataagaaagaggcagtgggagatctgctcgacgccttcaaagaagccaaccctgccgtccctgaagttgaaaatcagcctcctgctggaagtaatccaggacctgagtctgagggctcaggtgtccccccgcggcctgaggaggccgacgagacctgggactcaaaggaagataagattcacaacgccgagaacatccagcccggagaacaaaagtatgagtacaagagcgaccagtggaaacctctcaatctcgaagaaaaaaaacggtatgacagggagttcctgctcggctttcagttcatttttgccagcatgcagaagccagaggggctgcctcacatctctgacgtggtgttagacaaggcaaacaagacccctctgcgaccattagacccaacgaggctgcagggcattaattgtggccctgacttcacaccaagttttgccaatctgggtcgtaccaccttgtctacccgagggcctccacggggcggccccggcggcgagctgccacgtggaccagctggactaggcccccgtcggtcccaacagggcccaagaaaagagcctaggaaaattatcgcaactgtgttgatgactgaagacattaagttgaataaggccgagaaagcatggaaaccttccagcaaaaggaccgctgctgacaaggatagaggcgaagaggatgcggacggctcgaaaactcaggacttgttcaggcgtgtgcgctcgattctcaataaactgaccccccagatgtttcaacaactgatgaagcaggtgacacagctcgccattgacaccgaggagagattgaagggtgtgatcgatctgatattcgagaaggccattagtgagcccaacttctctgtggcgtacgccaacatgtgcaggtgtctcatggctctcaaagtaccaactaccgaaaaaccgaccgtaaccgtgaactttagaaaactgctcttgaatcggtgtcagaaggagttcgagaaggataaagacgatgacgaggtcttcgagaagaaacaaaaagagatggacgaagctgctaccgcggaggagagagggcgacttaaggaggaactggaggaggcaagagacatcgctaggcggaggtctctcgggaatattaaattcattggggaactgtttaagctgaagatgctgaccgaagcaataatgcacgattgtgtggtcaaactgctgaaaaatcacgatgaagagagtttggaatgtctctgcaggctactcactacgatcggcaaagacctggatttcgagaaggcaaaaccccggatggatcagtacttcaatcagatggagaagatcatcaaggagaagaaaacctcttccagaatccgcttcatgctacaggatgtccttgatctgcggggctctaactgggtgccgcgccgaggtgatcaggggcccaaaaccatcgaccaaattcataaggaagcagaaatggaggagcacagggagcacattaaggtacaacagttgatggccaagggcagcgacaaacgtagggggggaccgccgggacccccaatctccagaggactccctctggtggacgacggcggctggaatactgtgcctatttccaaggggtcccgcccaattgatacttcccgactgactaagattacaaaacccgggtccatcgatagtaataatcaacttttcgcacccggcggacgtttgtcttggggcaaggggtcctctggtggtagtggcgccaagcctagcgacgccgcgagcgaggcagcccgaccagctacaagtaccctgaatagatttagcgctcttcagcaagctgtgccaaccgaatctactgacaacaggagagtggttcagagaagtagcctgtctcgcgagcgcggggagaaagcgggagacagaggagatcgcctcgagcgaagtgagcgtggcggcgacagaggcgataggttggatcgggccagaacccccgctaccaagcgttcttttagtaaagaggtggaagagagatccagggagagaccttcccagcccgaggggctgcgaaaggctgcttccttaactgaggaccgagatagagggcgcgatgccgttaagagggaggcagcgctgccgccagtctctccgcttaaggcagctttgagcgaggaggaactcgagaagaaatcgaaggcaattattgaggagtacttgcatcttaacgacatgaaggaagctgtgcagtgcgtgcaggaactggccagtccgtccctgctcttcattttcgtgagacatggcgtcgagagcactctggagcggagcgccatagctcgggagcatatggggcaactgttgcaccagctactgtgcgccgggcatctatccaccgctcagtactatcagggcttatacgagattctcgaactggctgaagacatggaaatcgatatccctcatgtctggctctatctagctgagctggtaactcctatactgcaagaggggggcgtgcctatgggggaacttttcagggagattactaagccgcttcgccctctgggtaaagcggcgagcctgcttcttgagattttaggcttgctttgcaagtcaatgggccctaaaaaggtgggtaccctgtggcgggaagcgggcctgagctggaaagagtttctgccggaggggcaagatatcggagcttttgttgccgagcagaaggtcgagtacacactcggagaagagtccgaggctcccggccagcgggcactgccctccgaggagctcaatcggcagcttgaaaagctcctgaaggagggatctagtaaccaacgcgtgttcgactggatcgaagccaatttatccgagcaacaaatagtctcgaacacactcgtgagggctctgatgaccgccgtgtgctattccgccattatcttcgaaacgcccctccgagttgatgtcgctgtgctgaaggctcgcgcaaaactattgcaaaagtacctttgtgacgagcagaaagaactgcaggcactgtatgccctgcaggcgttggtggtaaccttagagcagcctcccaatttgctccgtatgttcttcgatgccctttacgacgaggatgtggttaaagaggacgctttctacagctgggaatcctctaaagatccagccgagcaacaaggcaaaggagttgctctgaagagcgttacagccttttttaaatggttacgcgaggccgaggaagagtccgatcataattag

SEQ ID NO: 109471 - DNA, 4539 bp, Artificial Sequence
  derived and/or modified sequence
atgatgatccccagccagatcagctaccccgccagccagggcgcctactacattccgggccaaggacggtctacctatgtggttccaacacagcagtacccagtgcagccaggagccccaggattttaccccggggctagccctacggagttcggcacgtatgccggtgcgtactatcctgcacaaggcgtgcagcagttccccacgggcgtggccccaactcccgttctcatgaaccagccaccgcaaattgcacccaaaagggagaggaaaacaataagaatacgcgatcccaatcagggaggaaaggacattactgaagaaattatgagtggagctcggaccgctagcactccaaccccgcctcagaccgggggagggcttgaacctcaggccaatggagagactcctcaggtggctgtgatagtccgacccgacgaccggtcacagggggccatcatcgccgaccggcctggattgccaggccctgagcacagccctagcgaaagtcagcctagttccccgtcacccacccccagtccaagtcccgtcctggaacctggatctgaacccaacttggccgtgctgtcaatccccggcgacaccatgaccaccatccagatgtctgttgaggaaagtactcccatcagtcgggagactggagaaccataccgtctgtcgccggagcctactcctttggccgagccaatcctggaggtcgaagttactttgagtaaaccagtgcctgaatccgaattttcatccagccccctccaagcccccacacctctggccagccatacagtggagattcacgagcctaacgggatggtccccagtgaagacttggaacctgaggtggaatcaagccccgaactggcgccccctcccgcctgtccctctgagtcccccgttccaattgctcccaccgcccagcccgaagaactgctcaacggcgcccctagccctccggccgtggacctgagccctgtaagcgaacccgaagagcaggcgaaggaggtgacggcatctatggctccaccgaccattccttccgccaccccagccactgctcctagcgcaaccagtcctgcacaagaagaggaaatggaggaggaagaagaggaagaggaaggagaggctggagaagctggggaggcagaaagcgagaagggaggcgaagagttgttgcctcccgaaagcacccccatccccgctaacttatcccaaaatctggaggccgccgccgctacccaagtcgccgtgagcgtccctaagaggagacggaagataaaggagctcaacaaaaaggaggccgtgggcgatcttttagatgcgttcaaagaagcgaatcctgccgtgccggaggtggaaaatcagccaccagccggcagtaaccccggcccggaatccgaaggtagcggggttcccccacgaccagaagaagctgacgaaacgtgggattctaaagaggacaagattcacaacgccgagaacatccagccaggagaacagaagtacgagtataaatcagatcagtggaagcccctgaatctggaggagaagaaaaggtatgatagagagttcttgctcggttttcaatttatctttgcatccatgcaaaaaccggagggattaccgcacatctcagacgttgttttggataaggccaataaaacccctctgagaccccttgatccaacccgtcttcagggcataaactgcgggccagatttcactccaagcttcgcaaacctgggtaggacaacgctctctacacgcggacctccccgtggtggccctgggggggagctgccccggggccctgcaggcctgggacctagacgttcacagcagggaccgcgcaaagaacctaggaagattattgcaaccgtcctgatgactgaggatattaagctgaacaaagctgagaaggcctggaagccatccagtaagcggacggcggccgacaaggacaggggggaagaggatgctgatggtagcaagacacaagacttgttccggcgcgtgcgtagcattttaaataaactcactcctcagatgttccagcagctgatgaagcaggttactcaactcgccatcgacaccgaggagcgactgaagggcgtaatagacctaatctttgagaaagctattagcgagccaaacttctctgtggcctatgcgaacatgtgtcgatgcctgatggcacttaaggtccccactacagagaagccgaccgttacagttaacttccgaaaactccttcttaacagatgtcagaaggagttcgagaaagacaaagatgacgatgaggtgttcgagaaaaagcagaaggaaatggacgaagcggcgactgctgaggaacgagggagactgaaagaggagctggaagaagccagggatatcgccaggcgaaggtcactggggaatataaaatttatcggcgaactgtttaagctcaagatgctgaccgaggccataatgcatgattgtgtggtgaaactgttgaagaatcacgacgaggagtctctggagtgtctgtgccgactcttgaccaccataggaaaggacctggatttcgagaaagcaaagccccgcatggaccaatattttaaccagatggaaaagattataaaggagaagaagacaagctcacggataaggtttatgctgcaggacgtgctcgatctgcgtggaagtaactgggttccaaggcgcggggaccagggccctaagactatcgaccaaattcacaaggaggctgaaatggaggaacacagggaacatatcaaagtgcaacagctcatggccaaggggtccgacaaaaggaggggcgggcccccaggaccacctattagcaggggcctgccactagtggatgacggcgggtggaacactgtgcctatttctaagggaagccggcccattgacacttctaggctgaccaagataactaagccaggcagcatcgatagcaataaccagctgtttgcccctggaggccgtttatcatggggaaaggggagctctggagggtccggcgcaaaacctagcgatgccgcatctgaggccgccaggccagcaacctccaccctaaacagattttcagcccttcagcaggctgtgcctactgaaagtaccgataatcgcagggttgtgcaacgctctagcctaagtcgagagcgtggggagaaggccggggatcgcggagatcgacttgagcgaagcgagcgtggaggagaccgcggggacaggcttgaccgcgcccgcactcctgccactaagcggtctttttccaaagaagtggaggaaagatcacgggaaaggccttcgcagccagagggcctgagaaaggccgccagtctgacagaggatcgtgatcgtggccgcgatgctgtaaagcgagaggccgctttgccaccagtttcccctctaaaggccgcccttagcgaagaggaacttgaaaaaaagtctaaagccataatcgaggaatacttacacctgaacgatatgaaagaagcagtacagtgtgtccaggaacttgcaagccccagtctgctgtttattttcgtcagacatggagtcgagagcaccctagaaagaagcgctattgcccgcgaacacatgggtcagctcctgcaccagctactttgtgccggacacctttcaacagctcagtattaccagggactgtacgagattttggagctggccgaagatatggaaatagacatacctcacgtctggctctacttggcagaattagtgaccccaatcttgcaagaggggggtgtgcccatgggggaattattccgggaaattacaaagccactgaggccactgggaaaagcggcgtccctgctgctggagattttaggccttctctgcaagtccatggggcctaagaaagtcggaacactgtggcgcgaagccgggctttcctggaaagagtttctgcctgagggccaggatatcggagcattcgtggctgaacaaaaggtggaatacactctgggcgaggaaagtgaggctccgggccagagggccttacccagcgaagaacttaataggcaactcgagaagctgctcaaggagggctccagcaatcagcgagtttttgactggatagaggccaatctttcagagcagcaaattgtaagtaatacccttgtgcgggcactgatgaccgctgtgtgctactctgctatcatcttcgaaacgcctctgcgagtcgacgtggctgtgctgaaagcaagagcaaagctgttacagaagtatctttgtgacgagcagaaagaactgcaggctttgtacgccctgcaggcattggtcgtgaccctcgaacagcctcccaatcttcttcgcatgtttttcgatgcactgtacgacgaagatgtcgtgaaggaagatgctttctacagttgggaatcaagtaaagaccctgctgaacagcagggcaagggcgtcgccctgaaaagtgtgactgcgttctttaaatggctgagagaggctgaagaggagagcgatcataactag

SEQ ID NO: 109472 - DNA, 4539 bp, Artificial Sequence
  derived and/or modified sequence
atgatgatccccagccagatcagctaccccgccagccagggcgcctactacattccagggcagggcagaagtacttacgtggttccaacccagcaatatcccgtgcaacccggggcccctgggttttacccaggcgcgagccctaccgaatttggtacttatgccggtgcttactatcccgcgcagggcgtgcagcagttccccaccggggtcgcccctaccccagtcttgatgaaccagcccccccagattgctcctaagagagagagaaagactatccggattagagaccctaaccagggaggcaaggatattactgaggaaatcatgagcggggcacggacggcgtcaacccccacgccaccccaaaccggaggggggcttgaacctcaagctaacggagaaacaccccaggttgctgttatcgtgcggccggatgacagatcgcagggcgcgattatcgctgacagacccggactccctggcccagagcattccccttccgagtcccagccatcttcgccctctccaactccgtctccaagtcctgtgttggaacccgggagcgagcctaaccttgcagtgctcagcatcccgggcgatacgatgacgaccattcagatgtccgtagaagagagcacacccatcagtagagagaccggagagccttatcgcctttcccccgaacccaccccattggccgagccgattctggaagtggaggtgaccttaagcaagcccgtgcctgagtcagagttctcctcttcccccctgcaggcccccacccctctcgcgtcccacactgttgagatccatgagcccaatggtatggtgcctagtgaggatctggagcccgaagtggaaagcagcccagaactagccccaccaccggcttgtcccagtgagagccctgttcccattgcacccaccgcccagcctgaggaactactgaacggcgccccaagtccaccagcggtggacctgagccctgtttctgagcccgaggagcaggccaaggaagtgactgccagcatggccccacccactattccttcagctactcccgccacggctcccagcgcaacttctcccgcacaggaagaagaaatggaagaagaggaggaggaggaggagggcgaagccggagaagcaggtgaggctgagagcgaaaaagggggcgaggagctgctgccacccgaatctacacctatccctgccaatctgagccagaatctcgaggctgccgcagccactcaggtggccgtgagcgtgcctaagcgcagacggaagataaaagaactcaataagaaggaggcagtgggggacctccttgacgcctttaaggaggctaaccctgctgtgcctgaggtggagaaccagccccccgctggcagtaatccaggaccagaaagcgaagggtccggtgttccacctcgccctgaagaggccgatgaaacctgggacagcaaagaggacaaaatccataatgccgaaaacattcagcctggagagcaaaaatacgaatataaaagcgaccagtggaagcctctaaatctggaagaaaagaaaagatatgatagggaattcctcctcggctttcagttcatctttgcaagcatgcagaagcccgagggtctgcctcatatttctgatgtggtcctggacaaagccaataagacacccctgcggccgctcgacccaacacgactgcagggcataaactgtgggcccgatttcacaccttcctttgccaatctcgggagaaccaccctctccacacgcggacccccaaggggcggacctggcggcgagctccccagggggcccgctggactcggtccccgccggtcacagcagggccctcgcaaagagcctcgaaaaattattgctacagttctcatgacagaggatataaagctcaataaagctgaaaaggcatggaaacctagttctaagcggacagccgccgataaggatcgcggcgaggaggacgcagatggctcaaaaacccaggacctctttcggagggttcgatccattttaaacaaactcaccccccaaatgtttcagcagctgatgaagcaggtaacacagctcgcaatagatacggaggaacgactgaagggcgttatcgacctgatctttgaaaaggctatttccgagcccaacttttcggtggcttacgccaatatgtgtcgttgcctgatggcacttaaagtgcccacaacggagaaaccaacagtgactgtgaactttagaaaactactgcttaatcgatgccagaaagagtttgagaaggacaaagacgatgacgaagtgtttgaaaagaagcagaaggagatggatgaggcagcaacagcggaagagagaggccgattaaaggaggagctggaggaagcgagggacattgccaggcggcggtctcttggaaacatcaaatttataggtgaactctttaaactcaagatgttgaccgaggccatcatgcatgattgtgtggttaagctactcaaaaatcacgatgaagagagcctggaatgtctgtgtcgcttgttaactaccatagggaaagacttagatttcgaaaaggcaaaacctcgcatggatcagtatttcaaccaaatggagaagatcataaaggaaaaaaaaacatctagtagaattcgcttcatgttgcaggatgtgctcgatttaagaggatcaaattgggtgcctagacggggagatcaaggtcccaagaccatagaccaaatacataaggaggccgagatggaggaacatagagagcacattaaggtacagcagctcatggccaagggctcagataagagacgtggcgggcctcctggtccccccatttctaggggcctgcctctggttgacgacggaggttggaatactgtgcctatttctaaaggctccaggcccattgatacctcccgactgacaaagatcacgaaacctgggtcgatcgactcaaacaaccagctttttgctccaggcggaagactaagttggggcaaaggaagctccgggggctctggcgcaaaacctagtgacgccgctagcgaggccgccaggcccgccacctcaactttaaatcggtttagtgctttacagcaggctgtgcctactgagtccacagataacagaagagtggtgcagcgttcctccttgtcacgtgagaggggagaaaaggcaggcgacagaggggacagactcgagaggagcgagagaggcggtgacaggggggaccgtctggatcgggcaagaaccccggccactaagcggtctttcagtaaggaggtcgaagagagatctcgcgaacgccccagccagcctgaaggtctccggaaggcggccagtctgacggaagatcgagaccggggccgagatgcagtcaagcgtgaggccgcgttacctccagttagcccactgaaagccgccttgtcggaggaagaacttgagaagaagagtaaggcaatcatcgaggaataccttcacctgaatgatatgaaagaagccgtgcagtgtgtgcaggaactggcatctccatccctgctgtttatattcgtgcgacacggtgtcgagagcaccctggagcggtccgcaattgcccgagagcacatgggacagctgctgcaccagctgctctgtgctggacatctaagcactgctcagtactaccaaggtctgtacgagattctggagctcgccgaggatatggagatagacattcctcacgtgtggttgtatctggccgaactggtcacacctatactccaggaaggcggggttccaatgggcgaattgttccgcgaaattactaagccacttcgtccgctcggtaaagcagctagtctgctgctcgaaatcctcgggctgctttgtaaaagcatgggacccaaaaaggtcgggaccctttggagggaggctggtctgtcctggaaggagtttctgcctgagggccaggatataggggcttttgtggctgaacagaaggtcgagtacaccttaggggaagagagtgaggcgcctggtcagagagccctcccttctgaggaactgaacaggcaactagaaaagctcctgaaagaggggagctcgaaccagagagtgttcgactggattgaggccaatctcagcgaacaacaaatagtctccaacaccctggtgcgggctctgatgactgctgtgtgctattctgccatcattttcgaaactcctctgagagtcgatgttgccgtgttgaaggcccgagccaagctgcttcagaagtatctctgcgacgagcagaaggagctccaggctctctatgctctacaggcgctggtcgttacattggaacaacctcccaatctgctgcggatgtttttcgacgccttatacgacgaggatgtggttaaagaagacgctttttactcctgggaatcttccaaggatcccgccgagcaacaaggtaagggcgtggccttgaaaagtgttactgcattctttaaatggctccgagaggccgaggaagagtccgaccacaactag

SEQ ID NO: 109473 - DNA, 4680 bp, Artificial Sequence
  derived and/or modified sequence
atgaacacccccagccagccccggcagcacttctaccccagccgggctcagccgccaagctcggccgctagccgggtgcagtcagccgccccggccaggccaggccccgccgcgcacgtctacccagcaggctctcaggtgatgatgataccctcacagatttcataccccgctagccaaggggcctactacatcccgggacaaggaagaagcacttacgttgtacctacccagcagtacccagtgcagcccggcgcgccggggttttatcctggagcgtctcccaccgaatttggaacctacgccggagcatactaccccgcccagggagtgcagcagttccctactggcgttgcgccaacccctgttcttatgaatcagccccctcagattgcacctaaacgagaaaggaagacaatcaggatacgagacccaaatcagggagggaaagacatcaccgaggaaattatgtcgggtgcaagaaccgctagcacacccacccccccccagaccggtggaggcttagagccgcaggccaatggcgaaacaccgcaagtagcagtcattgtgcgcccagatgatcgaagccagggggctatcatcgcagatagaccagggctacccgggccagagcactccccctccgagtctcaacccagcagcccatccccaacacccagcccttcacctgtgctggagcccggctccgagccgaacctggctgtgctgagcatcccaggcgacacgatgactaccattcaaatgagcgttgaggagtcaacgccaattagtagggaaactggagaaccctaccgactcagccctgaaccgacccccctcgccgagccaatactggaggtggaggtgactctgtcaaagcccgtgcctgagtcggagttcagttcaagccctttgcaggcccccactcctcttgcatcccacacagtggagattcatgagcctaacggcatggtgcctagcgaggacttggaaccagaagtggagtcctcaccagagttggcccccccacctgcttgcccttctgaaagtcccgtgccgattgcccccaccgctcagcctgaggagctgctgaacggagctcctagtcctcctgcagtcgacctatcccctgtttcagagcctgaggagcaggccaaggaagtcaccgcaagcatggcacctccaactataccatcagcaacacctgctacggccccttcagctacgagcccagcccaagaggaggaaatggaagaggaggaagaagaagaggagggcgaggcaggggaggccggagaggccgaaagtgagaagggcggcgaggagctgctgcccccagagagcactcccatacctgctaatctgtcgcagaatcttgaggccgccgccgctacacaagtcgctgtgtcagtcccaaaacgtagacggaaaataaaggaactgaacaaaaaagaggctgtcggcgacctgcttgacgcctttaaagaagctaaccccgcggttcccgaggtagagaaccagccgcctgcaggctctaaccccggcccagaaagcgaaggtagcggcgtcccacctaggcccgaggaggcagatgaaacatgggactccaaagaggataaaatccacaacgcagagaatatccagccaggagagcaaaaatacgagtacaagagtgatcagtggaagcctcttaacttagaggaaaagaagcggtacgacagggagttcctgttggggttccagtttatcttcgcttccatgcagaagccagagggtttgccccatatctctgacgttgtgctggataaggcaaacaagacgcccctgcggccactagatccaacccggctgcagggaatcaactgtgggcccgattttacacctagctttgcaaacctgggtcggacaacgctgtctactcgtggcccaccccgggggggtcccggaggagaactgcctagggggcccgcaggccttggaccaagacgatcccaacaggggccaaggaaagagccgcggaagattattgctacggttttaatgacagaagacattaaactcaacaaagccgaaaaagcctggaagccaagctccaaacgcactgcggccgacaaggacagaggcgaggaggatgcagacggaagcaaaacccaagacttattccggagggtcaggagcatcttaaataagctgaccccccagatgttccagcagctgatgaagcaggtcacccagcttgcaatagataccgaagagcgtcttaagggagtgatagacctcatcttcgagaaggccatttcagagcctaacttctcagtcgcttacgctaacatgtgcagatgtctgatggccctcaaagtgcccacaacggagaagcccactgtgaccgttaacttccgaaaacttcttttgaacagatgccaaaaagagttcgagaaggataaagacgacgatgaggtattcgagaaaaagcagaaggaaatggacgaggccgccactgctgaagagcggggccgtctcaaggaagaactcgaggaggcccgcgacatcgccagacgccgttcgctgggaaatattaaattcattggtgaattgttcaagctcaagatgctgaccgaggcaatcatgcacgactgcgtcgttaagctgcttaagaaccacgacgaagaaagcctcgagtgcctgtgtcgtctgctgaccactatcggcaaagacttagactttgaaaaagctaaaccccgcatggaccagtactttaatcaaatggagaaaatcatcaaggagaaaaagacgtcctcacggatcaggttcatgctgcaagacgtgctggaccttcggggcagcaactgggttcctagaagaggggatcagggtcccaaaactattgatcaaattcataaagaagccgagatggaagagcacagggagcatatcaaagtgcaacagctgatggccaagggctcagacaaacggagaggcgggcctcccggcccgccgattagccggggcctcccactggtggatgatggaggatggaacactgtcccgatttccaaagggagtagacccatcgacacgtctcggcttacaaaaatcaccaagcctggcagtatcgactcaaacaaccaactttttgcgcccgggggacgcttgagctggggaaagggctcttcgggcggatcaggggccaagccaagcgatgctgcctccgaagcagccagaccagccacctcaaccttgaatcggttcagcgctctccagcaagctgtgccgaccgagtccaccgataatcgtagggtcgtgcaaaggagctctctgtcgcgcgagcgaggtgaaaaagcaggcgaccggggtgatcggctggaaaggtccgagcggggaggcgatcggggggaccgcctcgatcgtgctcgcacccccgccaccaagcggtccttcagtaaggaagttgaggagcggtctagggagagaccctcacagcccgagggcttgagaaaggctgcgtcgttgaccgaggaccgggaccgtggtagagacgctgtgaaaagagaagccgcactccctcccgtttccccattgaaggcagctctctccgaggaggaactggagaagaagtcaaaggccattatcgaagagtacttacacctgaatgatatgaaagaggccgtccagtgtgtgcaggagctcgcatccccgtctttactattcatatttgtgaggcacggggtcgagtctacgttggaacggtcggctattgccagggaacacatggggcagctgctccaccaactcctgtgtgctggccacctgagcactgcgcagtactatcagggcctgtatgaaatcctggaactggcggaggatatggagatagacattccacatgtctggctttacttggctgaattggtaactccaattctccaggaggggggcgtcccgatgggcgagttgtttcgagagatcacgaagccgctcaggcccctcggcaaagcagcctccctgttgctcgaaattctggggctgctgtgcaaatctatggggcccaagaaggttgggaccctgtggcgggaggccggactatcctggaaggagtttctcccagagggccaggacattggagcctttgtggcagagcagaaagtcgaatataccttgggcgaggagagtgaggcaccgggtcagcgcgccctcccaagtgaggagctgaacagacagctggaaaagcttttgaaagagggaagctcaaatcaacgcgtgtttgactggatcgaggcaaacctcagcgagcaacagatagtgagtaacactctggtgcgcgccctgatgacagcggtctgttactcagccatcatcttcgaaacccccctgcgggtcgacgtagccgtgctgaaggcccgggccaaactgctgcagaaatacctatgcgacgagcagaaagaactccaggctttgtacgcgctgcaggccctggtggtcacattagagcagccaccaaacctgctgcgcatgtttttcgatgcactgtatgatgaggatgtggtgaaagaagacgcattttattcatgggagagttctaaagatcccgcagagcagcagggcaaaggtgtggccttgaaaagtgtcaccgctttcttcaaatggcttcgggaggcagaggaggagagcgaccacaactag

SEQ ID NO: 109474 - DNA, 4212 bp, Artificial Sequence
  derived and/or modified sequence
atgagcggcgcccggaccgccagcacccccacccccccccagaccggaggtggactcgagcctcaggcaaacggcgaaacaccacaagtggcggtcattgtgcggcccgacgacagatcccagggtgctatcatagcggacaggcccgggcttccgggacccgaacattccccatccgagtctcagccatcatccccctctcccacgccaagtccgtctcccgtacttgaaccgggcagtgagcccaacctggccgtcctttccattcccggcgataccatgacaacaattcagatgtccgtggaagaatcaaccccaatttcacgagaaaccggcgaaccatatcgactgtctccggagcccactcctctggctgagcctatactcgaggtggaggtaacgttgtccaagcctgtgccagagagtgaattctcaagctctccactgcaggcaccaacacccctcgctagccatactgttgagatccacgaaccaaatggaatggtgcccagtgaagaccttgaacctgaagtggaaagtagccctgagctggcaccgccacctgcgtgcccttctgagtcccctgtaccaatcgcccctactgctcagccagaagaacttttgaatggtgcgccctcacctccggcggtcgacctgagtccagtgagtgagccagaggaacaggctaaagaagttactgctagcatggctccccctacaattccgtccgccacccctgcaaccgcgccctccgctacgtctcctgcccaggaagaggagatggaggaggaagaagaggaagaagagggtgaggccggagaggccggtgaggctgagtcagagaagggcggcgaggagttactacctcccgagtccacccctatcccggccaacttgagccagaacctcgaagcagctgccgctactcaggtggctgtgagcgtccccaagcgtcggagaaagattaaggaactgaacaaaaaggaagccgtgggtgacctcctggacgcattcaaggaggccaatcccgcagtcccagaagttgagaaccagcctccggctgggtccaatcccggcccggaaagtgaaggttccggggtccccccccgccccgaagaggctgatgagacatgggattccaaggaggacaagatccacaacgccgagaacattcagccgggggaacaaaagtacgaatacaagagtgaccaatggaagcctctcaaccttgaagaaaagaagcgctacgaccgtgaattcttattgggcttccagtttatcttcgcttccatgcagaagccggaggggctgccgcacatcagcgatgtggtcctggacaaagcgaacaagacccccctgcgacctctcgacccaacccgactgcagggtataaactgcggtcctgacttcacgccctcgtttgctaatctgggaagaaccactctgagtactcggggtcctccgagggggggacctggcggagaactgcctagaggacccgccggcctggggcctagaaggagtcagcagggacccaggaaagagccccgaaagatcattgccaccgtcctcatgacagaagatatcaaacttaataaagctgagaaggcctggaaaccttcctctaaaaggaccgccgctgataaagaccggggggaggaggacgcggacggtagtaaaactcaggacctgtttcgccgtgtgagaagtatattgaataaactgaccccccagatgtttcaacagttaatgaagcaagtaacccaactcgccatcgacaccgaagagcggctgaagggcgtcattgatttgatcttcgaaaaggcaatttcagagcccaattttagcgtggcatacgccaacatgtgtcgttgccttatggctctaaaggtgcccaccacggaaaaaccaacggtcaccgtgaatttcaggaaactgcttcttaatagatgtcagaaagaattcgagaaggacaaagacgacgacgaagtttttgaaaaaaaacagaaggagatggacgaggctgcgaccgctgaagagcgtgggaggcttaaagaagaattggaggaggctagggacatcgcaaggagacggtcgcttggtaatataaaatttattggagagctgtttaaactaaagatgttaactgaagcaattatgcatgactgtgtggtaaagctccttaaaaaccacgatgaagagtcccttgagtgtttatgccgcctcttgactaccattgggaaagatcttgattttgaaaaagccaagccccgtatggatcagtatttcaatcagatggagaagattattaaggaaaaaaaaacatcgagccggatccgctttatgctgcaggacgtgctggatctgcgggggagtaattgggtgcccagacggggggaccagggacccaagaccatagatcagattcacaaggaggccgaaatggaggagcacagagagcacatcaaggtgcaacaactcatggcaaaagggtccgacaagaggcgcggaggcccgcctggcccccctatttcgcgcggcctgcccctcgtggatgacggcggctggaacactgtccccatctcaaagggctcacgtcccatcgacacttctaggctgacgaagattaccaagccaggaagcattgacagcaacaaccagctctttgcgcctggaggacggctctcctgggggaaaggtagcagcggtggatccggagccaaaccatcagacgccgcctctgaagccgcaagaccagccaccagcaccctgaataggttctccgccttgcagcaggccgtgcccaccgagtcgacagacaatcggcgagtggtgcaaaggtcaagtctgagtagggaacgtggtgagaaagctggggatcggggcgaccgattagagagaagcgagaggggaggcgaccgtggtgaccgcctggacagagcacggactcctgcaaccaagcgctcatttagcaaggaggtggaagagcgaagcagagagagacccagccagccggaaggtctgcggaaggcagcttccctgactgaggatcgcgataggggacgcgatgccgttaagcgcgaggcggcacttccaccagtaagccctcttaaggcagcactgagcgaagaggaacttgagaaaaaatctaaggctattatcgaggagtatcttcatctcaacgatatgaaagaggcagtgcagtgcgtccaggagttagcttctccctctctgctctttatcttcgttagacatggagtggagagcacactggaacgctccgctatcgcacgggaacacatgggtcagctcctgcaccagctcctgtgtgcaggccacctgtccacagcccagtactaccaggggctttacgagatcctcgagcttgccgaggacatggaaatagatataccccatgtgtggctgtatctggctgagctcgtgaccccaattctgcaggagggtggcgttccgatgggggaactgttccgggagatcaccaagcccctccgccccctgggaaaggccgcttcattgctgctcgaaatattggggttattgtgcaagagtatggggccaaaaaaggtcggaacactatggagagaggccggcttgtcttggaaggagttcctcccagagggtcaggacataggcgcattcgtggccgagcaaaaggtcgagtacaccctcggggaagagtcggaagctcccggtcagagggcgctgcccagcgaagagctcaacagacaactggagaagttactgaaagagggttcgagcaaccagcgcgtcttcgattggattgaagctaatctgagcgagcagcagatcgtgagcaataccttagtacgggccctcatgactgctgtgtgctactcggccatcattttcgaaacaccattgcgcgtcgacgtggccgttctgaaagcacgcgccaagcttctccagaaatatctgtgtgacgaacagaaggagctgcaagccctgtatgcccttcaagccttagtagtcacacttgagcagcccccaaacctgctgcggatgtttttcgatgctctgtacgacgaagacgtcgtcaaggaagacgccttttactcctgggaatctagcaaagaccccgcggagcaacagggaaaaggcgtggctctgaaaagtgtgactgccttctttaagtggcttcgtgaagcagaggaagagtctgaccacaactag

SEQ ID NO: 109475 - DNA, 264 bp, Artificial Sequence
  derived and/or modified sequence
atgaacacccccagccagccccggcagcacttctaccccagccgggcacaaccacccagtagtgcagcctctcgcgtgcagagcgcggcacccgctcgcccagggccagctgcccacgtttatcctgctggtagtcaagtgatgatgatcccgagtcagatctcatatccagcttcccagggggcttactatattccggggcaaggccgatctacctacgttgtcccaacccaacagtacccagtgcaacccggcgccccttag

SEQ ID NO: 109476 - DNA, 4308 bp, Artificial Sequence
  derived and/or modified sequence
atgaaccaacccccacaaattgcgcctaaaagagagcgcaagaccataagaattcgagatcccaatcaaggaggaaaggacattaccgaggagatcatgtccggggctcgcaccgctagcacgcccaccccgcctcagactggcggtggtcttgaaccccaggcaaatggcgagaccccccaggtggccgtcattgtgcgtcctgacgacagatcccagggcgcaattatcgccgacaggccaggcctgcctgggccagaacatagtccatccgagtctcagccgtccagtccatctccaacaccctcaccttctccggtcctggagcccggatcggaacctaacctggccgtcctgagcatccccggagatactatgacaacaattcagatgtccgtggaggaaagcacccccataagcagggagaccggagaaccttatcggctcagtcccgaacccacacctctggccgaacccatcctcgaggtcgaagtcacactgtcgaaacctgtacccgaaagcgaattcagcagcagtcctctgcaggctccaacccccctcgctagtcacacagtggaaattcacgagcccaacggtatggtgcccagcgaggatctggagcctgaggtggagagcagtcccgaacttgcaccaccaccggcttgtcctagtgaatctcctgttccaatagcccctactgcccagccagaggagctgctgaatggggcaccgtccccgccagccgtcgacctgtcccccgttagcgaaccagaggaacaagctaaggaagtgaccgctagtatggctcccccaactataccgtcagcaaccccggcaacagccccatccgcaacctcacccgcacaggaggaggaaatggaagaggaagaagaggaggaagagggagaagctggagaagctggcgaggccgagagcgaaaaagggggagaggagctgctgccgccagaatcgacacccatcccggcaaacctgagccaaaatttagaggccgctgcagctactcaggtggccgtgtcagttccgaaacgtcgacggaaaatcaaggaactaaacaagaaggaagcagttggagatttgctcgatgcatttaaagaggctaacccagcagtgccagaggtggagaaccagcctcctgcaggttcaaatcccggacccgaatcggaagggtccggggtcccccctaggcctgaggaagcagacgagacatgggactccaaagaggacaagatccacaatgccgagaacatacaacctggtgaacagaaatacgaatataagtcagaccagtggaagccgctgaacctggaggaaaagaaacggtatgacagagaatttctccttgggttccagtttatctttgcaagcatgcagaagccagaggggctgccccatatcagtgatgtggtgctcgacaaagccaacaagacacctctccggcctttggaccccacccgattgcagggcatcaattgcggtccagatttcacacccagtttcgccaacctgggaagaacaactctctctactagagggccaccgcgtggcggaccaggaggcgaactgcctcgcggacctgctgggctaggccctagaagaagtcaacaagggccacgaaaggaacccaggaagataatcgccaccgtactgatgaccgaggacatcaagcttaacaaggctgagaaagcctggaaaccctccagtaagcgcacagccgcagacaaagatcgcggtgaggaggatgccgacggaagtaagacacaggatctgttccgtagagtgagaagcatcctcaacaaactgactccccaaatgtttcagcaactaatgaagcaggtaactcagctagctatcgataccgaggaaagactgaaaggagtcatcgatctgatcttcgagaaggccattagcgagccaaactttagtgttgcatacgccaacatgtgccgatgtctgatggccctgaaagttccaaccaccgagaagcccacggtcacagtgaacttcaggaaacttttgttaaatcgctgtcagaaggagtttgagaaagataaggacgacgacgaggtgttcgaaaagaaacagaaggagatggatgaagctgccaccgctgaagagaggggacggttaaaagaagagctggaggaagccagggatatagccagacggaggtctttgggcaatataaagtttatcggtgagctctttaagctcaaaatgttaaccgaggctattatgcacgattgcgtggtgaagttactcaagaaccatgacgaggagagtctcgagtgcctgtgcagactgttgacaacgatcggcaaggatcttgatttcgagaaggccaaaccgagaatggatcaatacttcaatcagatggagaagattatcaaggaaaaaaaaaccagctctcgcatccgctttatgctgcaagacgtgctggatctgaggggtagtaattgggtgccgaggagaggagatcaaggtcccaagaccatagatcaaatccataaagaagcagagatggaggagcaccgagagcacatcaaggtgcagcaattgatggccaagggatctgacaagaggaggggcggaccacctggtcctccgattagcagaggcttacccttagtagatgatggcggttggaacaccgtgcctatctccaagggtagccgcccaatcgatactagtcggctgaccaagataactaaaccagggtctatagattccaataaccagttgtttgctcctgggggtcggctgtcatgggggaaaggcagctccggcggttccggagcaaagccgtctgatgccgcatcagaggccgctaggcccgcaacaagcacacttaaccggtttagcgccttacagcaagccgtacctactgaatctaccgacaatcggagagtggtccagcggtcttctctgtcccgcgagagaggcgagaaagccggtgaccgaggcgaccggctcgagagatcagaacgcggaggagatcggggagaccgccttgacagagccagaacccctgccacaaagcgcagctttagtaaggaagtcgaggaaaggagccgagaaagaccttcacaacctgagggtctcaggaaggccgcttctctgacagaggaccgtgaccggggacgtgacgcagtcaagagagaagcggctcttccaccagtctctcccctcaaagctgctctaagtgaggaggaactcgagaagaaatccaaagcaataatcgaggagtatctgcatctgaacgacatgaaagaagccgtgcagtgcgtgcaggaactcgcgagtcccagcctgttgttcattttcgtgcggcacggtgtcgaatcaaccctggaaagaagtgctatcgcgcgtgagcacatgggtcagctgctccaccagctgctctgtgctggtcatctgagcacggcccagtactatcagggactgtacgagattttagagctcgctgaggacatggagattgatatcccccacgtctggttgtatctggccgagttagtgacaccaatcctccaggaaggaggcgtgccaatgggggagctgttccgggaaataactaaacctctgcggcctttaggaaaggccgcatccttgcttctggagatactcggactactgtgtaagtccatgggccctaagaaggtggggacactgtggcgggaggccggtctgtcatggaaagaatttcttccagagggccaggacatcggcgcattcgtggccgaacaaaaggtggagtacactctgggtgaggagtctgaagctccaggtcagagagccctccctagtgaagaacttaatcggcagttggaaaaactacttaaagagggtagctccaaccagcgagttttcgattggattgaagcaaacctctctgagcagcagatcgtgagcaatactctcgtgagggccctgatgactgctgtgtgctacagtgccatcatttttgagacgccactgagggtggacgtggccgtcttgaaggctcgggcaaaactgctgcagaagtacctgtgtgacgagcagaaggagttgcaagcactgtacgctctgcaggccttggtggttacgctggaacagcccccaaacctgctgagaatgttctttgatgcattgtacgatgaagacgtggtcaaggaagacgcattttatagctgggagtcatccaaagaccctgcagagcagcaagggaagggagtcgcattgaaatccgtcacggcttttttcaaatggctgcgggaggcagaggaagagtccgaccacaactag

SEQ ID NO: 109477 - DNA, 4539 bp, Artificial Sequence
  derived and/or modified sequence
atgatgataccgagtcagatatcttaccctgctagccagggtgcctactatattcctggtcaagggaggtccacctacgttgttcccacccagcagtaccctgtgcagcctggagcacctgggttctaccctggggcttctcctacggaattcgggacttatgctggggcttactacccggcacagggcgtccagcagtttcctacgggagtggccccaacacctgttcttatgaaccaacctcctcaaattgctcccaagagagagaggaagactatccgcattcgcgaccccaatcagggaggcaaagacatcaccgaggagattatgagcggagcaagaacagcttccacccccacaccccctcagacaggagggggactcgagccccaggctaatggagaaactccacaggtggcggtaatcgtccgcccagacgacagatctcaaggcgctataattgcagaccggccagggttgcccggacccgaacatagtcccagcgagtctcaaccttcatcgcctagtcccactccttcgccctctcccgttctggagccaggatctgaaccaaatcttgccgttctgtctatccccggagacaccatgaccactatccagatgtccgtcgaagagtctacccctattagcagagagactggggagccttatcggttgtcccccgagcccacaccactggcggagcccattcttgaagtcgaagtgactctatctaagccggtcccagagagtgagtttagctcttccccactgcaagcgcctacacctctggcatcccacaccgtcgagatccatgagccgaacgggatggtgcctagcgaagacctcgagccagaagtggagtcaagccctgaattagcccctcctcccgcttgccccagtgaaagccccgtccccatagcacccactgcccagcctgaagagctcctgaacggggcacccagcccaccagccgtcgatctgtctcccgtaagcgaaccggaggaacaggctaaggaagttactgccagcatggccccacccactatcccctccgctacccccgcaacagccccttcagcaactagtcccgctcaggaagaggaaatggaggaggaagaagaggaagaggaaggcgaggccggagaggcaggtgaagccgagtcagagaaggggggagaggagctgctgccaccggagtctacaccgattccagccaacctgtctcagaatctagaagccgctgcggcaacacaggttgcggtctctgttcctaaaaggcgtagaaaaattaaggagctaaataagaaagaggcagtcggtgatctgcttgatgctttcaaggaggccaaccccgctgttccggaagtggaaaaccagccacccgctgggtctaaccctggcccagagtccgaaggttccggcgtgccccctcgaccagaggaggcagatgaaacttgggactctaaggaagacaagatccacaatgccgagaacattcagcccggagaacagaagtacgaatacaaatctgatcaatggaaacccttgaatctggaggaaaaaaagagatacgaccgagaattcctgctggggtttcagtttatctttgcctctatgcaaaaacccgaaggattgcctcacatatccgatgtcgtgctggataaggccaacaagacacccctgcgcccactcgacccaacacggttgcaaggcattaactgcggccctgactttacaccatcctttgccaatctgggacggacaacgttgtctaccaggggtccaccacgcggtggccctggtggcgaacttcctcgaggccctgccggtctggggcctcgaaggtcacaacagggccctaggaaggaacccaggaaaattatcgctaccgtacttatgacggaggatattaagttgaataaggctgaaaaggcctggaaaccctcatccaaaaggaccgccgctgataaagacagaggcgaagaggacgccgatggcagcaaaacccaggatcttttcagacgtgtcaggtcaatcctgaataaattaactccccagatgttccagcagctgatgaagcaggttactcagcttgccatcgataccgaggaacggttgaagggcgtgatcgatcttatcttcgagaaggctatttccgagccgaacttttctgttgcctatgctaacatgtgtaggtgtttgatggcgctaaaagttcccacaacagaaaaacccacagttaccgtgaacttccgtaagctgctacttaaccgttgtcaaaaggaattcgagaaagacaaggatgacgacgaagtgttcgagaagaagcagaaggaaatggatgaagcagctacggccgaggaaaggggcaggctaaaagaagaactagaggaggcgagagacattgctcggaggcgatccctagggaatattaaatttattggcgagttgtttaaactcaaaatgctgacagaggcgataatgcacgactgtgtcgtcaaactgcttaaaaatcacgacgaagagagcctggagtgcctatgtcggctgttaactacaataggtaaagatcttgatttcgagaaagcaaagccacggatggatcaatatttcaatcagatggagaaaattatcaaggagaaaaagacgtcgagcaggatccggtttatgctccaagacgtcctcgaccttcggggtagcaactgggtgccacgccgaggcgaccagggcccaaagacaattgaccaaattcacaaagaagctgaaatggaggaacatagggagcatatcaaagttcagcagttgatggctaaagggagtgacaaaaggaggggcggtcctccaggaccacccatcagtaggggcctgcccctcgttgacgatggagggtggaacactgtccctatttcaaagggaagcagacccattgacacatcacgactgactaaaattacaaagcctggctcgatcgactccaataaccagttattcgcaccagggggacgcctgagttggggcaaaggctccagcggcggatcaggtgccaagcccagtgatgcagctagtgaggccgcaagacctgcaacaagcactctgaaccgcttttccgccttgcagcaggcggtccctacagaaagcacagataacaggagagtggttcagagatcctccctgtcccgagaacgcggagagaaggccggagataggggggaccgcctggaacgctctgagcggggaggcgaccgcggagacaggctagaccgtgcacgcacccccgctactaaacgcagtttcagtaaagaagtggaggagcgatcccgggagagaccttcacagccggagggtttgcgcaaggccgcttctctgaccgaggatcgagatcgtgggagagatgctgttaaacgcgaggctgctttgccacctgtgagccctttgaaggcagccctttctgaggaggagttagagaagaagtctaaggcaattattgaagaatacctccacctgaatgacatgaaggaagcagttcagtgtgttcaggagctcgcctcaccgtcgctgctctttattttcgtgagacacggggttgaaagtaccttggaaaggtctgccatcgcgcgtgagcatatggggcaactcctacatcagttgctctgcgcagggcacctcagcactgctcagtattatcaggggctgtatgaaattctggaactggcagaggacatggagattgatattccccacgtgtggttataccttgccgaactcgtcacccctattttgcaggagggaggcgtgcccatgggggagctctttcgggaaatcaccaagcctctccgtcctttgggaaaagccgctagcctcttactcgagattctcggactattatgcaaaagcatgggccctaaaaaggttggaacactgtggcgcgaagctggactgtcttggaaggagttcctgcccgaaggacaggatatcggcgcatttgtggcagaacagaaagtggaatacaccctaggggaagagtctgaggcacctgggcagagggccttgccaagtgaggaactgaaccggcaactagaaaagctactcaaggagggaagttcaaatcagagggttttcgattggatagaagccaacctgagcgagcagcaaatcgtctccaacacactggtgagggctttgatgaccgctgtctgttacagcgcgatcatcttcgaaacacctctcagagtggacgtggcggttctgaaggccagagcaaagctgcttcaaaaatacctgtgcgacgaacagaaggagcttcaggctttgtacgccttgcaggcactggtggttacactggagcagccacctaacttgctgcggatgttcttcgacgctctgtacgatgaggacgtcgtcaaagaggacgctttttactcgtgggagtcttccaaggaccctgcagaacagcaaggcaagggcgtggcacttaagagcgttaccgccttttttaagtggctgagggaagccgaggaagagtccgaccacaactag

SEQ ID NO: 109478 - DNA, 4539 bp, Artificial Sequence
  derived and/or modified sequence
atgatgatcccctctcagatttcttaccctgccagccagggtgcttactatatccccggacagggcagaagcacatacgtggtccctacgcagcagtaccctgtgcagccaggtgcccctggcttttaccctggcgcatctccgaccgaatttggtacttacgctggggcatactaccccgctcagggagtgcagcaattccctactggagtggctcccactcccgtgcttatgaatcagccccctcagatcgccccaaagcgcgaacggaagacgatccgcatcagggatccaaaccagggcggaaaggacattacggaggagattatgagcggggctcgcaccgcctccacgcctacgccacctcagaccggcggagggctggaacctcaggccaatggcgagacgccccaggtcgccgtgattgtgaggccagacgaccgttcacagggagccatcattgccgacaggccaggcctgccaggtccagagcatagccccagtgagagtcagccatcgagtccttcccccacgccaagtcccagtccagtgctggagcctgggtccgagccaaaccttgctgtgctgagcatcccaggagacactatgaccactatccagatgtccgtggaagaatcaactccgatttctcgggaaaccggtgagccttataggttgtcgcccgaacccaccccactggctgaacctatcctagaggtggaggttacactctccaagccagttcctgaatcagagttcagcagcagccccttgcaagcaccaactcctctcgccagccacaccgtagagattcatgagcctaacggcatggttccttccgaagacctcgaaccagaggtcgagtcgtccccagaacttgcgcctccgcctgcctgtccatctgagtctccagtgccgattgcgccaacggcgcagcctgaagaacttctgaacggggctccatccccacccgctgtggacctatctcccgtgtctgaacctgaagagcaagcgaaggaggtcaccgctagcatggcccctcccactattccttctgcaacaccagccacggctccatctgcaacatcgcccgcacaggaagaggagatggaggaagaagaagaagaggaggaaggagaagcaggagaagctggagaggctgaatcagagaagggaggcgaggagctgctgcctcccgagtccacacccatccctgccaatctgtcacagaacctcgaggcagcagccgctactcaggtggccgtcagtgtgcccaaacgtcggcgaaagatcaaagaactaaacaaaaaggaggctgttggcgacttgctggacgcattcaaggaggccaatcccgctgtgccagaggtcgagaatcagccccctgcaggtagtaaccctggccctgaatctgagggatctggcgtgccaccacggcctgaggaggccgatgagacttgggacagtaaggaggacaagatccataatgcagaaaacatccagcccggtgaacaaaagtatgagtacaaatcagatcagtggaaaccattaaacctcgaagagaagaaacgctatgaccgcgagttcttactggggttccagttcatcttcgcctcgatgcagaagcccgaaggcctaccccacataagcgatgtggtgcttgacaaggccaacaaaaccccattgagacctctggaccccactcgactgcaggggatcaattgcggcccagatttcacaccaagttttgctaacctgggcaggacaacactttcgactaggggaccaccaaggggcggacccggaggcgagctgcccagaggaccggctggcttaggcccaagacggtcacagcaggggcctcggaaagaacccaggaaaatcatagcgaccgtcctaatgaccgaagacattaaattgaacaaggcggaaaaagcatggaagccctccagcaagcgtaccgccgcagacaaagatcggggagaggaagacgctgacggctccaaaactcaggatttattcagacgcgtgaggagcatactgaataagcttacaccccagatgttccaacagcttatgaagcaggtcacccagctggcaatcgatacagaggaaaggctgaaaggggttatagacctgattttcgagaaggccatttcagagccaaacttctctgtggcttatgctaacatgtgccgttgcctgatggcactcaaggtgcccacaaccgaaaagcccactgtgaccgtgaatttccggaaactgctcttaaatcggtgtcagaaagaattcgaaaaggataaggacgatgacgaagtgtttgaaaagaagcagaaggaaatggatgaagctgctaccgctgaggaacggggaagactgaaagaggagcttgaggaagcacgtgacattgccaggcgtcgctcgctcggcaatatcaaattcatcggcgaactgttcaagctcaagatgttaaccgaagccataatgcatgactgtgtggtgaagctgctgaagaaccatgatgaagagagtctggagtgcctgtgtcgactgcttacaaccattgggaaggacttggattttgagaaagccaaacctcgaatggaccaatattttaatcagatggaaaaaataatcaaggaaaaaaagacctcatccagaattagatttatgttgcaggacgtgctggatctgcgtggatccaactgggtcccacgtcgaggagatcaaggccctaaaaccatagaccagatccataaggaggccgagatggaggagcatagggagcatatcaaggtccagcagcttatggccaaaggatcagataagaggcgcggaggaccacccggacctcccatctcccggggtctgcctcttgtggacgacgggggttggaatacagtgccaattagcaaaggtagccggccaatagacacctctagactcaccaaaatcacaaaacccggaagtattgattccaacaaccagttgtttgcccctggtgggcgattgtcatggggaaaaggctcttcagggggttctggtgcgaaaccctcagacgcagcgagtgaagctgctcgccctgccacttccacactgaacaggttttctgccctgcaacaggcagtgcccaccgagtcaactgataaccgccgagtcgtccagaggagcagcctgtcaagggagagaggtgaaaaagccggtgaccggggagaccggctcgagagatccgagcgagggggagatagaggagatcgtctcgatagagcaaggacgcccgcaacgaagcgctccttctctaaggaagtcgaggaaagaagccgcgaaagaccatcccagcctgaaggcttacgtaaggcagcaagcctgaccgaggacagggatagggggagggacgcggtgaagagggaagccgctctgcccccagtgagcccgttgaaggctgctctcagcgaagaggagctcgagaaaaagtcaaaggccatcattgaagagtatcttcatctgaacgacatgaaagaggccgtgcagtgtgtgcaggagctcgcttctccatcattgctgtttatttttgtgcgtcacggagtcgaatctaccctggaacgctccgcgatcgccagggagcatatggggcagctcttgcatcagttgctgtgcgctggtcacctgtccacggcccagtactaccaggggctctatgagattctagagctcgccgaggatatggagatagacataccccatgtatggctgtacttagccgagctcgtgactcccatattgcaagaaggaggagttcctatgggcgaactcttccgtgagattactaagcctctccggcctctgggcaaggcagcctctttgctcttggaaattttggggctattatgcaaaagcatgggcccaaagaaggttggaaccttgtggcgtgaggcgggtctgtcatggaaagagttccttcctgagggccaggatattggcgcttttgtcgctgaacagaaggtagagtacacactgggcgaggagtcagaagccccagggcaacgggcacttccatccgaggagctaaacagacagttggagaagttattgaaggaagggtcaagcaatcagcgggtgtttgactggatcgaggcaaatctcagcgaacagcagattgtcagcaatacgttggtcagagcgttgatgaccgccgtgtgctactcagccattatcttcgagacaccgctacgcgtggatgtggcagttctgaaagccagagccaaacttttacagaagtatctttgcgatgaacagaaggagctgcaggcgctctatgccctgcaagctttggttgtgaccttagagcagccgcctaacttgttgaggatgttctttgacgccctgtatgacgaagacgtagtgaaggaggacgccttttactcctgggaatcctccaaggatcctgctgagcagcagggtaaaggtgtggccctaaaatcggttacggcctttttcaaatggcttcgtgaggcagaggaagagagtgaccacaattag

SEQ ID NO: 109479 - DNA, 4680 bp, Artificial Sequence
  derived and/or modified sequence
atgaacactccctctcagccaagacagcacttttatccctctcgggctcaaccaccttcttcggcggctagtcgggtacaatcagcggctccagcaaggcccggaccggcagctcacgtgtacccagcagggtcacaggtcatgatgataccctcacagattagctatcccgcatctcaaggtgcgtactatatcccgggacaaggacggtccacatacgtggttcccacccaacaatatcccgtgcagcccggtgcccctggcttctacccaggagcgtcaccgacagagtttggaacgtatgctggcgcttactaccccgctcaaggagttcagcagtttcctactggagttgccccaacccctgttttgatgaatcaacctcctcaaatcgctcctaagcgcgaacgtaaaaccattaggatccgcgacccaaatcaagggggtaaggatattactgaagagattatgtccggcgctagaacggcgtccacccccaccccacctcagactggaggagggctggagccgcaggccaacggagagactccacaggtcgctgttattgtgaggcctgatgaccggagccagggtgcaattatcgctgaccggcctggcttacccggtcccgaacacagcccatcagagtcccagcccagcagtccaagccctacgcccagccctagccccgttctggaaccaggatctgaacccaatctggccgtcttgtccatccccggagatactatgaccacaatccagatgagtgtggaggagtccaccccaatctctcgggaaaccggcgaaccctacaggctaagtccagagccaacccccctggccgagcctatcctcgaagtagaggtgacgctgtccaagcctgtgccagaatcagaattctcttcttctccactgcaggcacctacccctctcgccagtcacaccgtcgagattcacgaacctaatgggatggttcctagcgaggatcttgagcctgaggtggagtcttcccccgaactggcccctcctccagcctgtccctctgaatctcccgtgcccattgctccaactgcgcaaccagaggagctgctgaacggtgctccatcccctcccgcagtagatttaagccccgtgtccgagccagaggagcaagcgaaagaagtgacagcatccatggcaccgccaaccattccctctgctacaccggctacagcacccagcgctacgtcccctgcccaggaagaggaaatggaagaggaggaggaggaggaagagggcgaggccggtgaggccggagaagccgagtctgagaagggaggggaggaactgctcccaccagagtccacgcccatccccgctaacctgtctcagaatctcgaggctgctgctgctacccaggtggccgtttcagtgcctaaaaggaggaggaagatcaaggaactgaacaaaaaggaagcagtcggtgacctgctggacgcctttaaagaggctaacccagccgtccccgaggtggagaaccaaccacccgcaggcagcaacccaggcccagaatccgaggggagcggcgtacctcccaggccagaggaggcggatgaaacttgggattcaaaagaggataaaatccacaacgccgagaacattcagcctggcgagcaaaagtacgagtataagagcgaccagtggaagcccctaaacctggaggagaagaagcgctacgaccgagagttcttattgggattccagttcatctttgcgtcaatgcaaaagcctgagggcctcccccacatttccgatgtggtcctggataaagctaataagactccacttcggccactggaccctactcgactgcagggtattaattgcggacctgactttaccccatctttcgccaatctcggaaggactaccttgagcactcggggtcctccacgtggaggacccggaggtgagctgccccgtggtcctgccggattgggaccacgcagaagccagcagggacccaggaaagagccaaggaaaattatcgccactgtgctgatgacagaggatatcaagctaaacaaggccgaaaaagcttggaaaccctcttctaagcgcacagcagccgataaagatagaggtgaagaggacgcggacggaagtaagacacaggatcttttccggagggtccgttcgatcctcaataaactgacaccacagatgtttcagcaactgatgaagcaagtgactcagctggccatcgatactgaggaacgcttgaagggagtgatagacctgatttttgagaaagcgatctctgaaccgaatttttcagtggcatatgcaaacatgtgtaggtgtctaatggcactcaaagtccctactacggagaagcccaccgtcactgttaatttccgaaagctactgctcaaccggtgtcagaaagaattcgaaaaagataaggatgatgatgaggtcttcgagaagaaacagaaagagatggatgaggccgcaacggccgaagagcgtggtcggctcaaggaggagctcgaggaggcccgtgacatcgccaggagacggagcctcggcaacattaaatttattggggagctctttaagctgaaaatgttaacggaggctattatgcatgactgcgtcgttaagttactgaagaaccacgacgaagaatcgctggaatgcctttgtaggcttttaacaaccattggaaaggacctagacttcgaaaaagccaaaccacgcatggatcagtacttcaatcagatggagaaaataatcaaggagaaaaagacatctagcaggatccggtttatgctgcaggatgttctcgacctcagaggatctaattgggtccctagaagaggtgatcaaggccctaagacgatagatcaaatccacaaggaagctgaaatggaggaacaccgcgagcatatcaaagtgcagcagctgatggcgaaaggtagtgataaaagacgcggagggcctcccggacccccaatctcgagaggacttccactggtggacgacggaggctggaataccgtgcccatcagcaaaggctcacgcccaattgatacttctcggctgacaaaaattacaaagccaggctctattgactccaataaccaactgttcgcacccggaggtcgcctgtcatggggcaagggctcatctggcggatccggggctaagccgagcgacgcggctagtgaagcggctcgccctgcaactagcacactcaatcgcttttcagcattgcaacaggcagtccccacagagagcactgataacagaagagtggtgcagcgctcttcattatctagggagcggggagaaaaggcaggagatcggggagacagactggaaagatctgaacgcggaggggaccggggagatcgtctggatagagctcgcacacccgcaaccaagagatccttttcaaaagaggttgaggagcgatcacgagagcgccctagtcagcctgagggactccggaaggctgcgtcactcactgaagaccgggaccgtgggagagatgccgtgaagcgggaggctgcactgcccccagtgtcgcccttaaaggccgctctctctgaggaagagttggaaaagaaaagcaaggctatcatcgaggaataccttcacctcaacgacatgaaggaagctgtccagtgtgttcaagagctcgcctcccccagcctcctatttatcttcgttcggcacggtgttgagagtactctcgagagatcagccattgctcgagagcatatgggacagctcctccaccagctactgtgcgccggacatcttagcactgctcagtattaccaagggctgtatgagattctcgaactcgccgaggatatggagatcgacattccacatgtgtggctatacctggcagaactggtcactcccatattacaggagggtggggtcccgatgggggaactatttagagagataactaagccactgcgccctttgggcaaggccgcatccttgcttcttgagatccttggactgctgtgcaagtctatgggccctaaaaaagtcggaacactctggagggaggcgggtttgtcctggaaggaattcctgcccgaagggcaggacataggtgcctttgttgcagagcagaaggtggaatatacacttggagaagaatcagaggctcctggccagagagctctaccatcagaagagttaaatcgtcagctggagaaactcctgaaagagggaagcagcaaccagcgcgtgttcgattggatcgaggcgaatttgtccgagcaacagatcgtgtcgaatactctggttagagcactgatgaccgctgtgtgttatagcgcaatcatctttgaaacccctctgcgggtggatgtggctgttctgaaagctagggcaaaactgctccaaaaatacttgtgcgacgaacaaaaagagcttcaggccctgtatgccctgcaagcgctggttgtaacactcgaacagcccccaaatctgctacgcatgttcttcgacgctctgtacgacgaggacgtggtgaaagaggacgccttttactcttgggaaagttcaaaggaccccgcagaacagcaggggaagggagtggccctgaagtcagtgaccgccttcttcaagtggctgagggaagccgaggaggagtcagatcacaactag

SEQ ID NO: 109480 - DNA, 4212 bp, Artificial Sequence
  derived and/or modified sequence
atgtccggggctaggacagcgtctacgccaaccccgcctcagacgggcggtggcctggaaccacaggcaaacggtgagaccccgcaggttgctgtcatcgtgcgccctgacgataggtctcagggtgctattatagccgataggccgggactccccggacccgaacactccccctcagagtcacagccctcatcgccaagcccgacaccctcgcccagtcctgttctcgagcccggatctgagcccaacttggctgtgctctccatccccggagacacaatgactactatccaaatgtcagttgaggaatccacccctatttcgcgcgaaaccggagaaccctataggctgtcacctgaacctactcccctggctgagcctatcctggaagtggaggtgactctgagcaagccagtccccgaatctgaatttagcagttccccgctgcaggctccaactccgttagcctcacacaccgtggaaattcatgagcctaacggaatggtccccagtgaagatctcgagcctgaggtggaatcatcacctgagctcgccccaccacctgcctgcccttcagaatcccccgtgccgattgctcccaccgcccagccggaagagttgcttaacggggcacctagtcctcccgctgttgatctatcaccagtaagcgaacctgaagagcaggctaaagaggttaccgcatcaatggctccccctacgattccatccgccacaccggcaactgccccaagcgctacctcgccagcccaggaagaagagatggaagaggaagaggaggaggaagagggagaggccggagaggctggggaagccgaatccgagaagggcggagaggaactccttcctcctgagtccacgcctatccccgctaatctcagccagaatttagaagctgccgcagccactcaggtggcagtctcagttccaaagcggaggaggaagataaaggaactgaataagaaggaggccgtcggtgacctacttgatgcatttaaggaagcaaacccggctgttcctgaagtggagaatcagccaccagctgggtccaatccaggccctgagtcagaagggtccggtgtaccccctcggccagaggaagccgatgagacatgggattcgaaggaggacaagatccacaatgccgagaatatccagccaggggaacagaaatacgaatacaaatcggatcagtggaaacccctcaacctggaggagaaaaaacggtacgaccgcgagtttctgctggggttccagtttatctttgcatcaatgcagaagccagaaggattgccccacataagcgatgtcgtgttagacaaggcgaacaagactcccctaaggcctctcgaccccacacggctgcaggggattaactgcggccctgacttcactccaagtttcgctaatttgggaaggacgacgctgagtactcggggtcctccgcgaggcggtccaggtggcgaactcccaaggggccctgcaggtctcgggccacgccgttctcagcagggtcccaggaaagagcccagaaagatcatagccactgtgctaatgactgaggatattaaactcaataaagcggaaaaagcatggaaaccaagttcgaagaggacggctgccgataaagaccggggtgaggaagatgccgacggtagcaaaacacaggaccttttccggagggtaagatcaattctaaacaagctgactcctcagatgttccagcagttaatgaaacaggtgactcagttggccattgataccgaagaaaggcttaaaggtgttatcgacctgattttcgagaaggccatctccgagcctaacttctcagtggcatatgcaaacatgtgtaggtgtctgatggctttgaaggtgccaaccacagaaaagccgacagtgacagtgaatttccgaaagttgttactgaaccgctgtcaaaaagagttcgagaaagataaggatgacgacgaggtgtttgagaaaaagcagaaggaaatggacgaagcagcaaccgctgaggagcgtggtcggctcaaagaagaactggaggaagcacgcgacatcgccagaagacgatccttgggcaacattaaattcatcggggaactttttaaactcaaaatgctgaccgaggccattatgcacgactgcgtagtgaaacttctaaaaaaccacgatgaggaatcactcgagtgcctgtgccggctgctcaccacaattggaaaggacctggactttgaaaaagctaagccaaggatggaccagtattttaatcaaatggaaaagatcatcaaagaaaagaagaccagctcacgaatcagatttatgcttcaagatgtactggacctcagagggagcaattgggtgcctcggaggggagatcaaggaccgaaaacaatcgaccagatccacaaggaggctgagatggaagagcacagagagcatatcaaagtccaacagctcatggccaaggggtccgataaaaggagaggcggacctccaggaccacccatatcccggggactgcctctagtggatgatggaggctggaacaccgtccccattagtaaagggtcgaggccgatagacactagtaggttaacgaagatcacaaagccaggaagcattgatagtaacaatcagttgttcgcccctggaggtcggctgagctggggaaaaggaagttcagggggatctggagctaaaccctcagacgctgcctccgaggctgccaggcctgctacatccacacttaataggttttcagccttacagcaggcagtgcccacggagagtacagacaaccgcagagtagtacagcggtcttcattatccagagaacggggagagaaagcaggggaccggggagacagactggagcggtcagagagaggcggagacaggggggacaggttagacagagcacggaccccagccactaaaagatccttctccaaggaggttgaggaacggagtagggagcgtcctagtcagcctgagggtcttcgaaaggccgctagtcttaccgaggatagagaccggggacgcgacgccgtcaagcgggaagctgctctgcctccagtctcacccttgaaggcggcactgtcggaggaagaactcgaaaaaaagtccaaagcgattattgaagaataccttcatctgaatgacatgaaggaagctgttcagtgtgtccaggaactggctagccctagcctgttgttcatctttgtccgtcacggtgtggaatctacccttgagcggtccgccatcgccagagagcatatgggccaactgctacatcagctgttgtgcgctgggcacctgagcacggctcagtactaccaggggctgtacgaaatactcgaactggccgaggacatggagattgatattcctcacgtgtggctgtatcttgccgaactggtaactcccatcttgcaggagggtggcgtgccaatgggcgagctttttcgcgaaatcaccaaacccctgaggcctctgggaaaggctgcctcactcttgctggaaattctggggttgctttgtaagagtatggggcctaagaaggtcggcactctctggagggaagctggacttagttggaaggaattcctaccggaaggccaggatatcggagcctttgtggcagagcagaaagtggaatacacattgggcgaggagtctgaagcccctgggcaacgcgctctgccctctgaggaactgaatcgtcagctagaaaagctgctgaaagagggctcgagtaaccaacgggtcttcgactggattgaggcaaacttatccgaacagcagatagtctccaacacgttggttcgggcactgatgaccgccgtgtgttactcggcaattattttcgagacacccctaagagtagacgttgctgtgttgaaagccagggctaaactcctgcagaaatatctgtgcgatgaacagaaggaactccaggcactgtacgcactgcaagcacttgttgtaacactggaacagccacctaacctcctcagaatgtttttcgacgctctgtacgatgaggacgtagtaaaagaagatgccttttatagttgggagtcctctaaagatcctgccgagcagcagggtaaaggcgttgccctcaaatcagtcacagcttttttcaagtggctcagggaggccgaagaggagagcgaccacaattag

SEQ ID NO: 109481 - DNA, 264 bp, Artificial Sequence
  derived and/or modified sequence
atgaacaccccctcccaaccacgccaacatttttatccttcccgagcccagccaccaagctctgcagctagtcgagttcaatcggcagcccctgccagaccaggcccagctgcccatgtttaccccgctggcagccaggtgatgatgattccaagccagataagttacccggcaagtcaaggtgcttactacatcccagggcagggtagatcgacctatgtagtgcctactcaacaatatcccgtgcagcctggcgctccctag

SEQ ID NO: 109482 - DNA, 2135 bp, Artificial Sequence
  derived and/or modified sequence
aatcctgcaacaagaagccaggtattctgaaggtgaaagataccagagattctcaaagatgcgagttttctgtgtgggactactccttttcagtgtgacctgggcagcaccaacatttcaaccacagactgagaaaactaagcaaagctgtgtggaagagcagagggctcctcaagcctctctactacaaaactctgggtcccagaatcttcctgatccccatcccatgcctcggcccacatctcgctctgcttcaggacctgtggctgcaggtgtgatactcatggacctcagcaggaagaaaaaaacaaagacaatattggttttcaccatttgggcaagagaataaatcaagagctatcatctaaagaaaatattgtccaggaaagaaagaaagatttgtccctttctgaagccagtgagaataagggaagtagtaaatctcaaaattatttcacaaatagacagagactgaataaagaatatagtatcagtaacaaagagaatactcacaatggcctgaggatgtcaatttatcctaagtcaactgggaataaagggtttgaggatggagatgatgctatcagcaaactacatgaccaagaagaatatggcgcagctctcatcagaaataacatgcaacatataatggggccagtgactgcgattaaactcctgggggaagaaaacaaagagaacacacctaggaatgttctaaacataatcccagcaagtatgaattatgctaaagcacactcgaaggataaaaagaagcctcaaagagattcccaagcccagaaaagtccagtaaaaagcaaaagcacccatcgtattcaacacaacattgactacctaaaacatctctcaaaagtcaaaaaaatccccagtgattttgaaggcagcggttatacagatcttcaagagagaggggacaatgatatatctcctttcagtggggacggccaaccttttaaggacattcctggtaaaggagaagctactggtcctgacctagaaggcaaagatattcaaacagggtttgcaggcccaagtgaagctgagagtactcatcttgacacaaaaaagccaggttataatgagatcccagagagagaagaaaatggtggaaataccattggaactagggatgaaactgcgaaagaggcagatgctgttgatgtcagccttgtagagggcagcaacgatatcatgggtagtaccaattttaaggagctccctggaagagaaggaaacagagtggatgctggcagccaaaatgctcaccaagggaaggttgagtttcattaccctcctgcaccctcaaaagagaaaagaaaagaaggcagtagtgatgcagctgaaagtaccaactataatgaaattcctaaaaatggcaaaggcagtaccagaaagggtgtagatcattctaataggaaccaagcaaccttaaatgaaaaacaaaggtttcctagtaagggcaaaagtcagggcctgcccattccttctcgtggtcttgataatgaaatcaaaaacgaaatggattcctttaatggccccagtcatgagaatataataacacatggcagaaaatatcattatgtaccccacagacaaaataattctacacggaataagggtatgccacaagggaaaggctcctggggtagacaaccccattccaacaggaggtttagttcccgtagaagggatgacagtagtgagtcatctgacagtggcagttcaagtgagagcgatggtgactagtccaccaggagttcccagcggggtgacagtctgaagacctcgtcacctgtgagttgatgtagaggagagccacctgacagctgaccaggtgaagagaggatagagtgaagaactgagtgagccaagaatcctggtctccttgggggaatttttgctatcttaatagtcacagtataaaattctattaaaggctataatgtttttaagcaaaaaaaaatcattacagatctatgaaataggtaacatttgagtaggtgtcatttaaaaatagttggtgaatgtcacaaatgccttctatgttgtttgctctgtagacatgaaaataaacaatatctctcgatgataatttgtattaagtaatctataagaaa

SEQ ID NO: 109483 - DNA, 2206 bp, Artificial Sequence
  derived and/or modified sequence
aatcctgcaacaagaagccaggtattctgaaggtgaaagataccagagattctcaaagatgcgagttttctgtgtgggactactccttttcagtgtgacctgggcagcaccaacatttcaaccacagactgagaaaactaagcaaagctgtgtggaagagcagaggataacatacaagggtcactatgagaaacatgggcattatgtttttaagtgtgtttacatgtcacctgagaagaaaaatcaaactgatgtaaaggctcctcaagcctctctactacaaaactctgggtcccagaatcttcctgatccccatcccatgcctcggcccacatctcgctctgcttcaggacctgtggctgcagcaggaagaaaaaaacaaagacaatattggttttcaccatttgggcaagagaataaatcaagagctatcatctaaagaaaatattgtccaggaaagaaagaaagatttgtccctttctgaagccagtgagaataagggaagtagtaaatctcaaaattatttcacaaatagacagagactgaataaagaatatagtatcagtaacaaagagaatactcacaatggcctgaggatgtcaatttatcctaagtcaactgggaataaagggtttgaggatggagatgatgctatcagcaaactacatgaccaagaagaatatggcgcagctctcatcagaaataacatgcaacatataatggggccagtgactgcgattaaactcctgggggaagaaaacaaagagaacacacctaggaatgttctaaacataatcccagcaagtatgaattatgctaaagcacactcgaaggataaaaagaagcctcaaagagattcccaagcccagaaaagtccagtaaaaagcaaaagcacccatcgtattcaacacaacattgactacctaaaacatctctcaaaagtcaaaaaaatccccagtgattttgaaggcagcggttatacagatcttcaagagagaggggacaatgatatatctcctttcagtggggacggccaaccttttaaggacattcctggtaaaggagaagctactggtcctgacctagaaggcaaagatattcaaacagggtttgcaggcccaagtgaagctgagagtactcatcttgacacaaaaaagccaggttataatgagatcccagagagagaagaaaatggtggaaataccattggaactagggatgaaactgcgaaagaggcagatgctgttgatgtcagccttgtagagggcagcaacgatatcatgggtagtaccaattttaaggagctccctggaagagaaggaaacagagtggatgctggcagccaaaatgctcaccaagggaaggttgagtttcattaccctcctgcaccctcaaaagagaaaagaaaagaaggcagtagtgatgcagctgaaagtaccaactataatgaaattcctaaaaatggcaaaggcagtaccagaaagggtgtagatcattctaataggaaccaagcaaccttaaatgaaaaacaaaggtttcctagtaagggcaaaagtcagggcctgcccattccttctcgtggtcttgataatgaaatcaaaaacgaaatggattcctttaatggccccagtcatgagaatataataacacatggcagaaaatatcattatgtaccccacagacaaaataattctacacggaataagggtatgccacaagggaaaggctcctggggtagacaaccccattccaacaggaggtttagttcccgtagaagggatgacagtagtgagtcatctgacagtggcagttcaagtgagagcgatggtgactagtccaccaggagttcccagcggggtgacagtctgaagacctcgtcacctgtgagttgatgtagaggagagccacctgacagctgaccaggtgaagagaggatagagtgaagaactgagtgagccaagaatcctggtctccttgggggaatttttgctatcttaatagtcacagtataaaattctattaaaggctataatgtttttaagcaaaaaaaaatcattacagatctatgaaataggtaacatttgagtaggtgtcatttaaaaatagttggtgaatgtcacaaatgccttctatgttgtttgctctgtagacatgaaaataaacaatatctctcgatgataatttgtattaagtaatctataagaaa

SEQ ID NO: 109484 - DNA, 1484 bp, Artificial Sequence
  derived and/or modified sequence
ggctggagcatgcagccagcagttcccttttgcaactcagttgccttggctaaggcccaaccagtcccaagtgctcaggacagaggctggacgggctccttcctgcacccctgctcttgggacacagtgccctccggctctaataggccaggagttgggggggcaactggctctgctccctggccctggctccccctgctccctggggctgcccgaggtgaaggtgacaggtgggggaggcaggtggagaattgggccagtgagctcatggcaaaggcgcccagctgggcaggggtgggtgctctggcctataaagcccccgaggccctgtggcctgcagaggcggttatggacggcaccatggaggactccgaggcggtgcagagggccacagcgctcatcgagcagcggctggcacaggaggaggagaatgagaaactccgaggagacgcacgccagaagctgcccatggacttgctggtgctggaggatgagaagcaccacggggctcagagtgcagccctgcagaaggtgaagggccaagagcgcgtgcgcaagacgtccctggacctgcggcgggagatcatcgatgtgggcgggatccagaacctcatcgagctgcggaagaaacgcaagcagaagaagcgggacgctctggccgcctcgcatgagccgcccccagagcccgaggagatcactggccctgtggatgaggagaccttcctgaaagctgcggtggaggggaaaatgaaggtcattgagaagttcctggctgacggggggtcagccgacacgtgcgaccagttccgtcggacagcactgcaccgagcttccctggaaggccacatggaaatcctggagaagcttctagataatggggccactgtggacttccaggatcggctggactgcacagccatgcattgggcctgccgcgggggccacttagaggtggtgaaacttctgcaaagccatggagcagacaccaatgtgagggataagctgctgagcaccccgctgcacgtggcagtccggacagggcaggtggagattgtggagcactttctatccctgggcctggaaatcaatgccagagacagggaaggggatactgccctgcatgacgctgtgaggctcaaccgctacaaaatcatcaaactgctgctcctgcatggggctgacatgatgaccaagaacctggcaggaaagaccccgacggacctggtgcagctctggcaggctgatacccggcacgccctggagcatcctgagccgggggctgagcataacgggctggaggggcctaatgatagtgggcgagagacccctcagcctgtgccagcccagtgaatgcgtgccccagcccagccagctacccagcccctctctgtgtgcagccggagggtcctaagaatggctcccggagctaactgagggcccagccttttttctgcatgatccaggagcacataccacaaactacc

SEQ ID NO: 109485 - DNA, 1451 bp, Artificial Sequence
  derived and/or modified sequence
aaccagtcccaagtgctcaggacagaggctggacgggctccttcctgcacccctgctcttgggacacagtgccctccggctctaataggccaggagttgggggggcaactggctctgctccctggccctggctccccctgctccctggggctgcccgaggtgaaggtgacaggtgggggaggcaggtggagaattgggccagtgagctcatggcaaaggcgcccagctgggcaggggtgggtgctctggcctataaagcccccgaggccctgtggcctgcagaggcggttatggacggcaccatggaggactccgaggcggtgcagagggccacagcgctcatcgagcagcggctggcacaggaggaggagaatgagaaactccgaggagacgcacgccagaagctgcccatggacttgctggtgctggaggatgagaagcaccacggggctcagagtgcagccctgcagaaggtgaagggccaagagcgcgtgcgcaagacgtccctggacctgcggcgggagatcatcgatgtgggcgggatccagaacctcatcgagctgcggaagaaacgcaagcagaagaagcgggacgctctggccgcctcgcatgagccgcccccagagcccgaggagatcactggccctgtggatgaggagaccttcctgaaagctgcggtggaggggaaaatgaaggtcattgagaagttcctggctgacggggggtcagccgacacgtgcgaccagttccgtcggacagcactgcaccgagcttccctggaaggccacatggaaatcctggagaagcttctagataatggggccactgtggacttccaggatcggctggactgcacagccatgcattgggcctgccgcgggggccacttagaggtggtgaaacttctgcaaagccatggagcagacaccaatgtgagggataagctgctgagcaccccgctgcacgtggcagtccggacagggcaggtggagattgtggagcactttctatccctgggcctggaaatcaatgccagagacagggaaggggatactgccctgcatgacgctgtgaggctcaaccgctacaaaatcatcaaactgctgctcctgcatggggctgacatgatgaccaagaacctggcaggaaagaccccgacggacctggtgcagctctggcaggctgatacccggcacgccctggagcatcctgagccgggggctgagcataacgggctggaggggcctaatgatagtgggcgagagacccctcagcctgtgccagcccagtgaatgcgtgccccagcccagccagctacccagcccctctctgtgtgcagccggagggtcctaagaatggctcccggagctaactgagggcccagccttttttctgcatgatccaggagcacataccacaaactaccacaataaaaaagctgtttttgctaa

SEQ ID NO: 109486 - DNA, 1385 bp, Artificial Sequence
  derived and/or modified sequence
ggctggagcatgcagccagcagttcccttttgcaactcagttgccttggctaaggcccaaccagtcccaagtgctcaggacagaggctggacgggctccttcctgcacccctgctcttgggacacagtgccctccggctctaataggccaggagttgggggggcaactggctctgctccctggccctggctccccctgctccctggggctgcccgaggtgaaggtgacaggtgggggaggcaggtggagaattgggccagtgagctcatggcaaaggcgcccagctgggcaggggtgggtgctctggcctataaagcccccgaggccctgtggcctgcagaggcggttatggacggcaccatggaggactccgaggcggtgcagagggccacagcgctcatcgagcagcggctggcacaggaggaggagaatgagaaactccgaggagacgcacgccagaagctgcccatggacttgctggtgctggaggatgagaagcaccacggggctcagagtgcagccctgcagaaggtgaagggccaagagcgcgtgcgcaagacgtccctggacctgcggcgggagatcatcgatgtgggcgggatccagaacctcatcgagctgcggaagaaacgcaagcagaagaagcgggacgctctggccgcctcgcatgagccgcccccagagcccgaggagatcactggccctgtggatgaggagaccttcctgaaagctgcggtggaggggaaaatgaaggtcattgagaagttcctggctgacggggggtcagccgacacgtgcgaccagttccgtcggacagcactgcaccgagcttccctggaaggccacatggaaatcctggagaagcttctagataatggggccactgtggacttccaggatcggctggactgcacagccatgcattgggcctgccgcgggggccacttagaggtggtgaaacttctgcaaagccatggagcagacaccaatgtgagggataaggaaggggatactgccctgcatgacgctgtgaggctcaaccgctacaaaatcatcaaactgctgctcctgcatggggctgacatgatgaccaagaacctggcaggaaagaccccgacggacctggtgcagctctggcaggctgatacccggcacgccctggagcatcctgagccgggggctgagcataacgggctggaggggcctaatgatagtgggcgagagacccctcagcctgtgccagcccagtgaatgcgtgccccagcccagccagctacccagcccctctctgtgtgcagccggagggtcctaagaatggctcccggagctaactgagggcccagccttttttctgcatgatccaggagcacataccacaaactacc

SEQ ID NO: 109487 - protein, 84 aa, Artificial Sequence
  derived and/or modified sequence
MTMTLHTKASGMALLHQIQGNELEPLNRPQLKIPLERPLGEVYLDSSKPAVYNYPEGAAYEFNAAAAANAQVYGQTGLPYGPGS

SEQ ID NO: 109488 - protein, 115 aa, Artificial Sequence
  derived and/or modified sequence
MTMTLHTKASGMALLHQIQGNELEPLNRPQLKIPLERPLGEVYLDSSKPAVYNYPEGAAYEFNAAAAANAQVYGQTGLPYGPGSEAAAFGSNGLGGFPPLNSVSPSPLMLLHPPP

SEQ ID NO: 109489 - DNA, 982 bp, Artificial Sequence
  derived and/or modified sequence
agaccttgaatcgaaacccaggctcctgcaggcactggcacagctacagcgagggcctcggccatccaagggtctcccagcagccttggaagtggagtttactctccccttgaggaagctgaaggtcagaaagggagagacgattgcctgaggtcacacagctgatggacagtagagctgggttatgaactcgaatgcatctgagcatacagggatgctgagaacttgctggagtcacagccactgggatcctttctcatcagggtcagtcacagccatgtgggctacacactctcctacaagtaaggcctgggccgggatccagggcaggggcaggtgggctcttgggtttccttggagggggcaaggggtgcttcatgtcatagcttctcagaaagcagcagtaactgaggctgtggatctgagaacgggagctgctagccaagcaatgagtgaagcttttgtccgtagtggcatgttttatctgaggccagcctttgtactcctgtgttataaatgggggaaactgaggcacagcgaggttagtaacctgctgggtgttgcatggccagtgagtgaagaagcctgcatgggaacctggggtagtctggctgtagcagtgacgctgccggcccaagggctggggacttggggcagggatgagggggagtaggatgtcccagcccccgcagtgtctccgcagagcccaaagcagctgctgccatttcatggtgaagctcttggatgatgggactttcatgatccccggggagaaggtggcccacacctcgctggacgccctggtcaccttccaccagcagaagccaattgagccgcgcagggagctgctgacacagccctgcaggcagaaggatcccgcaaacgtggattacgaggatctcttcctctactccaacgcagtggccgaggaagctgcctgcccggtgtctgcccctgaggagacggagtcttgctttgtcga

SEQ ID NO: 109490 - protein, 559 aa, Artificial Sequence
  derived and/or modified sequence
MAAKLRAHQVDVDPDFAPQSRPRSCTWPLPQPDLAGDEDGALGAGVAEGAEDCGPERRATAPAMAPAPPLGAEVGPLRKAKSSRRNAWGNLSYADLITKAIESAPDKRLTLSQIYDWMVRYVPYFKDKGDSNSSAGWKNSIRHNLSLHTRFIRVQNEGTGKSSWWMLNPEGGKTGKTPRRRAVSMDNGAKFLRIKGKASKKKQLQAPERSPDDSSPSAPAPGPVPAAAKWAASPASHASDDYEAWADFRGGGRPLLGEAAELEDDEALEALAPSSPLMYPSPASALSPALGSRCPGELPRLAELGGPLGLHGGGGAGLPEGLLDGAQDAYGPRARAQARPGAGCAGGAGAGGRSRRLPRQRGGPVRAARALAQCLSPPHQPYDAARRGGRRGPGTAGPRRRLRGPARRPPAGRSAGALRCRRRRAAGRRARPLPGRPGPRHVQREPRVRRGVHHPQRLHGQRRNGLQLRFGPASAAAGPGRGPAPQPELGAGLRAASRLRAPRPVPRGPLSSHPDSRVPAPDSSSPGGGPSPARDPSRRPAAGEGEGGAGAPHCSCPHS

SEQ ID NO: 109491 - DNA, 334 bp, Artificial Sequence
  derived and/or modified sequence
aatcgaaaaaataccgacctctaggttcttgtgagatctgttctaaaagcttggttagtagtgaggaatgtggacggtaaatcctgctgcctcgaaagctcggcagtcggactgcatgtaaatgcgcatgggggccatcccagtagctgcctcatctcagctatccctcacgtttcagggccggcggcggcccgcggaagccagatcccggagggtcccgcccccgacgccaatttagacggtgagggattcccgctccaggattcttatgctgacttaacggaccccctccggtcctcaaatacccgcccaaaaaaccctccccccaaattcc

SEQ ID NO: 109492 - DNA, 2398 bp, Artificial Sequence
  derived and/or modified sequence
ggcgggaccatggctgcgaagctgcgagcgcatcaggtggacgtggacccggacttcgcgccgcagagccggccgcgctcgtgtacctggcccctgccgcagcctgacttggccggcgacgaggacggagcgctgggcgcaggggtggccgagggcgccgaggactgcgggccggagcgccgggctacggccccggcgatggccccagcgccgcccctgggcgcggaggtcggaccgctgcggaaagcgaagagctctcggcggaacgcgtgggggaacctgtcctacgccgacctcatcaccaaagccatcgagagcgccccggacaagcggctcacgctctcgcagatctacgactggatggtccgttacgtgccctacttcaaggataaaggcgacagcaacagctcggccggctggaagaactccatccggcacaacctgtcgctgcacacccgtttcatccgcgtgcagaacgagggcaccggcaagagttcgtggtggatgctgaaccccgagggcggaaagacagggaagaccccgcggcgcagggccgtgtccatggacaacggggccaagttcctgcgcatcaagggcaaggcgagcaagaagaagcagctgcaggcgcccgagcgaagcccggacgacagctccccgagtgcgcccgccccggggccggtgcctgccgcagccaagtgggccgccagccccgcctcgcacgccagcgacgactacgaggcttgggccgacttccgcggcggcgggagacccctgctcggggaggcggccgagctggaggacgacgaggccctggaggccctggcgccatcatcgccgctcatgtacccaagccccgccagcgcgctgtcgccggcgctgggctcgcgctgtccgggtgagctgccccgcctggccgagctgggaggcccgctgggcctgcacggcggcggcggcgcggggctgcccgagggcctgctggacggcgcgcaggacgcgtacgggccgcgggcccgcgcccaggcccggcccggtgctgggtgcgccgggggagctggcgctggcgggcgcagccgccgcctaccccggcaaaggggcggccccgtacgcgccgcccgcgccctcgcgcagtgccttagcccaccccatcagccttatgacgctgcccggcgaggcgggcgccgcgggcctggcaccgccgggccacgccgccgccttcgggggcccgcccggcggcctcctgctggacgctctgccggggccctacgctgccgccgccgccgggccgctgggcgccgcgcccgaccgcttcccggccgacctggacctcgacatgttcagcgggagcctcgagtgcgacgtggagtccatcatcctcaacgacttcatggacagcgacgaaatggacttcaacttcgattcggccctgcctccgccgccgccgggcctggccggggccccgccccccaaccagagctgggtgccgggctgagggccgcctcccgcctccgggcgccccgtcccgtccccagggggcctctgtcttcccatcctgattcccgggtccctgcccccgactctagctccccaggaggcggccccagcccagctagggacccctctcggaggccggccgccggggaaggggagggaggggccggggcaccccactgctcctgcccacactcctgagatccacccccttctcctgggcaggaagcctgggagaggaggctgaattccaggctggctgggagtagggaggagcggggtgggccgcctggtgtggacggtggtcggggaagccaactaggagatgggccagggagcgtttacaaatcttcagtttcatttgcggaggcctagccgtgaccccgcgcccaccccaaacacggatctgattcccacttgacacactttcccactggtcttagtctcacccacccgaagccagcaaccctctgcggaaaactcacacctacctatatccatccaccctgagcagccctccacccccaaatcgccctccgacgaccgccacccccacagttcagtctccccctcccatccctgccggccctcgcttctcccctcccccgtcggagtcagtccctctcttcaaccgcccccaccccctagtactggtctcagcttctgcagcgggcctcagccccgtccacccccaaccccgacgcccctttctccgcgccagttctggcccttctcccatatttataagtgtccggccgggacgggcggtgggcgcggcgtccccggcgcgtatcgtaggcagtgtaccgtggccgtgccgtcagagtgtgcgtgtgcgtgtgtgccgtgtcgaggctgtgtagagtgcattgtacagcatattttcatgaataaaattgttttaaatatt

SEQ ID NO: 109493 - DNA, 1680 bp, Artificial Sequence
  derived and/or modified sequence
atggccgctaagttacgcgcgcatcaagtggacgtcgatcccgactttgccccacagtcgcgacctcggtcatgtacttggcctctgcctcagcccgatctcgccggcgatgaagatggggccctgggtgctggggtcgccgaaggggcagaggattgcgggccggagaggcgtgccacagcacccgcaatggcccccgcccccccactcggcgcagaggtagggcctttgaggaaagccaaatcaagtcggaggaacgcgtggggtaacttgagttacgccgacctgatcactaaagcaatcgaaagcgcaccagacaaacgcttgaccctctcccagatttacgactggatggtgcggtacgttccatacttcaaagataagggtgatagtaattcatccgctggatggaagaactcaattaggcacaatctgtccctgcacaccagattcattcgtgttcagaatgagggtaccggaaagagctcctggtggatgctgaacccagaggggggtaagacagggaaaactcctagacgcagagccgtgtccatggataacggagcaaaattcctgcgtatcaagggcaaggcgtccaagaaaaaacaattgcaggcacctgagaggagcccggacgacagttccccctcagcgccagccccaggtccagtgccagccgccgctaagtgggccgcctcacccgcctctcacgcttctgacgattatgaggcttgggctgactttagggggggcggccgccccctcctgggcgaggctgccgaattagaagatgacgaggcactggaagctttggccccctctagcccccttatgtacccaagcccggcttctgccctttcccctgccctaggcagccgctgtccgggcgagctccccagactggccgagctcgggggcccactgggccttcacgggggaggcggtgcaggactcccagaggggcttctggatggcgcccaggacgcttatggcccgagagcccgcgcccaggcccgcccaggtgccggctgcgccggaggggccggggccgggggtcgaagccgaagactccccaggcagagaggggggcctgtacgcgctgcaagggccttggctcagtgcctttcaccgcctcaccagccctatgacgctgctaggcggggcggaagacgtggacccggcacagcggggcctaggagaagactgcgcggaccggctcgaagaccacccgctggaagaagcgccggcgcactgcggtgccggcgacgcagggccgccggccgccgtgcgcgtccgcttccagggaggcctggacctcggcacgtgcagcgtgagccccgggtgcgtcgtggtgttcaccatccccagcggctgcacggacagcggcgaaacggcctgcagctccggtttggccccgcaagtgccgcagcagggcccggacggggacctgcaccccagcccgagttaggtgccggcctcagagcagcatccaggctcagagcccccaggcctgtcccgcgcgggcccctttcctcacacccagatagtcgggttcctgctcctgattctagttctccaggtggagggccttccccggcacgagatcccagccgccgccccgccgccggggaaggcgaaggcggagctggggcccctcactgctcttgtcctcatagctag

SEQ ID NO: 109494 - DNA, 1680 bp, Artificial Sequence
  derived and/or modified sequence
atggccgccaagctgcgggcccaccaggtggatgtggaccctgactttgccccccagagccggcccaggagctgcacctggcccctgccccagcctgacctggccggagatgaagatggagccctgggcgctggggtggccgagggcgctgaggactgtggccctgagcggcgggccacagccccagccatggccccagccccacccctgggcgctgaggtgggccccctgaggaaggccaagagcagcagaagaaatgcctggggcaacctgtcctatgctgacctgatcaccaaggccattgaaagtgccccagacaagaggctgaccctgagccagatctatgactggatggtgcgctacgtgccctacttcaaggacaagggggacagcaacagcagcgctggctggaagaacagcatccgccacaacctgagcctgcacacccgcttcatccgggtgcagaatgaaggaacaggcaagagctcctggtggatgctgaaccctgagggcggcaagacaggcaagaccccaagaagaagagctgtgtccatggacaatggagccaagttcctgcgcatcaagggcaaggccagcaagaagaagcagctgcaggcccctgagaggagcccagatgacagcagccccagcgccccagcccctggccctgtgcctgctgctgccaagtgggccgccagccctgccagccacgccagtgatgattatgaggcctgggccgacttccggggcggcggccggcccctgctgggggaggccgctgagctggaggatgatgaggccctggaggccctggcccccagcagccccctgatgtaccccagccctgccagcgccctgagccctgccctgggcagccgctgccctggagagctgccccggctggccgagctgggcggccccctgggcctgcatggaggcggcggggccggcctgcctgagggcctgctggatggagcccaggatgcctacggcccccgggcccgggcccaggcccggcctggggccggctgtgccggcggggccggggccggcggccgcagccggcggctgccccggcagaggggcggccctgtgcgggccgcccgggccctggcccagtgcctgagccccccccaccagccctatgatgctgcccggcggggcggccggcggggccctggaacagctggcccccggcggcggctgcggggccctgcccggcggcccccagctggccgctctgctggggccctgcgctgcagaagaagaagagctgctggccggcgggcccggcccctgcccggccggcccggccccaggcatgtgcagcgggagccccgggtgagaagaggagtgcaccacccccagaggctgcacggccagaggagaaatggcctgcagctgcgcttcggccctgccagcgctgctgctggccctggccggggccctgccccccagcctgagctgggcgccggcctgcgggccgccagccggctgcgggcccccaggcctgtgccccggggccccctgagcagccacccagacagccgggtgcctgccccagacagcagcagccctgggggcggccccagccctgcccgggaccccagccggcggcctgctgctggggagggggagggcggggccggggccccccactgcagctgcccccacagctag

SEQ ID NO: 109495 - DNA, 1680 bp, Artificial Sequence
  derived and/or modified sequence
atggccgccaagctgcgggcccaccaggtggacgtggaccccgacttcgcacctcaatccagaccaaggtcctgcacgtggccccttccgcagcctgacctggccggtgacgaggatggggcacttggcgccggagtggccgagggggcggaagactgcggtcccgaaaggcgcgcaacagccccagcaatggccccggcaccaccccttggggctgaggtgggccccctcagaaaagctaaatcttctaggcgaaatgcctggggcaatctatcatatgccgacttaatcactaaggcaattgagtctgcccccgataaacggttgaccctgtcgcaaatttatgactggatggtgagatacgtgccatacttcaaagacaaaggggattcaaacagttctgcaggatggaagaactctattagacacaacctgagccttcacacaaggttcatccgcgtccagaatgaaggtaccggtaagtcaagctggtggatgcttaaccccgaggggggcaaaactgggaagaccccacgaaggcgggccgtatctatggacaatggcgcaaagttcttgcgtataaaaggaaaagccagcaaaaagaagcagcttcaagcccccgaacggagcccagacgactcatctccctccgctcccgctcccggccccgtgccagccgcagccaaatgggccgcctctcccgcctcgcacgccagtgatgactacgaggcctgggcagatttccgggggggggggcggcccctcttgggggaggccgctgagcttgaagatgacgaagcccttgaagccctggcccctagcagtccattgatgtacccatctccagcatccgcactgtcccccgcattgggctcaaggtgtcctggcgagcttccacgactcgcagagctggggggccctctgggactccacggcggcggcggcgctggcctgccagaaggtctgctcgacggtgctcaggacgcttatggaccccgcgctcgagcacaggctcggccaggcgcaggatgtgcggggggcgcaggcgccgggggccgcagtcgacgtctcccccggcagagaggcgggcccgttcgggctgcacgagcgctggcccaatgcctatctccgccccatcagccttacgatgccgcaagaaggggcggtaggagggggcccgggacagcagggcctcgcaggaggctccgcggcccagcaagacgacctccagctggtagatcagcaggcgccctacggtgccgcagaaggagagccgctggacggcgagcaaggccactgcccggaaggcctggaccccgacatgtgcagagagagccacgcgtgcgcaggggcgtgcatcacccacaacgactgcatggccagcggcggaatgggttgcaattacgctttggccctgcatctgccgcggccggccccggaaggggtcctgcccctcagccagagctgggcgccggactccgagctgcctcacggctgagggcgccacgccctgttcctagaggccctttgtctagccatcccgattccagggtccccgcccccgactctagctcccctggcggaggcccctccccagctcgtgaccctagccgcaggccagccgccggcgaaggagagggcggggccggtgctcctcactgttcttgtcctcacagctag

SEQ ID NO: 109496 - DNA, 1680 bp, Artificial Sequence
  derived and/or modified sequence
atggccgcaaaacttagagcccaccaggtcgatgtggaccccgactttgcaccccaaagtaggccccgatcctgtacatggcccctgcctcaaccagacttggcgggtgatgaggacggtgccctgggcgctggggtggcagagggagctgaagattgtggtcccgagagaagagcaacagcgccagctatggccccagctccacccctgggagcagaggtgggtcccctgaggaaagcaaaaagctcgaggcggaacgcctggggtaatctgtcatacgctgatctgataactaaggctatagagagcgccccagataagcgacttacactgtcccaaatctacgactggatggtccgctacgttccatattttaaagacaagggtgactcgaactcctcggcagggtggaagaattcaatccgacacaacctttctcttcacaccagatttatccgggttcaaaatgaggggacgggcaaatcatcatggtggatgctgaatccggaaggagggaagaccgggaagacgccacggcgacgcgcagtgagtatggataatggcgctaaatttttgagaatcaaaggaaaggccagcaagaagaagcagttgcaagcaccagagcgcagcccagacgactccagcccgagtgcaccagcgcctggtcccgtgcctgccgctgccaaatgggctgccagtccagcaagccacgcatctgacgactacgaagcctgggctgacttcaggggcggaggtcgtcccctgctcggcgaggcagcagaactcgaggatgacgaagccttagaagccctggcaccatcttctcccctcatgtacccttctccggcaagcgcgctatccccagctctaggctcgcgttgcccaggcgagctgccgaggctggcagaactaggcggacctctggggctgcacggcggaggtggtgccggtcttcctgagggtcttctcgacggtgcacaggacgcttacgggccacgggctagagcgcaagcgcgaccaggggcaggatgcgctggcggtgcgggagccggaggcaggtcccggaggcttcctcgacaacgaggcggacctgtaagagccgcaagagccctcgcccagtgtcttagccctccccaccagccttatgatgctgcaaggaggggcggacgcagaggcccaggaaccgctggtcctagaagacgcctccgcggaccagccaggagacctcctgccggacggtctgcaggtgccctgagatgtagacgccgtcgcgctgccggacggagggccagaccgctcccgggtcgtccagggccacgccatgtgcagcgtgaacccagagtgaggcgaggggtgcatcacccacagcgccttcacggccagagaaggaacggcctgcaactccggttcggaccagcatccgctgcagccggacccggacgaggtcccgcacctcaacctgagctgggcgcaggactccgagccgcaagtcgactacgcgcaccgagacctgtaccgagaggcccactttcatctcaccccgattcacgggtgccggcacctgactctagctcccccggagggggaccaagtcctgctagggatcccagtaggcgacctgccgcaggcgagggagagggtggcgcaggcgctccccattgttcatgcccccactcttag

SEQ ID NO: 109497 - DNA, 1680 bp, Artificial Sequence
  derived and/or modified sequence
atggccgccaagctgagagcccaccaggtggacgtggaccccgacttcgccccccagagcagacccagaagctgcacctggcccctgccccagcccgacctggccggcgacgaggacggcgccctgggcgccggcgtggccgagggcgccgaggactgcggccccgagagaagagccaccgcccccgccatggcccccgccccccccctgggcgccgaggtgggccccctgagaaaggccaagagcagcagaagaaacgcctggggcaacctgagctacgccgacctgatcaccaaggccatcgagagcgcccccgacaagagactgaccctgagccagatctacgactggatggtgagatacgtgccctacttcaaggacaagggcgacagcaacagcagcgccggctggaagaacagcatcagacacaacctgagcctgcacaccagattcatcagagtgcagaacgagggcaccggcaagagcagctggtggatgctgaaccccgagggcggcaagaccggcaagacccccagaagaagagccgtgagcatggacaacggcgccaagttcctgagaatcaagggcaaggccagcaagaagaagcagctgcaggcccccgagagaagccccgacgacagcagccccagcgcccccgcccccggccccgtgcccgccgccgccaagtgggccgccagccccgccagccacgccagcgacgactacgaggcctgggccgacttcagaggcggcggcagacccctgctgggcgaggccgccgagctggaggacgacgaggccctggaggccctggcccccagcagccccctgatgtaccccagccccgccagcgccctgagccccgccctgggcagcagatgccccggcgagctgcccagactggccgagctgggcggccccctgggcctgcacggcggcggcggcgccggcctgcccgagggcctgctggacggcgcccaggacgcctacggccccagagccagagcccaggccagacccggcgccggctgcgccggcggcgccggcgccggcggcagaagcagaagactgcccagacagagaggcggccccgtgagagccgccagagccctggcccagtgcctgagccccccccaccagccctacgacgccgccagaagaggcggcagaagaggccccggcaccgccggccccagaagaagactgagaggccccgccagaagaccccccgccggcagaagcgccggcgccctgagatgcagaagaagaagagccgccggcagaagagccagacccctgcccggcagacccggccccagacacgtgcagagagagcccagagtgagaagaggcgtgcaccacccccagagactgcacggccagagaagaaacggcctgcagctgagattcggccccgccagcgccgccgccggccccggcagaggccccgccccccagcccgagctgggcgccggcctgagagccgccagcagactgagagcccccagacccgtgcccagaggccccctgagcagccaccccgacagcagagtgcccgcccccgacagcagcagccccggcggcggccccagccccgccagagaccccagcagaagacccgccgccggcgagggcgagggcggcgccggcgccccccactgcagctgcccccacagctag

SEQ ID NO: 109498 - protein, 222 aa, Artificial Sequence
  derived and/or modified sequence
MALSAETESHIYRALRTASGAAAHLVALGFTIFVAVLARPGSSLFSWHPVLMSLAFSFLMTEALLVFSPESSLLHSLSRKGRARCHWVLQLLALLCALLGLGLVILHKEQLGKAHLVTRHGQAGLLAVLWAGLQCSGGVGLLYPKLLPRWPLAKLKLYHATSGLVGYLLGSASLLLGMCSLWFTASVTGAAWYLAVLCPVLTSLVIMNQVSNAYLYRKRIQP

SEQ ID NO: 109499 - DNA, 669 bp, Artificial Sequence
  derived and/or modified sequence
atggccctgagcgccgagaccgagagccacatctacagagccctgagaaccgccagcggcgccgccgcccacctggtggccctgggcttcaccatcttcgtggccgtgctggccagacccggcagcagcctgttcagctggcaccccgtgctgatgagcctggccttcagcttcctgatgaccgaggccctgctggtgttcagccccgagagcagcctgctgcacagcctgagcagaaagggcagagccagatgccactgggtgctgcagctgctggccctgctgtgcgccctgctgggcctgggcctggtgatcctgcacaaggagcagctgggcaaggcccacctggtgaccagacacggccaggccggcctgctggccgtgctgtgggccggcctgcagtgcagcggcggcgtgggcctgctgtaccccaagctgctgcccagatggcccctggccaagctgaagctgtaccacgccaccagcggcctggtgggctacctgctgggcagcgccagcctgctgctgggcatgtgcagcctgtggttcaccgccagcgtgaccggcgccgcctggtacctggccgtgctgtgccccgtgctgaccagcctggtgatcatgaaccaggtgagcaacgcctacctgtacagaaagagaatccagccctag

SEQ ID NO: 109500 - DNA, 669 bp, Artificial Sequence
  derived and/or modified sequence
atggccttaagcgccgagaccgagtcccatatttacagagccttgaggactgctagcggagccgccgctcatctggtggctttgggctttacgatttttgtcgccgtgctggccagaccgggatctagcctgttctcctggcacccagtcctaatgagcctggccttctccttcctcatgacagaagccttactggtgttctcccccgagtcctcattgctgcacagcttgtctcgcaaggggcgcgctagatgtcattgggtgcttcaactgttggcgttgttgtgcgccctgttgggtctgggacttgtaattcttcacaaggagcaattaggaaaagctcatctcgtaaccaggcatggtcaggcaggtttgctggctgtcctctgggcagggctgcaatgtagtggaggtgtggggttactctatccaaagcttctaccacggtggcccctggcaaagctcaaactttaccacgccacctcaggcctggtaggctatcttttaggttccgctagcttactgctcgggatgtgtagtctatggttcactgcatccgtgacaggtgcagcctggtatcttgctgttctgtgccccgttctcacatccctggtgattatgaaccaagtgtccaacgcctacctgtaccggaagcggattcagccctag

SEQ ID NO: 109501 - DNA, 669 bp, Artificial Sequence
  derived and/or modified sequence
atggccctgtctgctgagacagagagccacatctaccgggccctgaggacagccagcggggccgccgcccacctggtggccctgggcttcaccatctttgtggccgtgctggcccggcccggcagcagcctcttctcctggcaccctgtgctgatgagcctggccttctccttcctgatgacagaggccctgctggtgttcagccctgagagcagcctgctgcacagcctgagcaggaagggccgggcccgctgccactgggtgctgcagctgctggccctgctgtgtgccctgctgggcctgggcctggtgatcctgcacaaggagcagctgggcaaggcccacctggtgaccaggcatggccaggccggcctgctggccgtgctgtgggccggcctgcagtgcagcggcggcgtgggcctgctgtaccccaagctgctgccccgctggcccctggccaagctgaagctgtaccacgccaccagcggcctggtgggctacctgctgggcagcgccagcctgctgctgggcatgtgcagcctgtggttcaccgcctctgtgactggagctgcctggtacctggccgtgctgtgccctgtgctgaccagcctggtgatcatgaaccaggtgtccaatgcctacctgtacaggaagaggatccagccctag

SEQ ID NO: 109502 - DNA, 669 bp, Artificial Sequence
  derived and/or modified sequence
atggccctgagcgccgagaccgagagccacatctaccgggccctgcggacagcttcaggcgctgctgctcacctggtggccttgggcttcaccatctttgttgctgtgctagctagacctggcagttccctcttctcatggcatccggtgctcatgagccttgccttttcttttctcatgacagaagctctgcttgtattttcacccgagagctccctattgcatagcctctccaggaagggcagggcaagatgccactgggttcttcagctacttgccctattatgcgctttgttaggtctggggctggtaatactgcacaaggaacagttgggaaaggctcatctggtgacaaggcatggacaggctggactcctagccgtactgtgggcaggacttcaatgctccggcggcgtggggctcctatatccaaagttgctgccccggtggcccctggccaaactcaagctttatcacgcgacttctggcctcgtcggataccttctaggctcggcttccctgctgctcggaatgtgcagtctatggttcaccgcatctgtgaccggcgccgcctggtatcttgccgtcctgtgtcccgttctcaccagtttagtgattatgaatcaagtgagtaacgcctatttgtatagaaaacgcatccagccttag

SEQ ID NO: 109503 - DNA, 669 bp, Artificial Sequence
  derived and/or modified sequence
atggcactgtcggcagagacagaatcccatatctaccgagccctgcgcaccgcttctggggcagccgctcacctggtcgctctcggttttactatctttgtcgccgtcctggcgaggccaggcagcagcttattctcgtggcaccctgtgctcatgtcactggctttctccttcctgatgactgaggctttgctggtctttagcccagaatccagcttgcttcactcactgtccaggaaaggacgggctcggtgtcactgggtcctacagttgttggcactgctgtgtgccttgctggggctgggactggtgatcctacataaggagcagttggggaaagcccatctcgtgacgcggcacggtcaggccggattgctcgcagtactttgggcgggacttcagtgcagcggcggagtggggttattataccctaagctgctccctcgttggccccttgcgaagttaaagctgtaccatgccacctctggcctcgtgggctatttacttggaagcgcgagcctgctgctggggatgtgttcactatggttcactgcttctgtgactggcgcagcctggtatcttgccgtgctatgcccagtgctgaccagtctcgttatcatgaaccaggtgtctaatgcctacctttatcgaaagagaatccaaccatag

SEQ ID NO: 109504 - DNA, 669 bp, Artificial Sequence
  derived and/or modified sequence
atggctttgagcgccgaaaccgaatctcatatttatagggccttgcgaacagcgagcggggctgctgcccacctggtggccctaggctttaccatatttgtcgcggtcctggccaggcccgggagttctctcttctcctggcacccggtcctcatgagcttggccttctcctttctcatgaccgaggctctcttggtttttagcccggaatcgagtctgcttcacagcctaagtcgtaagggaagggcacgatgccattgggtattacaattgttggctttgttgtgcgctctactgggattagggctagtgatcctgcacaaagagcagttaggaaaagcacatctcgtcacaaggcatggccaagccggactgctcgccgtactgtgggcaggcctccagtgttccgggggtgttggtctcttgtaccctaagctgctgcctaggtggcccttggcgaaacttaaactgtaccatgccacctctggcttggtgggctatctgttgggtagcgcaagtcttctcctgggcatgtgttctctatggttcaccgcgtcagtgaccggcgcggcctggtacttggcagtcctgtgccccgtcctcacttccttggtcatcatgaatcaggtgagtaacgcctatctatacagaaagcggatccaaccttag

SEQ ID NO: 109505 - DNA, 669 bp, Artificial Sequence
  derived and/or modified sequence
atggcactatccgcagaaaccgaaagtcatatttatcgagctctgagaaccgcctcaggcgcagctgcacatttggtggctctcggttttactatttttgtagctgtgttagcaagaccagggtcttcactcttctcttggcaccccgtgcttatgtctttggcattttcattcctcatgacggaggccctgcttgtgttttcccctgaaagctccctgctccactcactctccaggaaaggtcgtgctagatgtcactgggtcctccagttactcgcactcctctgtgcacttctcggcctgggattggtgatcctgcacaaagagcagctcggcaaagcccatctagtcacacgccacggccaggccgggcttttggctgtgctttgggctggcctgcaatgcagcgggggggtaggcctcttgtaccctaaactgctgccgcggtggcccttagctaaactcaagctgtaccacgccacgagcggtttggtgggctacctcctgggttctgccagcttgctactgggcatgtgttccctgtggtttactgcctccgtaacaggcgccgcatggtacctggccgttctctgcccagtgttgactagccttgttatcatgaaccaggttagcaacgcctacctatatagaaagaggattcagccatag

SEQ ID NO: 109506 - DNA, 669 bp, Artificial Sequence
  derived and/or modified sequence
atggcactgagcgccgagacggaatctcatatataccgcgcactgcgaacggcatccggcgccgctgctcacttggtcgccctgggcttcactatttttgtggccgtcttagccaggcccggcagtagtctgtttagttggcaccccgtgctgatgagcctggccttctcctttctcatgacggaggccctgctcgtgttttcgcccgagtcctcccttctgcattctttgtctaggaaagggcgtgccagatgccactgggtgctgcaactcttagcgctgttgtgcgctttgctgggattgggtctggttatcctccacaaggaacagttaggcaaggcccatctcgtgacgcggcacggtcaggctggtctgttggcagtgctctgggctggcctccagtgtagtggtggggtgggactcctctatcctaagttgttgccacgatggccactcgccaaactgaaactttatcacgctactagtggcttggtcggctatctactgggaagcgccagcttactccttggcatgtgtagcctgtggtttaccgcttctgtcacaggggccgcctggtacttagcagtgttgtgcccagttctgacatcactggtcattatgaaccaggtgagtaatgcatacctgtatcgcaaacgcattcagccatag

SEQ ID NO: 109507 - DNA, 669 bp, Artificial Sequence
  derived and/or modified sequence
atggccctgagcgccgagaccgagagccacatctaccgggccctgcgcaccgcctcaggtgccgccgcccacttggtggctcttggctttactatcttcgtggcagtcctcgccaggcctgggtccagtctcttttcttggcaccccgtgttgatgagcctcgcgttttccttcctgatgaccgaagcactgcttgttttcagcccagagtcttccctgctccactcactgagccggaaaggccgagccagatgtcactgggtcctccaattgttggccctcttgtgcgccctactgggactgggtctggtgatcctccacaaagaacagttgggaaaagcccatctggtcacgaggcacggccaagcggggttactggccgtgctgtgggcgggtctgcaatgctccggcggtgtgggactcctgtacccaaagctgcttccccgatggcccctcgccaaactgaagttgtatcatgccacatccgggctagtcggataccttctgggatctgcgtcactcttacttggtatgtgtagtctctggttcacagcctctgtcacaggggcagcgtggtatctcgcggtcctttgcccggtactgactagtctggttataatgaatcaggttagcaacgcctatctgtaccgtaaaagaatccaaccttag

SEQ ID NO: 109508 - DNA, 669 bp, Artificial Sequence
  derived and/or modified sequence
atggccctgagcgccgagaccgagagccacatctaccgggccctgcggaccgcctcgggggccgcagcccatctcgttgctctcgggtttaccattttcgtggccgtattggctcgccccgggtcctctttattctcgtggcaccccgtgctaatgtccctggctttctctttcctaatgactgaggcacttctggtattttcccccgagagtagcctcctgcacagcctcagccgaaaaggtagggctcgttgtcattgggtcctacagctattggctcttctttgcgccctactgggcctgggccttgtgatcctacataaagaacaactcggcaaggcccatctagttactaggcatgggcaggcaggtctgctagcagtgctgtgggcaggtcttcaatgtagcggtggggtcggccttctgtaccctaaactgctccctcggtggcccttggcaaaacttaagttgtatcacgccacctccggcctggtggggtatcttctggggagcgctagcctactgctggggatgtgtagcctatggtttactgcatccgtgaccggcgctgcttggtacctggctgtgctttgcccggtgctaacaagtctggttataatgaatcaggtgtccaacgcatacctgtatcggaaaaggatccagccctag

SEQ ID NO: 109509 - DNA, 669 bp, Artificial Sequence
  derived and/or modified sequence
atggccctgagcgccgagaccgagagccacatctaccgggccctgcgcactgctagcggcgccgcggcacacttagtcgcccttgggtttaccatctttgtggccgtactcgcacgaccggggagcagcttgttctcctggcacccagttctgatgagcctggccttctccttcctgatgacagaagccctcctagtgtttagtccagaatccagtcttctgcatagcttgagccgaaaggggagagcccgatgccactgggtccttcaactcctcgccctgttatgcgcacttcttggcctgggcttggtaattctgcacaaagagcagctaggcaaggcccacctggttaccaggcatgggcaggccggattgctggcagtgctttgggccggattacagtgctcaggcggtgttgggctcctctatcccaagctacttccaaggtggccgctggctaagcttaaactctatcacgccacatccgggctcgttggatacttgttgggctctgcttctctcctgcttgggatgtgctcgctttggtttaccgccagcgtgactggagctgcttggtacctggccgttctgtgtcccgtgctcacatccctggttataatgaatcaggttagcaatgcctacctctatagaaagcgcatccaaccatag

SEQ ID NO: 109510 - DNA, 669 bp, Artificial Sequence
  derived and/or modified sequence
atggccctttcagccgagaccgagagccacatttaccgagctctgcggaccgctagcggggcagctgcacaccttgtcgctctggggttcactattttcgtagccgtgctggcccgaccagggagtagcctgttctcgtggcatccggtcctgatgtctctggcattcagcttcctcatgaccgaggccttgcttgtttttagtcccgaaagctcactcctgcactccctatctcgaaagggccgtgccagatgtcactgggtcctacaattgttggccctcctgtgcgccctcctcggtctcggactagttatcctgcacaaggaacagctgggtaaggctcatttggttacaagacatggccaggctgggctgctggctgtactgtgggcaggtctgcaatgcagcgggggagtcgggctcctctacccaaaattactgccgaggtggcctttggctaaactgaaattgtatcacgccacatcaggactggtcggctacttgctgggctccgcaagtctgctccttggaatgtgctccctctggtttactgcgtccgtgactggtgccgcttggtatcttgcggtgctgtgtccggtgttaactagtctggtgattatgaatcaagtcagtaatgcctatttgtacaggaagcggattcagccatag

SEQ ID NO: 109511 - DNA, 669 bp, Artificial Sequence
  derived and/or modified sequence
atggctcttagtgccgaaacagagtcccacatctaccgcgctttaaggacggcctccggagccgctgctcacctggtggctcttggattcaccatttttgtggccgtacttgcacgtcccggttcttctctgttttcctggcatccagtgctaatgtccctggccttttctttcctcatgactgaggctctgctggtgttttcgccggagtcttcgctcttacactcattgtcgcgcaagggccgtgctcggtgtcattgggtcctccagcttctggctctactgtgcgcactgcttggccttgggctcgtaatcctgcataaagagcagctcggcaaagcgcaccttgtaacacgccatgggcaagccggtttgctggcggtgctatgggcgggtctgcaatgttctggtggcgtgggattactgtacccaaagctcttgccacggtggcccctggccaaactgaagctttaccacgctaccagcgggctggtaggatacctgctggggtctgccagcctgctgctcggcatgtgtagcctgtggtttaccgcttcagttaccggtgctgcctggtatttggcagtcttgtgtccagtgctgaccagcctggtcataatgaaccaggtgtcaaatgcttatctgtaccggaagcgcattcaaccatag

SEQ ID NO: 109512 - DNA, 669 bp, Artificial Sequence
  derived and/or modified sequence
atggcgctaagcgccgaaaccgagtcacatatctaccgggctctgcgcactgctagcggcgctgcagcccacctggttgctctcggcttcacaatcttcgttgccgttctcgccagacctggctctagcttattctcatggcacccggtgctgatgagcctcgcgttttcgttcctgatgaccgaagctctcctggttttctcaccagaatcaagcctgctccacagcttatcacgcaaagggcgagcaaggtgtcactgggtactacagctgctggctttgctgtgcgcacttctgggcctgggtctagtgatcttgcacaaagaacagctcggaaaagcccacttggtgactcgccatgggcaagctgggctcttggccgtcctatgggctggtctgcaatgttctggcggagtcggcttactttatccaaagcttcttccacgttggcccctcgctaaactgaagctctaccacgcaacgtctggcctcgttggctatctgttggggagtgcttccctgctgcttggaatgtgcagtctatggtttaccgccagcgtaacgggagctgcgtggtatttggccgtcctctgccctgtcctgacatctctggtcatcatgaaccaggttagtaatgcttatctgtaccgcaagcgaatccagccatag

SEQ ID NO: 109513 - DNA, 1225 bp, Artificial Sequence
  derived and/or modified sequence
ggaagtcctgggtgggtagacgtcgcacccggaagtaaagcggctccgtgacggagcggcggtgcgcgcggcagggcccggagtatcccgctttctttggaggaaaccaccgcatcagatctgcgctgcggcagaggcagccttttctccagtgaggagtgaacagtgggcacctgagatcctggcccacgctactatgctttcaggctacaaccactagcacggctgacgatggccctttctgcggagaccgagtcacacatctaccgagctctgcgtactgcttctggcgctgccgcccaccttgtggccctgggctttaccatctttgtggctgtgcttgccaggcctggctccagcctgttctcctggcacccggtgcttatgtctttggctttctccttcctgatgaccgaggcactactggtgttttctcctgagagttcgctgctgcactccctctcacggaaaggccgagcacgctgccactgggtgctgcagctgctggccctgctgtgtgcactgctgggcctcggccttgtcatcctccacaaagagcagcttggcaaagcccacctggttacgcggcatgggcaggcagggctgctggctgtgctgtgggcagggctgcagtgctcaggtggggtggggctgctctaccccaagctgctgccccgatggcccctggcgaagctcaagctataccatgctacttctgggctggtgggctacctgctgggtagtgccagcctcttgctgggcatgtgctcactctggttcactgcctctgtcactggtgcagcctggtacctggctgtattatgccctgtcctcaccagcttggtcattatgaaccaggtgagcaatgcctacctataccgcaagaggatccaaccatgagctcttcccagcctaggggaagcctggatttgcccctccatgtaggagctgggcctagggacctgttgaactctctcagctgagtcaggggacacctcaggcactgggacagttgggcatttggaggcccgtgtgtgaattcctgctcctcatgctggagtgcctcccatttccttcccctttctctgtcatcccagaggaacataggcatcatgtgtctggatgaagctggggctgcaagactgcctctcctgcaaggcagctcatacttgtactgtatgttcagaaattttaggagagaaaaaagtaaaaaatttgtaaaaaa

SEQ ID NO: 109514 - DNA, 1533 bp, Artificial Sequence
  derived and/or modified sequence
gggtagacgtcgcacccggaagtaaagcggctccgtgacggagcggcggtgcgcgcggcagggcccggagtatcccgctttctttggaggaaaccaccgcatcagatctgcgctgcggcagaggcaggcaagtccctagcgtggaggggcagcatgctggcagcacttggggaggcggtgcgctaagggattcacgctgtaactgggaccgcagcagggaactacaatttccatagtgctccgcgccctcccagctggctctactgccggcgacggcgtggtacacgctgggatttgtagtcttacatggctttgcgcctcctacctggaaggcgggccagcgattggtaccagttcagacatgggtacacgttgacaggccgccggccgtcgactggcatgttgtgaccattcctggtgctggtcttggtactgttctttcctaccataacttattggaagagggtggcattcctgccttgcagccttttctccagtgaggagtgaacagtgggcacctgagatcctggcccacgctactatgctttcaggctacaaccactagcacggctgacgatggccctttctgcggagaccgagtcacacatctaccgagctctgcgtactgcttctggcgctgccgcccaccttgtggccctgggctttaccatctttgtggctgtgcttgccaggcctggctccagcctgttctcctggcacccggtgcttatgtctttggctttctccttcctgatgaccgaggcactactggtgttttctcctgagagttcgctgctgcactccctctcacggaaaggccgagcacgctgccactgggtgctgcagctgctggccctgctgtgtgcactgctgggcctcggccttgtcatcctccacaaagagcagcttggcaaagcccacctggttacgcggcatgggcaggcagggctgctggctgtgctgtgggcagggctgcagtgctcaggtggggtggggctgctctaccccaagctgctgccccgatggcccctggcgaagctcaagctataccatgctacttctgggctggtgggctacctgctgggtagtgccagcctcttgctgggcatgtgctcactctggttcactgcctctgtcactggtgcagcctggtacctggctgtattatgccctgtcctcaccagcttggtcattatgaaccaggtgagcaatgcctacctataccgcaagaggatccaaccatgagctcttcccagcctaggggaagcctggatttgcccctccatgtaggagctgggcctagggacctgttgaactctctcagctgagtcaggggacacctcaggcactgggacagttgggcatttggaggcccgtgtgtgaattcctgctcctcatgctggagtgcctcccatttccttcccctttctctgtcatcccagaggaacataggcatcatgtgtctggatgaagctggggctgcaagactgcctctcctgcaaggcagctcatacttgtactgtatgttcagaa

SEQ ID NO: 109515 - DNA, 1212 bp, Artificial Sequence
  derived and/or modified sequence
ggaagtcctgggtgggtagacgtcgcacccggaagtaaagcggctccgtgacggagcggcggtgcgcgcggcagggcccggagtatcccgctttctttggaggaaaccaccgcatcagatctgcgctgcggcagaggcaggcaaccttttctccagtgaggagtgaacagtgggcacctgagatcctggcccacgctactatgctttcaggctacaaccactagcacggctgacgatggccctttctgcggagaccgagtcacacatctaccgagctctgcgtactgcttctggcgctgccgcccaccttgtggccctgggctttaccatctttgtggctgtgcttgccaggcctggctccagcctgttctcctggcacccggtgcttatgtctttggctttctccttcctgatgaccgaggcactactggtgttttctcctgagagttcgctgctgcactccctctcacggaaaggccgagcacgctgccactgggtgctgcagctgctggccctgctgtgtgcactgctgggcctcggccttgtcatcctccacaaagagcagcttggcaaagcccacctggttacgcggcatgggcaggcagggctgctggctgtgctgtgggcagggctgcagtgctcaggtggggtggggctgctctaccccaagctgctgccccgatggcccctggcgaagctcaagctataccatgctacttctgggctggtgggctacctgctgggtagtgccagcctcttgctgggcatgtgctcactctggttcactgcctctgtcactggtgcagcctggtacctggctgtattatgccctgtcctcaccagcttggtcattatgaaccaggtgagcaatgcctacctataccgcaagaggatccaaccatgagctcttcccagcctaggggaagcctggatttgcccctccatgtaggagctgggcctagggacctgttgaactctctcagctgagtcaggggacacctcaggcactgggacagttgggcatttggaggcccgtgtgtgaattcctgctcctcatgctggagtgcctcccatttccttcccctttctctgtcatcccagaggaacataggcatcatgtgtctggatgaagctggggctgcaagactgcctctcctgcaaggcagctcatacttgtactgtatgttcagaaattttaggagagaaaaaagt

SEQ ID NO: 109516 - DNA, 1309 bp, Artificial Sequence
  derived and/or modified sequence
cagaggcgtccccacctcctgtgaacacttgtcagagacagcctcgaggcctgtgtcgctggggcacgcaagcttgccaatccctctgcccaatggcgcctgcgcagcgcgactcagaggcgtggctggggcgggggacggctcgtcccaggaagtcctgggtgggtagacgtcgcacccggaagtaaagcggctccgtgacggagcggcggtgcgcgcggcagggcccggagtatcccgctttctttggaggaaaccaccgcatcagatctgcgctgcggcagaggcaggctacaaccactagcacggctgacgatggccctttctgcggagaccgagtcacacatctaccgagctctgcgtactgcttctggcgctgccgcccaccttgtggccctgggctttaccatctttgtggctgtgcttgccaggcctggctccagcctgttctcctggcacccggtgcttatgtctttggctttctccttcctgatgaccgaggcactactggtgttttctcctgagagttcgctgctgcactccctctcacggaaaggccgagcacgctgccactgggtgctgcagctgctggccctgctgtgtgcactgctgggcctcggccttgtcatcctccacaaagagcagcttggcaaagcccacctggttacgcggcatgggcaggcagggctgctggctgtgctgtgggcagggctgcagtgctcaggtggggtggggctgctctaccccaagctgctgccccgatggcccctggcgaagctcaagctataccatgctacttctgggctggtgggctacctgctgggtagtgccagcctcttgctgggcatgtgctcactctggttcactgcctctgtcactggtgcagcctggtacctggctgtattatgccctgtcctcaccagcttggtcattatgaaccaggtgagcaatgcctacctataccgcaagaggatccaaccatgagctcttcccagcctaggggaagcctggatttgcccctccatgtaggagctgggcctagggacctgttgaactctctcagctgagtcaggggacacctcaggcactgggacagttgggcatttggaggcccgtgtgtgaattcctgctcctcatgctggagtgcctcccatttccttcccctttctctgtcatcccagaggaacataggcatcatgtgtctggatgaagctggggctgcaagactgcctctcctgcaaggcagctcatacttgtactgtatgttcagaaattttaggagagaaaaaagtaaaaaatttgtaaaaaa

SEQ ID NO: 109517 - DNA, 591 bp, Artificial Sequence
  derived and/or modified sequence
atgtggagcgtgctgcaggacggccccatcagcagagtgatcgtgttcagcctgagcgccgccaaggagaccaaggacagacccctgcaggacgagtacagcgtgctggtggccagcatgctggagcccgccgtggtgtacagagacctgctgaacagaggcctggaggaccagctgctgctgcccggcagcgaccagttcgacagcgtgctgtgcagcctggtgaccgacgtggacctggacggcagacccgaggtgctggtggccacctacggccaggagctgctgtgctacaagtacagaggccccgagagcggcctgcccgaggcccagcacggcttccacctgctgtggcagagaagcttcagcagccccctgctggccatggcccacgtggacctgaccggcgacggcctgcaggagctggccgtggtgagcctgaagggcgtgcacatcctgcagcacagcctgatccaggccagcgagctggtgctgaccagactgagacaccaggtggagcagagaagaagaagactgcagggcctggaggacggcgccggcgccggccccgccgagaacgccgccagctag

SEQ ID NO: 109518 - DNA, 591 bp, Artificial Sequence
  derived and/or modified sequence
atgtggtcagttttgcaggacggtcccattagtcgggttattgtattttctcttagcgccgccaaagaaaccaaagatcggccacttcaagatgaatattccgtcctggtggctagcatgctcgaacccgccgtcgtgtatcgcgacctgctgaatcgggggctggaggatcagctgcttctaccagggtcggatcagttcgactcggtgctctgctcattggtgaccgacgtggatttagacgggcgacccgaagtgctggtagctacctacggacaggagcttttatgttataagtaccggggccccgagtccggactgcccgaggctcaacatggctttcacctactgtggcagagatccttttcctctccgctactggccatggctcacgtcgacctcaccggagatggactccaggagctagcagtagtgagtttgaaaggcgtgcacatcctgcagcatagccttatccaagcatcagaattggtgctgacaaggctgcgacaccaggtagagcaaagacgcaggagattgcaggggctcgaagacggggcaggagctgggccggctgaaaatgccgcctcatag

SEQ ID NO: 109519 - DNA, 591 bp, Artificial Sequence
  derived and/or modified sequence
atgtggagcgtgctgcaggacggccccatcagcagggtcatcgtgttcagcctgtctgctgccaaggagaccaaggaccggcccctgcaggatgagtacagcgtgctggtggcctccatgctggagcctgctgtggtgtacagagacctgctgaacagaggcctggaggaccagctgctgctgcccggcagtgaccagtttgattctgtgctgtgcagcctggtgacagatgtggacctggatggccggcctgaggtgctggtggccacctacggccaggagctgctgtgctacaagtaccggggccctgagagcggcctgcctgaggcccagcacggcttccacctgctgtggcagaggagcttcagcagccccctgctggccatggcccacgtggacctgactggagatggcctgcaggagctggccgtggtgtccctgaagggcgtgcacatcctgcagcacagcctcatccaggccagcgagctggtgctgacccggctgcggcaccaggtggagcagaggagaagaaggctgcagggcctggaggatggagctggggccggccctgcagaaaatgctgccagctag

SEQ ID NO: 109520 - DNA, 591 bp, Artificial Sequence
  derived and/or modified sequence
atgtggagcgtgctgcaggacggccccatcagccgggtgatcgtgttttctctctcagcagccaaagaaacaaaagatcggcctctgcaggacgaatactccgtgttggtcgcatccatgcttgaaccagcggtagtgtatcgtgatctcctgaatcggggattagaggaccagctgttgctgccaggatccgaccagttcgactccgttttatgtagtcttgtgacggacgtcgacctagatggcaggccggaggtccttgtagcaacctacggtcaagagctcctatgctacaaatacagggggcccgagagcgggttgccagaggcccagcatggctttcatttgttatggcagcggtcattcagctcaccccttttagccatggcccacgtggacctgaccggggacggcttgcaggagctggccgtggtgtcattaaagggggttcatatcctccagcactccttgatccaggcctccgagctggtgctcactcggctaaggcaccaagtggagcagcgtaggcgtaggctacagggcctggaagatggagctggggccggccccgccgaaaacgctgccagctag

SEQ ID NO: 109521 - DNA, 591 bp, Artificial Sequence
  derived and/or modified sequence
atgtggtctgtattgcaagacggcccaatttctcgggtgatcgtgttctccctatcggcagccaaagagacaaaagatagacctctccaagacgagtattccgtgctggtagcctccatgctcgagcctgccgtagtttatcgagaccttctgaacagaggacttgaggaccaactgttgctaccgggaagcgaccagttcgatagtgtgctctgctctctcgtgacagacgtagacctagatgggagaccagaggttctggttgccacttacggacaggagctgttgtgttataagtatcgcggtcctgagagcggtctgcccgaggctcaacatggatttcatctgctgtggcagagaagcttctcgtcccctctgcttgctatggctcacgtggatcttacaggtgatggattgcaggagttggctgtcgttagcttaaaaggagtacacatactgcaacattctctgatccaagcttctgaattggtgctgacgcgcttgcgccatcaagtcgagcagcggcgacgcaggctgcagggtctggaagatggagccggagctgggccagccgaaaatgctgcaagttag

SEQ ID NO: 109522 - protein, 234 aa, Artificial Sequence
  derived and/or modified sequence
MLDGRQRRGSNAPTSDMPGTTLNRYGRTWPRWGWLWTPTGGALRKRKVKAMEVDIEERPKELVRKPYVLNDLEAEASLPEKKGNTLSRDLIDYVRYMVENHGEDYKAMAVMRRITIKIPQNRFGVRSTSINAFTQQSGKTSSILCRRGRWRWSDWFTSQLPQAEASPGPVKLEPGCKARRCCVAPEELARSHGIRRLHVHTPRSGEGTVLRGSNLYSSGGSRKSQNLLFSGWVM

SEQ ID NO: 109523 - DNA, 705 bp, Artificial Sequence
  derived and/or modified sequence
atgctggacggccggcagcggcggggcagcaatgcccctacgtcggatatgccaggtactacactcaaccgctacggacggacgtggccccgctggggctggctgtggacaccaacaggcggcgcactacgaaaaagaaaggtgaaggccatggaggtggacatcgaagagcgccctaaggagctcgttagaaagccatacgtgctgaacgacctagaggcagaggcttccctgccggagaagaaaggaaacacgctttcaagagacctcattgactacgtccgatacatggtagagaaccacggtgaagattacaaggcaatggctgtgatgaggcgaattactatcaaaatcccacagaatcgatttggcgtgcgttctacaagcattaatgccttcacacagcagagcggtaaaaccagctctatactgtgtcgcaggggcagatggcgatggtccgattggttcactagtcagctgccacaggccgaggcctcccccggtcccgtgaagctagagcctgggtgcaaagcgcgcagatgctgcgttgctccggaggagctggcccgatcacacggcatacggcgtctgcatgtgcacacacccagatctggagaggggacggtcctacgcgggagcaatttgtatagctctggtggcagccgtaaatcacagaacctgcttttctcgggctgggtgatgtag

SEQ ID NO: 109524 - DNA, 1200 bp, Artificial Sequence
  derived and/or modified sequence
cttgaaactctctggattcctgtaaacagtggggctcagcccctcaatgactggaggcttcgatggttcaaaggggacctccggaatcacagggccgggagtcgccatgtccgggccacagcagcaggagaaaatcgggactccgacctcagcctcccggtgaaggtcatgaaaggggcggggaaacgaataaattgagccttgtacgcaggcgcaaatgctcgttgcatcctgggagtcgtagtgctcagcacggtagtgctacaaaaggactacatttccccaaatgcccgcaaagccttgtgcacgccttccggaaggagtttgttacacgaggtctgagagacagaggcagcgtgtttgagctgctggtgcggtggtcagcgcgatgcccaaggccaagggcaaaacccggaggcagaagtttggttacagtgtcaaccgaaagcgtctgaaccggaatgctcgacggaaggcagcgccgcggatcgaatgctcccacatccgacatgcctgggaccacgctaaatcggtacggcagaacctggccgagatggggttggctgtggaccccaacaggcggtgccctccgtaagagaaaggtgaaggccatggaggtggacatagaggagaggcctaaagagcttgtacggaagccctatgtgctgaatgacctggaggcagaagccagccttccagaaaagaaaggaaatactctgtctcgggacctcattgactatgtacgctacatggtagagaaccacggggaggactataaggccatggccgtgatgagaagaattactatcaagataccccaaaacagattcggagtaagatcaacgtctataaacgcttttacccagcagagtggcaagacttcctcgattctttgcagaagaggaagatggaggtggagtgactggtttacatcacagctgccccaggctgaggcgtcccccggaccagtgaagctggagccagggtgtaaggcaaggaggtgctgtgtggctccagaggagctggccaggtcccatggaatcagaaggttacacgtgcacactccccgctctggggaaggaactgttctcagaggctccaatttatattcatctgggggttcacggaaaagccagaacctgctgttttcagggtgggtgatgtaaatatagtgtgtacataataaagcaaatatatttt

SEQ ID NO: 109525 - DNA, 705 bp, Artificial Sequence
  derived and/or modified sequence
atgctggatggccggcagaggcggggcagcaatgcccccaccagtgacatgcctggcaccaccctgaacagatatggccgcacctggccccgctggggctggctgtggacccccactggaggagccctgaggaagaggaaggtgaaggccatggaggtggacatcgaggagcggcccaaggagctggtgaggaagccctacgtgctgaatgacctggaggccgaggccagcctgcctgagaagaagggcaacaccctgagccgggacctgattgattatgtgcgctacatggtggagaaccacggggaggactacaaggccatggctgtgatgaggcgcatcaccatcaagatcccccagaacagatttggagtgcgcagcaccagcatcaatgccttcacccagcagagcggcaagaccagcagcatcctgtgccggcggggccgctggcgctggagcgactggttcaccagccagctgccccaggccgaggccagccctggccctgtgaagctggagcccggctgcaaggcccggcgctgctgcgtggcccctgaggagctggcccggagccacggcatccggcggctgcacgtgcacacccccaggtctggagagggcaccgtgctgcggggcagcaacctgtacagcagcggcggcagcaggaagagccagaacctgctcttcagcggctgggtgatgtag

SEQ ID NO: 109526 - DNA, 705 bp, Artificial Sequence
  derived and/or modified sequence
atgctggacggccggcagcggcggggcagcaacgcccccaccagcgatatgcctggcactaccctgaataggtatggcaggacttggccgagatggggctggctttggacacctactggcggtgctctgaggaagcggaaggttaaggctatggaggtcgatattgaggagcgccccaaggaacttgtcaggaagccctatgttttaaatgacctggaagccgaggcctctctccctgaaaagaagggcaataccttgagtagggatctcattgattacgttcgctacatggtagagaaccacggtgaagactataaggccatggccgtgatgagaaggataacaattaaaatcccacaaaaccgcttcggcgtacggtctacgtctattaacgccttcactcaacagtctggaaagacgagctcaatcctgtgccgtcggggacggtggcgctggagcgactggtttactagtcagctgcctcaagccgaggccagccccggtccagtcaagcttgaacccggatgtaaagctcggaggtgctgcgtggcccccgaggagctggcacggtcccacgggatacgtcgcctgcacgtccacacaccacgttccggtgagggcaccgtgcttaggggtagcaatctgtacagttcaggggggagccggaagagtcagaacctcctgttcagcggctgggtgatgtag

SEQ ID NO: 109527 - DNA, 705 bp, Artificial Sequence
  derived and/or modified sequence
atgctggacggacgacaacgcaggggctcaaatgctcctacaagcgacatgccgggaactacgctcaaccgctatggccgaacttggcctaggtggggctggctttggaccccgacgggcggtgctctgcggaaacggaaagtcaaagccatggaagttgatatcgaggagcgcccaaaggagctagtgcggaagccttatgtgctgaacgaccttgaagcagaggcgtcactgcccgagaaaaaaggtaataccctcagccgagatctgatagactatgtccgctatatggtggaaaatcacggcgaagattacaaggccatggccgtgatgcgaaggatcaccatcaaaatcccacagaacagatttggtgttcgaagtacgtccattaacgctttcacacagcaaagcggaaaaacttccagcatcctatgccgccgtggcagatggcgatggtccgattggttcacctctcagctacctcaggcagaagcttccccgggtcccgtcaagcttgagcctggctgtaaagccaggagatgctgcgtagcaccagaagagttggcacggtcccacgggatcaggagactccacgtgcacactccacgcagtggcgaggggaccgtgctgcggggatccaacttgtacagctctggcggaagccgtaagtctcagaacttattattctccggctgggttatgtag

SEQ ID NO: 109528 - DNA, 705 bp, Artificial Sequence
  derived and/or modified sequence
atgctggacggcagacagagaagaggcagcaacgcccccaccagcgacatgcccggcaccaccctgaacagatacggcagaacctggcccagatggggctggctgtggacccccaccggcggcgccctgagaaagagaaaggtgaaggccatggaggtggacatcgaggagagacccaaggagctggtgagaaagccctacgtgctgaacgacctggaggccgaggccagcctgcccgagaagaagggcaacaccctgagcagagacctgatcgactacgtgagatacatggtggagaaccacggcgaggactacaaggccatggccgtgatgagaagaatcaccatcaagatcccccagaacagattcggcgtgagaagcaccagcatcaacgccttcacccagcagagcggcaagaccagcagcatcctgtgcagaagaggcagatggagatggagcgactggttcaccagccagctgccccaggccgaggccagccccggccccgtgaagctggagcccggctgcaaggccagaagatgctgcgtggcccccgaggagctggccagaagccacggcatcagaagactgcacgtgcacacccccagaagcggcgagggcaccgtgctgagaggcagcaacctgtacagcagcggcggcagcagaaagagccagaacctgctgttcagcggctgggtgatgtag

SEQ ID NO: 109529 - DNA, 930 bp, Artificial Sequence
  derived and/or modified sequence
tcaagcttttggaccctcgtacagaagctaatacgactcactatagggaaataagagagaaaagaagagtaagaagaaatataagagccaccatggtgagcaagggcgaggagctgttcaccggggtggtgcccatcctggtcgagctggacggcgacgtaaacggccacaagttcagcgtgtccggcgagggcgagggcgatgccacctacggcaagctgaccctgaagttcatctgcaccaccggcaagctgcccgtgccctggcccaccctcgtgaccaccctgacctacggcgtgcagtgcttcagccgctaccccgaccacatgaagcagcacgacttcttcaagtccgccatgcccgaaggctacgtccaggagcgcaccatcttcttcaaggacgacggcaactacaagacccgcgccgaggtgaagttcgagggcgacaccctggtgaaccgcatcgagctgaagggcatcgacttcaaggaggacggcaacatcctggggcacaagctggagtacaactacaacagccacaacgtctatatcatggccgacaagcagaagaacggcatcaaggtgaacttcaagatccgccacaacatcgaggacggcagcgtgcagctcgccgaccactaccagcagaacacccccatcggcgacggccccgtgctgctgcccgacaaccactacctgagcacccagtccgccctgagcaaagaccccaacgagaagcgcgatcacatggtcctgctggagttcgtgaccgccgccgggatcactctcggcatggacgagctgtacaagtaagctgccttctgcggggcttgccttctggccatgcccttcttctctcccttgcacctgtacctcttggtctttgaataaagcctgagtaggaaggcggccgctcgagcatgcatctaga

SEQ ID NO: 109530 - DNA, 902 bp, Artificial Sequence
  derived and/or modified sequence
taatacgactcactatagggaaataagagagaaaagaagagtaagaagaaatataagagccaccatggtgagcaagggcgaggagctgttcaccggggtggtgcccatcctggtcgagctggacggcgacgtaaacggccacaagttcagcgtgtccggcgagggcgagggcgatgccacctacggcaagctgaccctgaagttcatctgcaccaccggcaagctgcccgtgccctggcccaccctcgtgaccaccctgacctacggcgtgcagtgcttcagccgctaccccgaccacatgaagcagcacgacttcttcaagtccgccatgcccgaaggctacgtccaggagcgcaccatcttcttcaaggacgacggcaactacaagacccgcgccgaggtgaagttcgagggcgacaccctggtgaaccgcatcgagctgaagggcatcgacttcaaggaggacggcaacatcctggggcacaagctggagtacaactacaacagccacaacgtctatatcatggccgacaagcagaagaacggcatcaaggtgaacttcaagatccgccacaacatcgaggacggcagcgtgcagctcgccgaccactaccagcagaacacccccatcggcgacggccccgtgctgctgcccgacaaccactacctgagcacccagtccgccctgagcaaagaccccaacgagaagcgcgatcacatggtcctgctggagttcgtgaccgccgccgggatcactctcggcatggacgagctgtacaagtaagctgccttctgcggggcttgccttctggccatgcccttcttctctcccttgcacctgtacctcttggtctttgaataaagcctgagtaggaaggcggccgctcgagcatgcatctaga

SEQ ID NO: 109531 - DNA, 501 bp, Artificial Sequence
  derived and/or modified sequence
atgctgcttatccttcttagcgttgcccttctggccttctctagcgcccaggatctaaacgaagacgtaagtcaggaggacgttcccttggtaattagcgacggcggagactcagaacagttcctcgatgaggaaaggcaaggacctccactgggcgggcagcagtcgcagcctagcgctggagacggcaaccaggacgacggacctcagcagggccctcctcaacagggaggtcagcagcagcaggggcctccacctccacagggaaagccccaagggcccccccagcaaggagggcacccgcctcctcctcagggtcgaccccaggggcccccccaacagggaggccaccctcgccccccgcgaggcaggccgcagggcccaccacagcagggcggtcaccaacagggccccccccctccaccacctggcaagcctcagggccccccgccacaggggggacggccgcaggggccaccccaggggcagtccccacagtag

SEQ ID NO: 109532 - DNA, 501 bp, Artificial Sequence
  derived and/or modified sequence
atgctgctgatcctgctgtctgtggccctgctggccttcagcagcgcccaggacctgaatgaagatgtgtcccaggaggatgtgcccctggtgatcagtgatggaggagacagcgagcagttcctggatgaggagcggcagggcccccccctgggcggccagcagagccagcccagcgctggagatggcaaccaggatgatggcccccagcagggccccccccagcagggcggccagcagcagcagggccccccaccaccccagggcaagccccagggccccccccagcagggcggccaccccccaccaccccagggccggccccagggccccccccagcagggcggccacccccggcccccccggggccggccccagggccccccccagcagggcggccaccagcagggccccccacctcctcctcctgggaagccccagggccccccaccccagggcggccggccccagggccccccccagggccagagcccccagtag

SEQ ID NO: 109533 - DNA, 501 bp, Artificial Sequence
  derived and/or modified sequence
atgctgctgatcctgctgagcgtggccctgctggccttcagcagcgcccaggacctgaacgaggacgtttcccaggaagacgtgcctcttgtgatcagtgacggcggtgacagcgagcagttcctcgacgaagagcgacagggtcctcctctggggggacaacagagtcagccctcagccggggacggaaatcaggatgacggaccacaacaaggtcccccacaacagggaggtcagcaacaacagggccctcctccacctcaggggaagccccaaggccccccacagcaagggggtcatcccccaccacctcagggaagaccccaggggcctcctcagcaggggggccatccacgtccgcccaggggaagacctcagggtccaccccagcaaggcgggcaccaacaaggtcccccccccccacctcctggtaaaccacagggacctcccccgcagggcggacgaccccaggggcctccacagggccaatccccccagtag

SEQ ID NO: 109534 - DNA, 501 bp, Artificial Sequence
  derived and/or modified sequence
atgttactgattctgctctcggtggccctgctggcgttttccagtgcccaggatctaaacgaggatgtcagccaagaggatgttccgctagtgatttcagacggcggtgacagtgagcagttcctagatgaagagcggcagggccctccgcttggtgggcagcagagtcagccctccgcgggtgacgggaaccaggacgacggcccacagcaggggccaccccaacaggggggacagcagcaacaggggccacctcccccacaaggcaagcctcagggacccccacaacaggggggacatccaccccctccccaaggtagaccgcagggaccgccacagcagggtggtcacccacgaccccctagagggcgtccccaggggccaccgcagcaaggcggtcatcaacagggcccaccaccgcctccacctggaaagccgcagggccctcctcctcagggaggtcgtcctcaggggccacctcaagggcagagccctcaatag

SEQ ID NO: 109535 - DNA, 603 bp, Artificial Sequence
  derived and/or modified sequence
agcacaaagttgggagtgacaccagagcctcctgcaagatgcttctgattctgctgtcagtggccctgctggccttcagctcagctcaggatttaaatgaagatgtcagccaggaagatgttcccctcgtaatatcagatggaggagactctgagcagttcctagatgaggagcgtcagggaccacctttgggaggacagcaatctcaaccctctgctggtgatgggaaccaggatgatggccctcagcagggaccaccccaacaaggaggccagcagcaacaaggtccaccacctcctcagggaaagccacaaggaccaccccaacagggaggccatccccctcctcctcaaggaaggccacaaggaccaccccaacagggaggccatccccgtcctcctcgaggaaggccacaaggaccaccccaacagggaggccatcagcaaggtcctcccccacctcctcctggaaagccccagggaccacctccccaagggggccgcccacaaggacctccacaggggcagtctcctcagtaatctaggattcaatgacaggaagtgaataagaagataacagtgtttcaaatgccgtgaaacatgg

SEQ ID NO: 109536 - DNA, 501 bp, Artificial Sequence
  derived and/or modified sequence
atgctgctgatcctgctgagcgtggccctgctggccttcagcagcgcccaggacctgaacgaggacgtgagccaggaggacgtgcccctggtgatcagcgacggcggcgacagcgagcagttcctggacgaggagagacagggcccccccctgggcggccagcagagccagcccagcgccggcgacggcaaccaggacgacggcccccagcagggccccccccagcagggcggccagcagcagcagggccccccccccccccagggcaagccccagggccccccccagcagggcggccaccccccccccccccagggcagaccccagggccccccccagcagggcggccaccccagaccccccagaggcagaccccagggccccccccagcagggcggccaccagcagggcccccccccccccccccccggcaagccccagggcccccccccccagggcggcagaccccagggccccccccagggccagagcccccagtag

SEQ ID NO: 109537 - DNA, 2631 bp, Artificial Sequence
  derived and/or modified sequence
atggatgagcgatttaggtacgaatcggacttcgacaggagactgtcccgcgtatacacaaacgaccgcatgcaccggaacaaaaggggaaacatgcccccaatggagcatgatggcgacgtgattgaacagagcaatataaggatctcaagcgcggagaataaatccgcacccgacaatgagactagcaaatcagcaaatcaggacacatgcagtccgttcgcaggaatgctttttggcggagaggacagagaactgatccagcgccgtaaagagaagtaccgactcgaactgctggagcaaatggctgagcagcagcgtaataaacgtagggaaaaagatctcgaactgagagtagcggccagtggcgcccaggaccctgaaaaatccccggatcgcctgaagcagttttctgtggcaccacggcactttgaggagatgattccgccagagcgtccacggattgcctttcaaacccctctccctccactgtcagccccctccgtccctccaataccgagcgtgcaccccgttccctcccaaaacgaagatttgaggtcaggcctgagtagtgccttgggtgagatggtttccccaagaattgcacccttgccgccacctcctttattaccaccactcgccacaaattatcgcacaccctatgatgacgcttattatttctatggaagtaggaatacatttgaccccagtctcgcttactacggctccggcatgatgggcgtgcagcctgccgcctacgtttctgctcctgttacacaccagctcgcccaacccgtggtcaacactgtgggccagaacgaactgaagataacttctgaccaggtgatcaatagtggcctaatctttgaagacaagccaaagcctagcaagcagtctctgcagtcatatcaggaggctctccagcagcagataagggagcgcgaggagagacgaaagaaggaacgggaggaaaaggaggagtatgaggcgaagctggaagccgagatgcggacctataacccctgggggaagggcggaggcggtgccccactccgcgatgccaagggcaacctcatcagccacatgcaaacccagtccagccccttcgcaaggggcaacgtgtttggtgagccgcccactgaactgcaaataaagcagcaggaactgtacaagaactttctgcgcttccaaatagaggagaagaagcagcgagaggaagcagagagagaacgtctgcgcattgctgaggagaaagaagagagaagactggccgagcagcgcgcacgaattcagcaagaatacgaggaggaacaggagaagaagagggagaaggaggaggagcaacggttaaaaaatgaggagcacatacgactagccgaggagcgtcagaaggaagcagagcggaagaaaaaggaggaagaggaaaagtacaacctgcaactccagcattattgcgagcgcgataatctgatcggtgaagagactaagcatatgcgccagccgagccctatcgtgcccgccctgcaaaacaaaatcgccagcaaactgcagcggccaccaagcgtcgactcgattatccgatcctttatacacgaatcatctatgagtcgtgcacagagtccaccagtgcctgctcgaaagaaccagctgagagcagaggaagaaaaaaagaacgttattatggaactgtctgagatgcgcaagcagctgagaagcgaggaacgcagacttcaggagcggttgctccacatggacagcgacgatgaaattccgatccgtaagaaggagcgcaatcccatggacatctttgacatggctcgtcaccggctgcaagcccctgtcagaaggcaatcccccaagggattggatgcggccacatttcagaatgtgcatgattttaacgagctcaaagatcgagattctgagactagggtcgatctcaaattcatgtacctcgatccaccacgtgaccaccacaccttggagatacaacaacaagctttgcttcgcgagcaacaaaaaaggcttaacagaattaaaatgcaggaaggcgcaaaagttgatcttgacgcgattcccagcgcaaaggtacgcgaacagcgtatgccccgagatgacacctcagattttctcaaaaatagtctccttgagagtgacagtgccttcatcggggcatacggtgagacctatcccgccatagaagatgatgttctgccgccgccgtcccagctgccctccgccagggagaggcgccgcaacaaatggaaaggcttggacattgacagttctagaccaaatgtcgccccagatggcctgtcactgaagagcatctctagcgtcaatgtcgatgagctcagagtccggaatgaagagagaatgcgcagactgaatgaatttcacaacaaacccatcaatactgacgacgagtccagtctcgtcgaccccgacgacattatgaaacacatcggggatgacggctctaactcagtcgctacagagccctggctacggcccggcaccagcgagactctgaagcgcttcatggccgaacagttaaaccaagagcaacagcaaattcctggtaagcccgggacattcacctggcagggccttagcacagcgcacggatag

SEQ ID NO: 109538 - DNA, 2631 bp, Artificial Sequence
  derived and/or modified sequence
atggatgagcggtttaggtacgagtccgatttcgatcgccgtttgagtcgtgtgtacacgaacgaccgaatgcaccgtaacaagcggggcaacatgccccctatggagcatgacggcgatgtcattgagcaatcaaacatccgtatctcatcagctgagaataaaagtgcccccgataatgaaacttccaagtctgctaatcaggacacctgttcccctttcgccggtatgctgtttggtggggaagaccgggagctcatccagcgcaggaaggaaaaatataggctcgaactgctggaacagatggcggagcagcagcgaaacaaacggcgcgagaaggaccttgagctgagggtggccgctagcggggcacaggatcctgagaagagcccagatcgactaaagcaatttagcgtggcgccccgacactttgaagagatgatccccccggaacggcctagaattgcatttcaaaccccgctcccccccctgagcgccccaagcgttccaccgattccatccgttcatccagtgccatctcagaacgaggatctccgatcaggtctcagctccgctttgggtgagatggtctctccaagaatcgcacccctgcccccacccccgttattgccaccgttagccactaattataggacgccctacgacgatgcttactatttttacggttctcggaacacctttgaccccagcctggcctactatgggtctggcatgatgggcgtccaacccgctgcatacgtctccgcaccagtgacgcatcagttagctcagccagtggtaaataccgtcggacagaatgagctcaagatcactagtgaccaggtgatcaatagcggattaatctttgaagacaaaccaaaaccatccaaacaaagccttcaatcgtatcaggaagctttacaacagcaaattagggagagggaagagagaaggaagaaggaacgcgaggagaaggaggagtatgaagcaaagttagaagcggagatgaggacctacaatccctggggaaaaggcggaggtggcgcaccccttcgggacgcaaaaggcaacctgatcagccacatgcagacccagtccagcccttttgcccgcgggaacgtgtttggagaacccccaaccgaactccagatcaagcagcaggagttgtacaagaactttctgcgattccagattgaggaaaagaagcagcgggaggaagcagaacgcgaacgcctccgaatagcggaggagaaggaagagagacgcctggctgagcagcgcgcacgaatccagcaagagtacgaggaggaacaagagaagaagcgggaaaaggaggaagaacaacggctgaaaaatgaggagcatattcggctagcggaggaacgacagaaggaggcagagcgcaagaaaaaggaggaagaggagaaatacaacctgcagctgcagcattactgtgaacgggacaacctgatcggcgaggaaaccaaacacatgaggcagccctctccgatcgtaccggctttgcagaataagatagcaagtaaactgcagagacccccttccgtggactcaatcatacggtcttttatccatgaaagctccatgtctcgtgcccagagtccacccgtgccagctcgtaaaaaccagttacgcgctgaggaggagaagaaaaacgtgattatggaactgtccgaaatgcggaaacagctgcgctctgaggagagaaggcttcaggagaggctgctgcacatggacagcgatgatgagatcccaatacgaaagaaggaacgaaaccccatggacatcttcgatatggcacgccaccgccttcaggcacccgttcgcagacaatcaccaaagggcctggacgcggctacattccagaacgtacatgacttcaatgaactgaaggatagagactcagaaaccagggtagacctaaaatttatgtacctggacccaccgcgggatcaccatactctcgagatccaacagcaggccctgttacgagagcagcagaagaggctcaatagaatcaagatgcaggaaggagccaaagtcgaccttgacgccatcccaagtgccaaggtgagagagcagaggatgcctagagacgacacttcagactttctaaagaatagcttactggagagcgacagcgcatttatcggagcttatggcgaaacatatcccgcgatcgaggacgacgtcctgcccccaccttcccagctgcctagcgcgcgcgagcgccgccgtaacaagtggaaggggctggatattgacagcagccggccaaatgtggcccccgatggactgagcctgaagagcatcagtagtgtgaacgtcgatgaactgcgggtgcgcaacgaggaaagaatgcggagactgaatgagttccataacaaaccgattaataccgacgacgaatcaagtctggtggaccccgatgatatcatgaaacatattggtgacgacggctctaattcagtcgcgactgaaccctggctgcggcccggtacctcagagacattaaaaaggtttatggccgaacagctgaaccaggaacagcaacagattcctggcaagcctggcacctttacatggcaggggctctccaccgcccatggctag

SEQ ID NO: 109539 - DNA, 2631 bp, Artificial Sequence
  derived and/or modified sequence
atggatgagcgcttccgctatgaaagtgactttgaccggcggctgagccgggtgtacaccaatgacaggatgcacaggaacaagaggggcaacatgccacccatggagcatgatggagatgtgattgagcagagcaacatccgcatcagcagcgctgagaacaagagcgccccagacaatgagaccagcaagagcgccaaccaggacacctgcagcccctttgctggcatgctgtttggaggagaggaccgggagctgatccagaggaggaaggagaagtaccgcctggagctgctggagcagatggccgagcagcagaggaacaagaggcgggagaaggacctggagctgcgggtggccgccagcggggcccaggaccctgagaagagcccagaccggctgaagcagttctctgtggcccccaggcactttgaggagatgatccccccagagcggcccagaattgccttccagacccccctgccccccctgagcgcccccagcgtgccccccatccccagcgtgcaccctgtgcccagccagaatgaagacctgcggagcggcctgagcagcgccctgggggagatggtgagccccagaattgcccccctgcccccaccacccctgctgccccccctggccaccaactaccgcaccccctatgatgatgcctactacttctacggcagcaggaacacctttgaccccagcctggcctactacggcagcggcatgatgggcgtgcagcctgctgcctacgtgtctgcccctgtgacccaccagctggcccagcctgtggtgaacacagtgggccagaatgagctgaagatcaccagtgaccaggtgatcaacagcggcctcatctttgaggacaagcccaagcccagcaagcagagcctgcagagctaccaggaggccctgcagcagcagatccgggagcgggaggagaggaggaagaaggagcgggaggagaaggaggagtatgaggccaagctggaggccgagatgaggacctacaacccctggggcaagggcggcggcggggcccccctgagagatgccaagggcaacctgatcagccacatgcagacccagagcagcccctttgcccggggaaatgtgtttggagagcccccaacagagctgcagatcaagcagcaggagctgtacaagaacttcctgcgcttccagatcgaggagaagaagcagcgggaggaggccgagcgggagcggctgagaattgctgaggagaaggaggagcggcggctggccgagcagagggcccgcatccagcaggagtatgaggaggagcaggagaagaagcgggagaaggaggaggagcagaggctgaagaatgaggagcacatccggctggccgaggagcggcagaaggaggccgagaggaagaagaaggaggaggaggagaagtacaacctgcagctgcagcactactgtgagcgggacaacctgattggagaggagaccaagcacatgaggcagcccagccccatcgtgcctgccctgcagaacaagatcgccagcaagctgcagaggcctccttctgtggacagcatcatccgctccttcatccacgagagctccatgagccgggcccagagcccccctgtgcctgccaggaagaaccagctgcgggcagaggaggagaagaagaatgtcatcatggagctgtctgagatgaggaagcagctgcggtctgaggagcggcggctgcaggagcggctgctgcacatggacagtgatgatgagatccccatcaggaagaaggagaggaaccccatggacatctttgacatggcccggcaccggctgcaggcccctgtgcggcggcagagccccaagggcctggatgctgccaccttccagaatgtgcatgacttcaatgagctgaaggaccgggacagcgagaccagggtggacctgaagttcatgtacctggaccccccccgggaccaccacaccctggagatccagcagcaggccctgctgcgggagcagcagaagaggctgaaccgcatcaagatgcaggagggcgccaaggtggacctggatgccatccccagcgccaaggtgcgggagcagaggatgcccagagatgacaccagtgacttcctgaagaacagcctgctggagagtgacagcgccttcatcggggcctacggggagacctacccagccattgaagatgatgtgctgcccccacccagccagctgcccagcgcccgggagaggagaagaaacaagtggaagggcctggacatcgacagcagccggcccaacgtggccccagatggcctgagcctgaagagcatcagctctgtgaatgtggatgagctgcgggtgagaaatgaggagaggatgaggcggctgaatgagttccacaacaagcccatcaacacagatgatgagagcagcctggtggaccctgatgacatcatgaagcacatcggagatgatggcagcaacagcgtggccacagagccctggctgcggcccggcaccagcgagaccctgaagcgcttcatggccgagcagctgaaccaggagcagcagcagatccctgggaagccaggcaccttcacctggcagggcctgagcacagcccatggatag

SEQ ID NO: 109540 - DNA, 2631 bp, Artificial Sequence
  derived and/or modified sequence
atggacgagcggttccggtacgagagcgacttcgaccggcggctgtccagggtctacaccaacgatagaatgcataggaataaaaggggtaatatgccgcccatggagcatgatggtgatgtgattgaacaatcaaatatacgaatttccagcgcagaaaataaatcggcccccgataacgagacaagcaagtccgctaatcaggatacctgtagccccttcgctgggatgctctttggtggcgaggatagggagttgatccagcgcaggaaggagaaatatagattagaactgctcgaacagatggctgagcagcagagaaataaacggagagaaaaagatctggagttacgcgtcgcggcaagtggcgcccaggacccagagaagtcaccggatagactcaaacagttttccgtcgccccacggcatttcgaggagatgataccccccgaacgaccccggatcgcttttcaaacacccctgcccccactcagtgcacctagcgtcccacccattccctccgtccaccccgttccttcccagaacgaggacttaaggagcggtctgtcgagcgcgctgggggaaatggtgtccccccgtattgcccccctccctcctcctccactgttgcctcccctggccaccaattacaggaccccctacgacgacgcttactacttttacgggtccagaaacacattcgacccgagcctggcgtattacgggtccggaatgatgggcgtgcaacctgctgcatacgtgtcagctccagttacccatcagctggcacaacctgtggtcaacactgtaggacagaacgagcttaagattacctctgatcaggttataaactcggggttaatcttcgaggacaaacccaagccaagcaaacagagtctccagtcttatcaagaagccctgcagcagcaaattcgggagcgcgaagaacggagaaagaaagaacgggaggagaaggaagaatacgaagcgaagttagaggcagagatgaggacttacaatccctggggcaagggcggaggcggggccccgctccgggatgccaaagggaatctcatttctcatatgcagacccagagcagcccattcgcccgtgggaatgttttcggcgagcctccaacggaacttcaaatcaagcagcaggaactgtataagaactttctgcgcttccagatcgaagaaaagaagcagcgcgaggaagcagagcgcgagcgcctaagaatcgctgaggaaaaagaggagaggcgcctcgccgaacagcgggcccggattcaacaagagtatgaggaggagcaggaaaagaagagagagaaagaagaggagcagaggctcaaaaacgaggagcacatccgtctcgcagaggagagacagaaggaagctgaacggaagaagaaggaggaggaagagaaatacaacttacagctccagcactactgcgaaagagataatcttattggcgaggaaaccaagcacatgagacagccaagccctatcgttccagctctccagaacaaaatagcttccaaattacaacgcccaccctccgtggacagcattattcgttcctttatccacgaatcctctatgtcgcgcgcccaatcccctcctgtgcctgctcgcaaaaatcagctcagagccgaagaagaaaagaagaacgtgatcatggagctctctgaaatgcggaaacagctacgctccgaggagaggcgactgcaggagaggctgctgcatatggatagcgacgatgagattcccatacgaaaaaaggagcgcaacccaatggacatctttgatatggcgcgccataggctccaggcccctgtgaggcgccagagccctaaaggtcttgacgcggccacatttcagaacgtgcacgatttcaacgaactgaaagaccgtgacagcgagacacgggtagacttgaagttcatgtacctcgatcctccaagggatcatcatacccttgagattcagcagcaagccctcctccgcgagcagcagaagcgactcaacaggatcaagatgcaagagggcgcgaaagttgacctggacgccattccctcagcaaaggtcagagaacagagaatgccgcgggacgatactagcgacttcctgaagaatagcctgctcgagtccgacagtgctttcattggagcctatggagagacctaccctgccatagaggacgacgttttgccaccaccctcacagctcccatcggctagagaaaggcgtcgaaacaagtggaaggggctcgatattgatagcagtaggccaaacgtggccccggatggactctctcttaagtccattagctcggtaaacgtggatgagctgcgcgtgagaaatgaggagagaatgcggcgcctgaacgaattccacaacaaacccatcaacaccgacgacgagagctccctggtggatcccgatgatatcatgaagcatatcggagatgatgggtcaaatagtgtggctacagagccatggttacgtcccggcacctccgagaccctgaagcgctttatggccgaacaactcaaccaggaacagcagcaaatccccggcaaacccggaacatttacttggcaaggcctcagcacagcacacggatag

SEQ ID NO: 109541 - DNA, 2631 bp, Artificial Sequence
  derived and/or modified sequence
atggacgagcggttccggtacgagagcgacttcgaccggcggctgtctagagtgtataccaacgaccgcatgcataggaacaagaggggcaatatgcctccgatggagcacgatggggacgtgatcgagcagagcaacataaggatctcctctgctgagaacaaatccgcccctgacaacgagacaagtaaaagcgccaaccaggacacctgttcccccttcgctggtatgctctttggaggcgaggatcgtgagcttattcagcgccgaaaggagaagtataggctcgagctgttagagcagatggccgaacagcagagaaataagcggcgggagaaagacctcgagctgcgagtggcggccagcggtgctcaagaccccgagaagagtcccgataggcttaaacagttctcagtggccccacggcacttcgaagagatgatcccccctgaaagacctcggatagcctttcagacacccttacctcccctgtccgcaccctccgtgccacctattccctccgtgcatcctgtgccatcccagaatgaggatctgcggtcgggtttgagtagtgcgcttggcgaaatggtgagcccccgaatcgccccactgccgccaccaccattactgccccccctggccactaactatcgaactccctacgatgatgcctactacttttatggatcacgaaacacgttcgatcctagtcttgcctactacggctccggaatgatgggagtgcagcccgccgcctacgtatcagccccggtgacccaccaacttgcacaacctgttgtgaacacggtgggtcaaaacgagcttaagatcactagcgatcaagttataaattcgggcttaatctttgaagataagccgaaaccctccaaacagtccctccaatcttatcaagaagctctccagcaacagatccgggagcgggaggagaggcggaaaaaggagagagaggagaaggaagaatacgaggccaaactggaggccgaaatgcggacctacaatccttggggaaagggcggtggcggcgcacctttgcgcgacgcaaaaggaaacctaatttcccacatgcagacccagtcatctcccttcgcacggggaaatgtgttcggtgagccaccaaccgaactgcagattaagcagcaggaactgtataagaacttcttaagattccagatcgaggaaaaaaaacaacgggaggaggccgaaagagagcggttgcggatcgccgaggagaaagaagagagaaggttagctgagcagcgggcccggatccaacaagagtatgaggaggaacaggaaaaaaagcgggagaaggaagaagaacagaggctgaaaaatgaggagcacatcagactggcagaagagcggcagaaggaagcggaaagaaagaaaaaggaagaggaggagaaatataatttgcagttgcagcattactgcgagcgcgacaatctgatcggcgaggaaaccaaacatatgaggcagcccagtccgatcgtaccagccctgcagaataaaatagcctccaagttgcagcgacctccttcagtggatagcatcattcgctcctttattcacgagagctccatgagccgtgcacaatcaccaccggttcccgcccggaaaaaccagctgagggctgaagaggagaagaagaacgtgatcatggaactgagcgaaatgcggaagcagctgagaagcgaggagaggagactgcaggaaaggctactgcacatggactccgatgacgagatcccaatacggaagaaggagcgcaatcctatggatatttttgacatggctagacaccgcttacaggccccggtaagacggcagagccctaagggcctcgacgctgctacgtttcagaatgttcacgacttcaacgagctgaaggatcgagattccgaaacgagggtggatctgaagtttatgtacctggaccccccaagggatcatcacacactggagattcagcagcaagctttgctacgggagcaacaaaagcgtctgaatagaataaagatgcaggagggtgcgaaggtggatctggacgctatcccctcagccaaggttcgcgagcaaagaatgccaagagacgatactagcgatttcctcaaaaactccttactggaatccgactcagccttcatcggggcctacggcgagacctaccccgccatcgaagatgatgtgctacctcccccctcccagctaccgagcgccagagagaggcgtagaaacaaatggaaggggcttgatatcgacagtagcaggcccaacgtggcccccgacggcctgagcctcaagagcatcagtagcgtgaacgtggacgagctgcgagtcaggaacgaggaacgaatgcgcaggctgaatgagtttcacaataaaccaatcaacacggacgacgaaagcagtctggtggatcctgacgatataatgaaacatatcggagacgatgggtcgaatagcgtggcaaccgaaccctggttgaggcctgggacttcggagacgctgaaaagattcatggccgagcagctgaaccaggagcagcagcagattccaggaaaacctggcacctttacatggcagggattgtcaaccgcacatgggtag

SEQ ID NO: 109542 - DNA, 2631 bp, Artificial Sequence
  derived and/or modified sequence
atggacgaacgttttcggtatgagagtgattttgaccgtagactgagtagagtctacacgaacgatcgcatgcatagaaataagcgcggaaatatgccaccgatggaacatgacggcgacgtaatcgaacaaagcaatatacgcatcagctccgctgagaacaagtccgccccagataacgagaccagcaaaagcgccaatcaggacacctgtagcccttttgctggaatgcttttcggaggcgaggacagggaactgattcagcgcagaaaagaaaaatacaggctggagctgctggaacagatggccgagcagcagcggaataaaaggagagagaaggacctcgaattacgggttgccgcttccggggctcaagaccctgagaagtcccccgaccgactcaaacagttcagtgtcgctcccaggcattttgaagagatgatcccccctgaacggcctagaattgctttccaaaccccactgcctcccctctctgccccaagcgttccacctattccttccgtccatcccgtgccatctcagaacgaagatctccggtccggattatcctctgccctgggggagatggtgtctcctcggatcgctccccttcccccaccacccctcctaccccctctggctacaaactaccgaaccccttatgacgatgcctattacttctacggctccaggaatacttttgacccatctcttgcatattatggtagcggaatgatgggagtgcagccggctgcctatgtgtcagcaccagtcacgcaccagctggctcaaccagttgtgaatactgtcggccagaatgaactgaagatcacttccgatcaggtgataaacagcggtctcatttttgaagacaaacccaagcccagcaagcaatcccttcagtcatatcaggaagccttgcagcagcagatcagagagcgggaagagcgcaggaagaaggagcgggaggaaaaggaggaatacgaggcgaagttagaagccgaaatgagaacctataatccctggggtaaaggaggaggcggagctccgctgagagatgcgaaaggtaacctgatttctcacatgcagacacagtcatccccttttgccagagggaatgtcttcggcgaaccccctactgagctgcaaattaagcagcaggaactatacaagaactttctgaggttccagattgaggaaaaaaagcagcgagaagaagccgagagagaacggttaaggatcgctgaagaaaaagaagaaaggaggcttgcggagcagcgcgctcggattcagcaggagtatgaggaagaacaggagaagaagcgcgagaaggaggaagagcagaggcttaaaaacgaagagcacatacgtctggcagaggagcggcaaaaagaggcagagaggaaaaagaaagaagaggaagagaagtacaaccttcaactgcagcactattgcgagcgagacaacttaattggtgaggaaaccaaacatatgcgacagccatccccaattgtccccgctctccagaacaaaatcgcctctaaactccaacgcccacctagtgttgatagcatcataagatcattcatccatgaaagctctatgtccagagctcagtctcctcccgttccagcccgaaagaatcagttgcgggcagaggaagagaaaaaaaacgtgattatggagttatcagaaatgaggaagcagcttcggtctgaggaacgaaggcttcaggaacgtctgctacatatggattcagacgatgagatccctatccggaaaaaagaacgtaatcctatggacattttcgatatggccaggcaccgcttgcaggcacccgtccgtaggcaatctcctaaaggactagacgctgccacttttcagaatgtgcacgatttcaatgaactgaaggatcgggatagcgagacacgggttgatttaaaatttatgtacctggatccaccacgagatcaccacactctcgagattcaacaacaggccctgctgagggaacaacagaagcgcctgaaccgaattaaaatgcaggaaggtgccaaggtcgatctggacgctataccctcagcgaaggtgagggagcagcgcatgccgcgagacgatactagcgatttcctgaagaacagcttgcttgagtcagactctgcctttataggagcctacggggagacataccctgccatcgaggacgatgtactgccgcctcccagccagctcccatcagccagagagcgtagaagaaacaaatggaaggggttagatatagactccagcaggccaaatgtggcgccagatgggctgtcgctgaagtctatcagttcagtgaacgtggacgaactgcgggtcaggaacgaggaaagaatgagacgactgaatgagttccataataaacccataaataccgatgacgagtcttccctggtcgatcccgacgatattatgaagcatatcggcgacgacgggagcaatagtgtggccactgaaccgtggctgaggccaggcacatctgagacactgaagagatttatggcagagcaactcaaccaggaacagcagcagattccaggtaagccgggtacattcacgtggcagggattatccacggcacacgggtag

SEQ ID NO: 109543 - DNA, 2631 bp, Artificial Sequence
  derived and/or modified sequence
atggacgagcgattccgctatgagagcgacttcgatcgccgattgtctcgggtgtacacaaatgacagaatgcaccgcaacaagcgagggaacatgcctcccatggagcacgatggcgacgtgatcgaacagtccaatatacgtatcagcagcgccgagaacaagtccgctcccgacaatgaaacgtcaaagagtgccaaccaggacacatgctccccattcgcaggcatgttgtttgggggagaggaccgggagctcatacaacgccgtaaggagaagtaccggctcgagttgctggagcaaatggcagaacagcagaggaacaagcgccgtgagaaggatctggagcttagggtggcagcgagcggcgctcaggaccctgaaaagtcccctgatcggttaaagcaattttccgtggcccctcggcattttgaagaaatgatccctccagagcgccctcgcatcgcatttcagactcctctgccgcctctgtcagccccatctgtccccccaattccttccgtgcaccctgtgccaagccaaaatgaggacctgcgtagtggcctgagctcagcactgggcgaaatggtgagccctcgcatcgcgccactcccaccccctcctttgttacctcctctggccactaactatcgaacgccctacgatgatgcatactatttttacggtagcaggaacacattcgatccaagcttagcttactatggctccggaatgatgggagttcaacccgctgcctatgttagcgctcctgtgacccaccaattagcacaaccagtcgttaacactgttggacaaaacgaactgaaaataactagtgaccaggtgattaatagtgggctgattttcgaggacaagcctaaaccatccaaacaatcccttcagagctaccaagaggctctgcaacagcagatccgagaaagggaagaacggcgaaaaaaagaaagagaggaaaaagaggaatacgaagctaagttagaggctgaaatgagaacttataatccttggggaaaagggggaggcggagcgccactgcgggacgctaaaggtaacttaataagtcacatgcagacacagagcagcccttttgccagagggaatgttttcggagaaccaccaacagagctccaaatcaaacagcaggaactctacaaaaatttcctccgttttcagatcgaggaaaagaagcaaagagaggaggctgagcgcgagcgtctccgcatcgccgaggaaaaagaggagagaagacttgccgagcaacgcgctcgtattcaacaggagtacgaagaggagcaggagaaaaaaagagagaaggaggaggagcaacgcttgaaaaacgaggaacacataagactggcggaggagcggcaaaaggaagccgagaggaagaagaaagaggaggaagagaaatataatcttcagctgcagcactattgcgagagagacaatctcatcggagaggagacaaagcatatgagacagccttccccaatcgtgccagccctgcagaacaaaattgccagcaaactacagcgtccaccttccgtggatagcatcattagatcgtttattcatgaaagctctatgagcagggcgcaatctcccccagtccctgctcgcaaaaatcagctgcgggcagaggaggagaaaaagaatgttataatggaactatccgaaatgcgcaaacaactccggtctgaggaacggcgtctgcaggagcgtctccttcatatggatagcgatgatgagatccctataaggaaaaaggaacgcaatcccatggatatttttgacatggcacgccacaggttgcaggccccagttaggcgtcagagcccaaaagggctcgatgcagccacattccagaatgtgcatgacttcaatgagctgaaggatcgtgattctgaaacacgtgtcgatcttaagttcatgtacctcgacccgccacgtgaccaccacacactggagattcagcagcaggcactcctacgggaacagcagaaacgcttgaacagaatcaaaatgcaagagggcgctaaggtggatttggacgccatcccctccgctaaagtgagggaacaacgcatgcctcgggacgatacttcagattttctgaagaactctcttttagaatcggacagtgccttcatcggggcttatggcgaaacgtatccagcgattgaggacgacgtgttacccccacccagtcagctccctagcgcccgagagagacggcgaaacaagtggaaggggctggacattgactcttccaggcctaatgtggctccagacggcctatccctaaaatccatcagctctgtgaacgtcgatgaactccgcgtcaggaacgaggagaggatgcggagactgaatgagtttcataataaaccaattaataccgatgatgaatcctccctagttgaccccgacgacatcatgaagcatattggagacgacggcagtaatagtgtcgctactgagccttggctaaggccaggcaccagcgaaactctcaaacgctttatggcagagcagctcaaccaagagcagcagcagatccctggaaaaccaggtaccttcacctggcagggcctgtctacggcgcacggctag

SEQ ID NO: 109544 - DNA, 2631 bp, Artificial Sequence
  derived and/or modified sequence
atggacgagagattcagatacgagagcgacttcgacagaagactgagcagagtgtacaccaacgacagaatgcacagaaacaagagaggcaacatgccccccatggagcacgacggcgacgtgatcgagcagagcaacatcagaatcagcagcgccgagaacaagagcgcccccgacaacgagaccagcaagagcgccaaccaggacacctgcagccccttcgccggcatgctgttcggcggcgaggacagagagctgatccagagaagaaaggagaagtacagactggagctgctggagcagatggccgagcagcagagaaacaagagaagagagaaggacctggagctgagagtggccgccagcggcgcccaggaccccgagaagagccccgacagactgaagcagttcagcgtggcccccagacacttcgaggagatgatcccccccgagagacccagaatcgccttccagacccccctgccccccctgagcgcccccagcgtgccccccatccccagcgtgcaccccgtgcccagccagaacgaggacctgagaagcggcctgagcagcgccctgggcgagatggtgagccccagaatcgcccccctgccccccccccccctgctgccccccctggccaccaactacagaaccccctacgacgacgcctactacttctacggcagcagaaacaccttcgaccccagcctggcctactacggcagcggcatgatgggcgtgcagcccgccgcctacgtgagcgcccccgtgacccaccagctggcccagcccgtggtgaacaccgtgggccagaacgagctgaagatcaccagcgaccaggtgatcaacagcggcctgatcttcgaggacaagcccaagcccagcaagcagagcctgcagagctaccaggaggccctgcagcagcagatcagagagagagaggagagaagaaagaaggagagagaggagaaggaggagtacgaggccaagctggaggccgagatgagaacctacaacccctggggcaagggcggcggcggcgcccccctgagagacgccaagggcaacctgatcagccacatgcagacccagagcagccccttcgccagaggcaacgtgttcggcgagccccccaccgagctgcagatcaagcagcaggagctgtacaagaacttcctgagattccagatcgaggagaagaagcagagagaggaggccgagagagagagactgagaatcgccgaggagaaggaggagagaagactggccgagcagagagccagaatccagcaggagtacgaggaggagcaggagaagaagagagagaaggaggaggagcagagactgaagaacgaggagcacatcagactggccgaggagagacagaaggaggccgagagaaagaagaaggaggaggaggagaagtacaacctgcagctgcagcactactgcgagagagacaacctgatcggcgaggagaccaagcacatgagacagcccagccccatcgtgcccgccctgcagaacaagatcgccagcaagctgcagagaccccccagcgtggacagcatcatcagaagcttcatccacgagagcagcatgagcagagcccagagcccccccgtgcccgccagaaagaaccagctgagagccgaggaggagaagaagaacgtgatcatggagctgagcgagatgagaaagcagctgagaagcgaggagagaagactgcaggagagactgctgcacatggacagcgacgacgagatccccatcagaaagaaggagagaaaccccatggacatcttcgacatggccagacacagactgcaggcccccgtgagaagacagagccccaagggcctggacgccgccaccttccagaacgtgcacgacttcaacgagctgaaggacagagacagcgagaccagagtggacctgaagttcatgtacctggacccccccagagaccaccacaccctggagatccagcagcaggccctgctgagagagcagcagaagagactgaacagaatcaagatgcaggagggcgccaaggtggacctggacgccatccccagcgccaaggtgagagagcagagaatgcccagagacgacaccagcgacttcctgaagaacagcctgctggagagcgacagcgccttcatcggcgcctacggcgagacctaccccgccatcgaggacgacgtgctgcccccccccagccagctgcccagcgccagagagagaagaagaaacaagtggaagggcctggacatcgacagcagcagacccaacgtggcccccgacggcctgagcctgaagagcatcagcagcgtgaacgtggacgagctgagagtgagaaacgaggagagaatgagaagactgaacgagttccacaacaagcccatcaacaccgacgacgagagcagcctggtggaccccgacgacatcatgaagcacatcggcgacgacggcagcaacagcgtggccaccgagccctggctgagacccggcaccagcgagaccctgaagagattcatggccgagcagctgaaccaggagcagcagcagatccccggcaagcccggcaccttcacctggcagggcctgagcaccgcccacggctag

SEQ ID NO: 109545 - protein, 696 aa, Artificial Sequence
  derived and/or modified sequence
MPTQDGQLRRPARPPGPRAWMEPRGGGSSQFSSCPGPASSGDQMQRLLQGPAPRPPGEPPGSPKSPGHSTGSQRPPDSPGAPPRSPSRKKRRAVGAKGGGHTGASASAQTGSPLLPAASPETAKLMAKAGQEELGPGPAGAPEPGPRSPVQEDRPGPGLGLSTPVPVTEQGTDQIRTPRRAKLHTVSTTVWEALPDVSRAKSDMAVSTPASEPQPDRDMAVSTPASEPQSDRDMAVSTPASEPQPDTDMAVSTPASEPQPDRDMAVSIPASKPQSDTAVSTPASEPQSSVALSTPISKPQLDTDVAVSTPASKHGLDVALPTAGPVAKLEVASSPPVSEAVPRMTESSGLVSTPVPRADAAGLAWPPTRRAGPDVVEMEAVVSEPSAGAPGCCSGAPALGLTQVPRKKKVRFSVAGPSPNKPGSGQASARPSAPQTATGAHGGPGAWEAVAVGPRPHQPRILKHLPRPPPSAVTRVGPGSSFAVTLPEAYEFFFCDTIEENEEAEAAAAGQDPAGVQWPDMCEFFFPDVGAQRSRRRGSPEPLPRADPVPAPIPGDPVPISIPEVYEHFFFGEDRLEGVLGPAVPLPLQALEPPRSASEGAGPGTPLKPAVVERLHLALRRAGELRGPVPSFAFSQNDMCLVFVAFATWAVRTSDPHTPDAWKTALLANVGTISAIRYFRRQVGQGRRSHSPSPSS

SEQ ID NO: 109546 - DNA, 717 bp, Artificial Sequence
  derived and/or modified sequence
atgggctgttcagggtgttcaggcggttgtggcagctcgtgcgggggatgtgggtcaagctgtggtgggtgcgggtcaggatacgggggttgcggtagcgggtgctgcgtgcccgtttgttgctgtaagccagtctgctgttgtgtccccgcttgttcttgctcctcatgtggcagttgcggcggaagcaagggagtgtgcgggtcatgtgggggatgtaagggcggttgtgggtcatgcgggggatcaaagggaggatgcggatcttcttgttgcgtgcccgtttgctgttcctcaagttgcggatcctgcggaggctcgaagggagtttgtgggttcaggggaggctccaagggcggatgtgggagctgcggatgctcccaatgttcttgttataagccctgctgctgttcatccgggtgtggatcgtcttgctgtcaatcctcctgttgtaaacctagctgttcacagtcatcgtgttgcaagccatgctgttcccagagttcttgttgtaagccatgctgctgctcctcaggctgtggcagtagctgctgccagtccagttgttgtaagccgtgttgttctcagtcctcatgctgtaaaccgtgctgttgtagttccggctgcggatcctcgtgttgccagtctagttgttgcaaaccttgcagtagccaatcctcttgctgtgtccctatctgctgtcagtgcaagatatag

SEQ ID NO: 109547 - DNA, 2091 bp, Artificial Sequence
  derived and/or modified sequence
atgcccacccaggacggccagctgagaagacccgccagaccccccggccccagagcctggatggagcccagaggcggcggcagcagccagttcagcagctgccccggccccgccagcagcggcgaccagatgcagagactgctgcagggccccgcccccagaccccccggcgagccccccggcagccccaagagccccggccacagcaccggcagccagagaccccccgacagccccggcgccccccccagaagccccagcagaaagaagagaagagccgtgggcgccaagggcggcggccacaccggcgccagcgccagcgcccagaccggcagccccctgctgcccgccgccagccccgagaccgccaagctgatggccaaggccggccaggaggagctgggccccggccccgccggcgcccccgagcccggccccagaagccccgtgcaggaggacagacccggccccggcctgggcctgagcacccccgtgcccgtgaccgagcagggcaccgaccagatcagaacccccagaagagccaagctgcacaccgtgagcaccaccgtgtgggaggccctgcccgacgtgagcagagccaagagcgacatggccgtgagcacccccgccagcgagccccagcccgacagagacatggccgtgagcacccccgccagcgagccccagagcgacagagacatggccgtgagcacccccgccagcgagccccagcccgacaccgacatggccgtgagcacccccgccagcgagccccagcccgacagagacatggccgtgagcatccccgccagcaagccccagagcgacaccgccgtgagcacccccgccagcgagccccagagcagcgtggccctgagcacccccatcagcaagccccagctggacaccgacgtggccgtgagcacccccgccagcaagcacggcctggacgtggccctgcccaccgccggccccgtggccaagctggaggtggccagcagcccccccgtgagcgaggccgtgcccagaatgaccgagagcagcggcctggtgagcacccccgtgcccagagccgacgccgccggcctggcctggccccccaccagaagagccggccccgacgtggtggagatggaggccgtggtgagcgagcccagcgccggcgcccccggctgctgcagcggcgcccccgccctgggcctgacccaggtgcccagaaagaagaaggtgagattcagcgtggccggccccagccccaacaagcccggcagcggccaggccagcgccagacccagcgccccccagaccgccaccggcgcccacggcggccccggcgcctgggaggccgtggccgtgggccccagaccccaccagcccagaatcctgaagcacctgcccagacccccccccagcgccgtgaccagagtgggccccggcagcagcttcgccgtgaccctgcccgaggcctacgagttcttcttctgcgacaccatcgaggagaacgaggaggccgaggccgccgccgccggccaggaccccgccggcgtgcagtggcccgacatgtgcgagttcttcttccccgacgtgggcgcccagagaagcagaagaagaggcagccccgagcccctgcccagagccgaccccgtgcccgcccccatccccggcgaccccgtgcccatcagcatccccgaggtgtacgagcacttcttcttcggcgaggacagactggagggcgtgctgggccccgccgtgcccctgcccctgcaggccctggagccccccagaagcgccagcgagggcgccggccccggcacccccctgaagcccgccgtggtggagagactgcacctggccctgagaagagccggcgagctgagaggccccgtgcccagcttcgccttcagccagaacgacatgtgcctggtgttcgtggccttcgccacctgggccgtgagaaccagcgacccccacacccccgacgcctggaagaccgccctgctggccaacgtgggcaccatcagcgccatcagatacttcagaagacaggtgggccagggcagaagaagccacagccccagccccagcagctag

SEQ ID NO: 109548 - DNA, 2091 bp, Artificial Sequence
  derived and/or modified sequence
atgcccacacaggatggccaattgcggagacccgcaagaccccctggcccaagggcatggatggagcccaggggcggagggtcgtcacagttttcaagctgccctggcccggcaagctccggcgaccagatgcagagactgctgcagggcccagcccctaggcccccgggggagcctccaggatcacccaaaagccctggtcactctaccggctcccaaaggccgccggatagccccggagcgcctccacgttctccctctcgcaaaaaaaggcgtgccgttggggcaaaaggaggaggccacacaggagcctctgcgtctgcccagacaggctctcctctgctgccagctgctagccctgaaaccgcaaagttgatggcaaaggccggccaggaagagctgggacccggacctgccggtgccccagaacctggccccaggagccccgtccaagaagaccggcctggccccggcctgggactgagcactccagttcccgttactgagcagggcacagaccagattagaacaccgagaagggcaaaactccacaccgtgtccaccactgtatgggaggcactcccagacgtgtcccgggcgaaatctgatatggccgtctccactccggcttctgaaccgcagccagacagggacatggccgtatcaacaccggcctcggagccacaatcagaccgcgacatggccgtgtccacccctgcttctgagccccagcctgacacggatatggccgtgtcaactcctgcaagcgagccccaacctgatagggacatggcagttagcattccagccagcaagccccaatctgacacagccgtgtctaccccggccagcgaaccacagtcttcggtagccctttccaccccgatatctaaaccccagctcgatacagatgtggctgtgagcacgcctgccagtaagcacggcctggatgtggcattacccaccgctggaccggtcgccaagctagaggtggctagtagcccaccagtttccgaggcggtgccccgtatgactgagagcagtggcttggtctcaacacccgtgccgcgggccgacgccgccgggttggcctggccaccaactagacgcgccggcccagacgtggttgagatggaggcagtagtttcagaaccatcggccggagctcccgggtgttgctctggcgcacctgctctaggactaacacaagtgccccgcaagaagaaggtgcggtttagcgtggcagggccatcccccaacaagcccggaagtggacaggcctctgcccgaccatctgccccacagactgcgacaggtgcccacggcggcccaggagcctgggaagctgtcgccgtggggccaaggcctcatcagccgaggatcctgaagcacctgcctagaccacccccctccgctgtgacacgcgtcggccccgggtcttctttcgctgtcacgctgcccgaggcatacgagttttttttctgtgatacaatagaagaaaacgaggaggcggaagctgccgctgcagggcaagatccagccggagtccagtggcccgacatgtgcgagtttttttttccagatgttggagcccagcgctcgaggcggcggggctcaccggagccactccctcgggccgaccctgtacccgcccccatcccaggtgatcctgtgccaattagcattcccgaggtgtacgagcactttttctttggggaggacagactggagggggtgttgggccctgcagtccccctgcccctgcaggccctggagccacctaggagcgcaagcgagggggccggccctggcacacccttaaaacctgctgtggttgagagactccaccttgcactccggagagctggcgagttgagagggccggtccctagcttcgctttctcccagaatgacatgtgtctagtttttgtggcatttgctacctgggccgtaaggaccagtgatccgcacactcccgatgcctggaaaactgctttactggcgaatgtgggcactatatccgccatcaggtacttcaggcgccaagtggggcagggtcgccgttctcactcaccctctcctagctcatag

SEQ ID NO: 109549 - DNA, 2091 bp, Artificial Sequence
  derived and/or modified sequence
atgcccacccaggacggccagctgcggcggcctgcccggcccccaggcccccgggcctggatggagccccggggcggcggcagcagccagttcagcagctgccccggccctgccagcagcggggaccagatgcagaggctgctgcagggccctgcccccaggcctcctggagagcccccaggcagccccaagagccctggccacagcacaggcagccagaggcccccagacagccctggggccccacccaggagccccagcaggaagaagagaagagctgtgggcgccaagggcggcggccacactggagccagcgccagcgcccagacaggcagccccctgctgcctgctgccagccctgagacagccaagctgatggccaaggccggccaggaggagctgggccctggccctgctggggcccctgagcccggccccaggagccctgtgcaggaggacaggcctggccctggcctgggcctgagcacccctgtgcctgtgacagagcagggcacagaccagatccgcaccccaagaagagccaagctgcacacagtgtccaccaccgtgtgggaggccctgcctgatgtgtcccgggccaagagtgacatggctgtgtccaccccagccagcgagccccagcctgaccgggacatggctgtgtccaccccagccagcgagccccagagcgaccgggacatggctgtgtccaccccagccagcgagccccagcctgacacagacatggctgtgtccaccccagccagcgagccccagcctgaccgggacatggctgtgtccatcccagccagcaagccccagagcgacacagctgtgtccaccccagccagcgagccccagagctctgtggccctgagcacccccatcagcaagccccagctggacacagatgtggccgtgtccaccccagccagcaagcacggcctggatgtggccctgcccacagctggccctgtggccaagctggaggtggccagcagcccccctgtgtctgaggccgtgcccaggatgacagagagcagcggcctggtgtccacccctgtgcccagggcagatgctgctggcctggcctggccacccaccaggagagctggcccagatgtggtggagatggaggccgtggtgtctgagcccagcgctggggcccctggctgctgcagcggggccccagccctgggcctgacccaggtgcccaggaagaagaaggtgcgcttctctgtggccggccccagccccaacaagccaggcagcggccaggccagcgcccggcccagcgccccccagacagccaccggggcccatggaggccctggggcctgggaggccgtggccgtgggcccccggccccaccagccccgcatcctgaagcacctgccccggcccccaccttctgctgtgaccagggtgggccctggcagcagctttgctgtgaccctgcctgaggcctatgagttcttcttctgtgacaccatcgaggagaatgaggaggccgaggccgctgctgctggccaggaccctgctggggtgcagtggccagacatgtgtgagttcttcttcccagatgtgggcgcccagaggagcagaagaagaggcagccctgagcccctgcccagggctgaccctgtgcctgcccccatccctggggaccctgtgcccatcagcatccctgaggtgtatgagcacttcttctttggagaagatcggctggagggcgtgctgggccctgctgtgcccctgcccctgcaggccctggagcccccaagaagtgccagcgagggcgccggccctggcacccccctgaagccagctgtggtggagcggctgcacctggccctgcggcgggccggggagctgcggggccctgtgcccagctttgccttcagccagaatgacatgtgcctggtgtttgtggcctttgccacctgggccgtgaggaccagtgacccccacaccccagatgcctggaagacagccctgctggccaacgtgggcaccatcagcgccatccgctacttccggcggcaggtgggccagggcagaagaagccacagccccagccccagcagctag

SEQ ID NO: 109550 - DNA, 2091 bp, Artificial Sequence
  derived and/or modified sequence
atgcccacccaggacggccagctgcggcggcccgcccggccccccggccctagagcctggatggaacctagaggaggcggctcctctcagtttagttcttgtccggggcccgcaagtagtggcgatcagatgcagaggctcctgcagggaccagctccgaggcctcccggcgagccccccggctctcccaagagccccggacattcgacaggctcccaaagaccacccgactctcccggcgcaccgcctagatccccctcaagaaagaagcgaagagctgtgggcgccaaggggggcggccataccggcgcaagtgcatctgcccagacaggtagccccctgcttccagcagcatcacccgagacggccaagctcatggctaaagcggggcaggaagagctgggacccggtcccgctggagcacccgagccgggtcctaggtcgcccgtgcaggaagacagaccagggccaggcctgggcctgagtacacctgtgccagtgaccgagcagggcacggatcagatccgtactccccgcagggcaaagcttcacactgtatctacaaccgtatgggaggccctgccggacgtaagtcgtgctaaatccgatatggccgtctcaactccagcgagcgaaccccagccagacagagacatggcggtctcaacacccgcatctgaaccacagtcagaccgcgatatggctgtgtccactccagctagcgaaccacagcctgacaccgacatggccgtatcaacacccgcctcagagccccagccagatagagatatggctgtctcaatcccagctagtaagccacagagcgataccgctgtttccactcctgcaagcgaaccccaatcttccgtggccctgtcaacacctatttcaaaaccacagctcgacacagacgtcgccgtgtccacccctgcctctaagcacggtctggacgtggcattgcctactgccggacccgtggccaagctcgaggtggcttcctctcctcctgtctctgaggcggtgccccgaatgaccgagtcctcgggcctggtgagcacaccagtgcctagggcggatgccgccgggcttgcctggccaccaactcggagagccggccctgacgtggtggagatggaggctgttgtttctgagccctctgctggcgcccctggatgctgttctggagccccggccttgggcctgacccaggtccctcgcaagaaaaaagtccgcttcagcgtggccggcccatccccaaataaaccaggctctggccaggcttcggcccgaccctccgctccacagactgcaacaggcgctcacggcgggcctggggcctgggaggcagtggctgttggtcctcgtcctcaccaaccacgcatcctgaagcacttgcctcgccccccaccatctgcagtaacgcgagtcggcccgggaagttcctttgctgtgaccttgccagaggcctatgaatttttcttctgcgataccattgaggaaaacgaagaggccgaagcggcagctgctgggcaagatccagctggagtccagtggcctgacatgtgtgagtttttctttcccgacgtaggagctcaaaggagtcgccggcgtggcagtcccgagcccctcccacgcgcagacccagtgccagcacccatacctggggatcctgtacccatttcaatcccagaggtgtacgagcacttcttcttcggggaggacaggctggagggcgttctgggcccagccgtcccgcttccactgcaggccttagagcccccacgtagtgcaagcgagggggctggacctggcacgcccctgaaaccagccgtcgtggaaaggctgcatctggcccttcgccgggccggcgaactgcggggaccagtgccttcttttgccttttcacagaatgacatgtgcttggtgtttgtagctttcgccacctgggccgtacgcacatctgaccctcatacacccgacgcctggaaaaccgcactgctggccaatgtaggtaccatttctgctatacggtatttcagacgccaggtgggccagggacggcgcagtcattctccttcaccttcaagttag

SEQ ID NO: 109551 - DNA, 2091 bp, Artificial Sequence
  derived and/or modified sequence
atgcccacccaggacggtcagctgagaagaccagcgaggccccctggcccaagagcctggatggaaccgagaggagggggtagctcccaattttccagctgcccgggacctgccagctcaggggaccagatgcaacggctgttgcaagggcctgccccacgcccacccggagagccaccgggtagtccaaaatcaccgggtcacagtactggaagccagcgaccaccagattcccctggcgctcctccgcgtagcccatccaggaaaaagcgacgggctgtgggcgcaaaaggtggcggtcataccggcgcttccgccagtgcacagacagggtcaccccttctgccagcagccagtccagagaccgcaaaactaatggccaaggcaggccaggaggaattggggcctgggccagccggtgctcctgaacccggacctcgctcaccggttcaagaggatcgcccaggtcccggattagggctctccaccccggtgcccgtgacagagcagggcacggaccagatacgcactccacgcagggctaaacttcacacagtaagcaccaccgtgtgggaggctcttcctgacgtaagtagagcaaaaagcgatatggccgtttctacacctgcttcagagcctcagccagaccgggatatggcagtgagcacacccgcttccgagcctcagagcgatagggacatggcagtaagcactccggcttcagagccccagccagatactgatatggctgtgagtacgcctgctagcgagcctcaaccagatcgcgatatggcggtctcaatccccgcatctaaaccccagagcgacacagccgtctccacaccagcttcagagccgcagtcaagcgtcgctcttagcaccccaattagcaaaccacaactggacacggatgtcgcagtgtctacccccgcttccaagcatggactcgacgtggcattgcccactgcgggacctgtagcaaagcttgaggttgccagcagcccccctgtttctgaagcagtgccacgaatgactgagtctagcggcttggtttctacacctgtgcccagagccgatgccgctgggctggcctggcccccaactagacgcgcaggccctgatgtcgttgagatggaagccgtagtgtccgagccttcagctggcgctccaggatgctgttctggtgctccagccctgggcctgactcaggtcccaaggaaaaagaaggttcggtttagcgtggcgggaccgtcaccgaataagccaggatccgggcaagcatctgcgagaccttcagccccacaaacagctaccggagcccacggtgggccaggagcttgggaggccgtggccgtcggccctcggcctcaccagccgaggattctgaagcacttgcccagacccccaccaagcgctgtcactcgggtggggccagggtctagctttgcagtaacattgccagaggcatatgaattctttttctgtgatactatcgaagagaacgaagaggccgaggctgctgctgctggccaggaccccgctggggttcagtggccagacatgtgcgagttcttcttccccgacgtgggagctcaaagatccaggcgacggggtagtccagaacccttgcccagagccgatccggtccccgcacccatccccggagacccggtaccgatctccataccggaagtgtatgagcacttcttttttggggaggatcggttagaaggagtccttggccctgccgttccactgccactgcaggccctcgaaccaccgaggtcagcttcagaaggtgccggtccaggtacccctttgaagcccgctgtggtcgaaagacttcacctcgcactcaggcgcgcaggagaactgcgaggaccagtacccagctttgcgttctcacagaacgacatgtgcctcgtctttgtcgccttcgcaacgtgggcagtccgcacgagcgatccacataccccggatgcctggaagacagcgttactcgcaaatgttgggacaatctcagccattcggtatttccgaagacaagtggggcagggacgcaggtcccacagcccttcgccgtcatcctag

SEQ ID NO: 109552 - DNA, 3064 bp, Artificial Sequence
  derived and/or modified sequence
atgccgacccaggacgggcagctcagacgcccagctcggccgccgggacccagggcatggatggagccccgaggcggtgggagctcccagttctcatcctgccctggtccggcgtcttctggagaccagatgcagaggcttctgcagggccctgccccacggccccctggtgagccccctgggagtcccaagtcccctggccacagcactggctcccagaggccccccgatagccctggagccccaccacggagccccagccgaaagaagaggcgagctgtgggtgccaaggggggtgggcacacaggagcctctgcttctgcccagacgggctccccgctgctccctgcggccagtcctgagacggcaaagctgatggccaaagccgggcaggaggagttggggccaggtcctgcaggagctcctgagcctggccccaggtcccctgtgcaggaagacagaccagggccaggtttgggcctgtctacacctgtccctgtgacagagcaaggcacagaccaaatcagaaccccgcgccgagccaagctgcacacagtgtccacgactgtctgggaagccctcccagatgtctcaagggctaagtcagacatggctgtgtctacacctgcctccgagccgcaacctgacagggacatggctgtgtctacacctgcctccgagccgcaatctgacagggacatggctgtgtctacacctgcctctgagccgcaacctgacacggacatggctgtgtctacacctgcctctgagccgcaacctgacagggacatggctgtgtctatacctgcctccaagccgcaatctgacacggctgtgtctacaccagcttctgagcctcagtccagtgtggctctgtctacacccatctccaagccacaattggacacggacgtggctgtgtccacacctgcctccaaacatggcctggatgtggccttgcctacagcaggcccagtggctaagctagaggtggcttcatctccacctgtctcggaggctgtgccgaggatgaccgagtccagcgggcttgtgtctacacctgttcccagagccgacgccgctggcctcgcctggcctcccacccgcagagctgggcctgatgtggtggagatggaggcggttgtgtctgagccctcagcaggggcccccggatgctgctctggggcacccgcactgggtctcacccaagtccccaggaagaagaaagtgcgcttctccgtggctgggcccagccccaataagccaggctcaggacaggcctcagcccggccctcagccccccagacagcaactggggcccacggggggcccggagcctgggaggctgtggctgtcgggccccggccccaccagcctcggatcctcaagcacctgcctcgcccccctccctctgccgtgacgagggtcgggcccgggagcagctttgccgtgaccctcccggaggcctacgagttcttcttctgtgacaccatcgaggagaacgaagaggctgaggcggcagcggccggtcaggatccggcaggcgtccagtggccggacatgtgcgagttcttcttcccagacgttggagcccagaggtcgaggcggcgggggtccccggagccgctcccgagagctgatcctgtgccggcccccatacctggagaccccgtgcccatctccatccctgaggtctatgaacacttcttcttcggggaggacaggcttgagggcgtgctggggccggctgtcccgctcccactgcaggccctggagcctccccggtcggcctccgagggggcggggcctgggacccccctcaagccagccgtggtagagcggctccacctggctcttagacgggcaggggagctccgggggcctgtcccatcatttgccttcagccagaatgacatgtgcctggtgtttgtagcttttgccacctgggctgtgaggacgtcagatccgcataccccagacgcctggaaaacagccttgctggccaacgtcggcaccatctctgccatccgctacttccgccggcaggtggggcaagggcgccgcagccacagccccagccccagctcctaggagccaggcccgggccagggagatgcaggatgaggagacgaccacaggcgcccagggcaggacgaggtgccgccctcgcccgggccctctgacccctctcttctaccgcgtccaggaggggggcgtgtcctggtgctgctccctccgactcacctgaggatccagccagtgaccacggccactccccacgcctgggagggaggtgctaaagtctgggtgggtggagggcaggcaggtggctgggtaggagggtggccagattcacagatgagaacacagggcattcggttaatttcagacaggcaatagtggggaggtcattttactaagaagttgttgtttatctgaaatcaaatgcaaccgcaccctgcgtttcttctggggtgcagggggagctgagtggcaggacaggacttggacctcggaggggtctgagcagcaagacactccggctggagctctgggcagaggcaggggagaggacacagggtggcctcaaagaggggatgggcagcctcctcacaggtgggctgggctggcaagggctccaaggcccatcactcttgatcctcaaaggactgtggccaaggcctctgcgggctctggcctgagacagcgaaggctctgcctgcccctccccagtgcagcagcccctgcagggtgggggtctgtggcagagccgcgagcccctccccgggagccctgggtgcaggtgcagagggagaattcggtggcctcagatggagggctgggctcctggggttgtcccgggggctcctgtggggcagctggggacccacagccaagaggagtcagagatgaggtgggaaggtcggtgaggggcccgaggtggcagaggaagggggctgcctggctgggtgctgggtgggggtcctcaagactgtgggagaccctggctgctgagcagagaacacatggatgcagcaccaataaaattctatcttttcttttt

SEQ ID NO: 109553 - DNA, 501 bp, Artificial Sequence
  derived and/or modified sequence
tgacaggagcgggtgtggccagctgtgcggcggggccggggcggctccatgttccggctgctgtcctggagcctgggccggggcttcctgcgggctgctggaagacgctgccggggctgcagcgcccggctgctgcccggcctggccggcggccctggccctgaggtgcaggtgccccccagccgggtggccccccacggccggggccctggcctgctgcccctgctggccgccctggcctggttcagcaggcctgctgctgctgaggaggaggagcagcagggcgcagatggagctgctgctgaagatggagcagatgaggccgaggccgagatcatccagctgctgaagagggccaaggtgcggcggctgcgggccctgcggcctgctgagcggggcagcctgtgtgagcggggcctgggcgtggccgcccactacagcctgcggctggccgaggagtggatggaggccccccgggtgaagctgcccaggatgtcctag

SEQ ID NO: 109554 - DNA, 1624 bp, Artificial Sequence
  derived and/or modified sequence
ggaaactgttttccaatttgattcttattggaaagcataacaaccagccagggcctgtgctgctggagcgggcagttatgtgcagggagacagctggttacggctggctcctggcctcgacggagcttctcagcctcttggagcctctgtcccctcagctgctgaaggaacacatctcctgcacttctcaagttgctgccggtgcgaaggtgactccagattctgcagtttgggctccgtagctgctcagcaaatgtcagcaggtccagaagcaaggctcctcagctgcagagtgaatgcaaatgccccttctgctctcctgcagctgcggcaggtggaagagctgtcgggggtgggaagggggcttggagggataaggatgggctggggagggctcccaaggcagtggacactgtgggctctggggactgcatggctgtggagggggcatgtgctgttgggctcccagcctcttggggtcctctctgtgccaagatagagcctgttaccctccctgagcaggtgtgagcagacacctgtcccctgccctgcatgggaagtgaacgatccactaagtggggaggtcagggtcagatccccggccttcccatgcaggatgactgctcaggcccaggacagtgggtggtcaacagaaaccccatccctgcccatagagggtgcttcccagttcacagtgacacagcctggcctgctcctcttccagccacccaaggcaagacacagagcaggaggctgaggctggtgtgagggaaagggggatgcagcaaggggatacctcaaccttgcccgagctacagacaggtgaggacttctccctcacctggtgttttccactgcattctgaagagcaggtgacacccaccccagggtggatccaggatggatctctgggtttcctgccatctacaatgaccctcctcatttcccctggctagctgccccctaggatggagaatgcatcatggtcactgacacttggcgcccttttccagcctcaatggcctggcagagccagtggggacacagcaataatgtgggtggcagtaataacagcagctgaaccacctgagcaccatcctgacgaggcatagcctgagctctgtgaacagtgaagtccatctggtctctcagtggcctgagagtgactctaactattatcctcattctctgaaggaggaaaacaaggcaaggggatttaaataatttttaaaggtcagataccttcacaaaggctgaagtgggagtcagatgatagtgtctgggtggagaccccatactcttaccctcaactctgagccatctgctatacaacatctatttgctgagtggaaggtgtgtagcctgaaccatgctcacttctggtccagagctctttcctcagggccctgggacattcacgtttagtgtacagtggtatatgtatgctgaattcctacattaggccagccacatagtcagcactgattgctaaaagaataactgaataaggataaatgcttgaggggatggataccccattctccatgatgcgattatttcacattccctgcttgtatcaaaacatctcatgtaccccataaatatatacacctactatgtactc

SEQ ID NO: 109555 - DNA, 666 bp, Artificial Sequence
  derived and/or modified sequence
atgagcgccctggtgttcttcccccccagcagccccctgcccatcgccttcttcccccccagcagccccctgcccatcgccttcttcccccccagcagccccctgcccatcgtgttcttccccagcctgttcagcatcttcctgccccccccctacccccacctgctgctggccgccgccagcagctgcagagccttcctgagcccccaccacctgctgttcctgttccccaccgtgctgagccccagacccctgctgagcctgagcagccccagagccttccccaccaccgtgttcagccccgtgttcttccccagccacagattcctgcccatgagcagccacagactggccgccgccagcgtgagcagaaacctgctgcccaccttcttcagccccccccccatcgtgttcttcccccagcccctgatcctgagacacctgctgcccctgcccaccttcagccagcagagactgcccgccgccttcttcagccccagaaccctgttcagccccctgcccctgcccaccgtgttcgcccccgacagactgctggcccaccccctgctggccctgagcaactgcctgagccccagaagcgcccccagagtgagaccccccgtgagcctgagactggtgtgcctgtgcgcccagcccgccccctag

SEQ ID NO: 109556 - DNA, 666 bp, Artificial Sequence
  derived and/or modified sequence
atgtctgccctggtgttcttcccccccagcagccccctgcccatcgccttcttcccccccagcagccccctgcccatcgccttcttcccccccagcagccccctgcccatcgtgttcttccccagcctcttcagcatcttcctgcccccaccctacccccacctgctgctggccgccgccagcagctgccgggccttcctgagcccccaccacctgctcttcctgttccccaccgtgctgagcccccggcccctgctgagcctgagcagcccccgggccttccccaccaccgtcttcagccctgtgttcttccccagccaccgcttcctgcccatgagcagccaccggctggccgccgcctctgtgtccaggaacctgctgcccaccttcttcagccccccacccatcgtgttcttcccccagcccctcatcctgcggcacctgctgcccctgcccaccttcagccagcagaggctgcctgctgccttcttcagccccaggaccctcttcagccccctgcccctgcccaccgtgtttgccccagaccggctgctggcccaccccctgctggccctgagcaactgcctgagccccaggtctgccccccgggtgcggccccctgtgtccctgcggctggtgtgcctgtgtgcccagcctgccccctag

SEQ ID NO: 109557 - protein, 1098 aa, Artificial Sequence
  derived and/or modified sequence
MDLGTLYESCNQPQDAIKCYLNATRSKSCSNTSALAARIKYLQAQLCNLPQGSLQNKTKLLPSIEEAWSLPIPAELTSRQGAMNTAQQACKPHHPNTEPVLGLSQTPISQQSLPLHMIPSSQVDDLSSPAKRKRTSSPTKNTSDNWSGGHAVSHPPVQQQAHSWCLTPQKLQHLEQLRANRNNLNPAQKLMLEQLESQFVLMQQHQMRPTGVAQVRSTGIPNGPTADSSLPTNSVSGQQPQLALTRVPSVSQPGVRPACPGQPLANGPFSAGHVPCSTSRTLGSTDTILIGNNHITGSGSNGNVPYLQRNALTLPHNRTNLTSSAEEPWKNQLSNSTQGLHKGQSSHSAGPNGERPLSSTGPSQHLQAAGSGIQNQNGHPTLPSNSVTQGAALNHLSSHTATSGGQQGITLTKESKPSGNILTVPETSRHTGETPNSTASVEGLPNHVHQMTADAVCSPSHGDSKSPGLLSSDNPQLSALLMGKANNNVGTGTCDKVNNIHPAVHTKTDNSVASSPSSAISTATPSPKSTEQTTTNSVTSLNSPHSGLHTINGEGMEESQSPMKTDLLLVNHKPSPQIIPSMSVSIYPSSAEVLKACRNLGKNGLSNSSILLDKCPPPRPPSSPYPPLPKDKLNPPTPSIYLENKRDAFFPPLHQFCTNPNNPVTVIRGLAGALKLDLGLFSTKTLVEANNEHMVEVRTQLLQPADENWDPTGTKKIWHCESNRSHTTIAKYAQYQASSFQESLREENEKRSHHKDHSDSESTSSDNSGRRRKGPFKTIKFGTNIDLSDDKKWKLQLHELTKLPAFVRVVSAGNLLSHVGHTILGMNTVQLYMKVPGSRTPGHQENNNFCSVNINIGPGDCEWFVVPEGYWGVLNDFCEKNNLNFLMGSWWPNLEDLYEANVPVYRFIQRPGDLVWINAGTVHWVQAIGWCNNIAWNVGPLTACQYKLAVERYEWNKLQSVKSIVPMVHLSWNMARNIKVSDPKLFEMIKYCLLRTLKQCQTLREALIAAGKEIIWHGRTKEEPAHYCSICEVEVFDLLFVTNESNSRKTYIVHCQDCARKTSGNLENFVVLEQYKMEDLMQVYDQFTLAPPLPSASS

SEQ ID NO: 109558 - protein, 1044 aa, Artificial Sequence
  derived and/or modified sequence
  misc_feature (1)..(1): Xaa can be any naturally occurring amino acid
XNKTKLLPSIEEAWSLPIPAELTSRQGAMNTAQQACKPHHPNTEPVLGLSQTPISQQSLPLHMIPSSQVDDLSSPAKRKRTSSPTKNTSDNWSGGHAVSHPPVQQQAHSWCLTPQKLQHLEQLRANRNNLNPAQKLMLEQLESQFVLMQQHQMRPTGVAQVRSTGIPNGPTADSSLPTNSVSGQQPQLALTRVPSVSQPGVRPACPGQPLANGPFSAGHVPCSTSRTLGSTDTILIGNNHITGSGSNGNVPYLQRNALTLPHNRTNLTSSAEEPWKNQLSNSTQGLHKGQSSHSAGPNGERPLSSTGPSQHLQAAGSGIQNQNGHPTLPSNSVTQGAALNHLSSHTATSGGQQGITLTKESKPSGNILTVPETSRHTGETPNSTASVEGLPNHVHQMTADAVCSPSHGDSKSPGLLSSDNPQLSALLMGKANNNVGTGTCDKVNNIHPAVHTKTDNSVASSPSSAISTATPSPKSTEQTTTNSVTSLNSPHSGLHTINGEGMEESQSPMKTDLLLVNHKPSPQIIPSMSVSIYPSSAEVLKACRNLGKNGLSNSSILLDKCPPPRPPSSPYPPLPKDKLNPPTPSIYLENKRDAFFPPLHQFCTNPNNPVTVIRGLAGALKLDLGLFSTKTLVEANNEHMVEVRTQLLQPADENWDPTGTKKIWHCESNRSHTTIAKYAQYQASSFQESLREENEKRSHHKDHSDSESTSSDNSGRRRKGPFKTIKFGTNIDLSDDKKWKLQLHELTKLPAFVRVVSAGNLLSHVGHTILGMNTVQLYMKVPGSRTPGHQENNNFCSVNINIGPGDCEWFVVPEGYWGVLNDFCEKNNLNFLMGSWWPNLEDLYEANVPVYRFIQRPGDLVWINAGTVHWVQAIGWCNNIAWNVGPLTACQYKLAVERYEWNKLQSVKSIVPMVHLSWNMARNIKVSDPKLFEMIKYCLLRTLKQCQTLREALIAAGKEIIWHGRTKEEPAHYCSICEVEVFDLLFVTNESNSRKTYIVHCQDCARKTSGNLENFVVLEQYKMEDLMQVYDQFTLAPPLPSASS

SEQ ID NO: 109559 - DNA, 5924 bp, Artificial Sequence
  derived and/or modified sequence
gtgacacaattacaacaactttgtgctggtgccggggaagtttgtgtctccaacgaatcccctcagtgctccccagccccgcgcgctccggccgttcccgccgtccccgcctgtggctgccccctgcccaaccccgcgatgtgaccctacagccgaaagccgccgctgccgacccgggggctccgcagcccctgccgccgccgccgccgccttcaccgccgccgcgttgggatttttcgtcgccgccgcccgcggcggaggaggaggcggcgataaagttggtgtgctggtcccgcgcgcagattgggggcgtcactgcgggccccggtccgagggggggtgtcggcgttggagttgtgaattcgctgcgtttccatgaaatcctgcggagtgtcgctcgctaccgccgccgctgccgccgccgctttcggtgatgaggaaaagaaaatggcggcgggaaaagcgagcggcgagagcgaggaggcgtcccccagcctgacagccgaggagagggaggcgctcggcggactggacagccgcctctttgggttcgtgagatttcatgaagatggcgccaggacgaaggccctactgggcaaggctgttcgctgctatgaatctctaatcttaaaagctgaaggaaaagtggagtctgatttcttttgtcaattaggtcacttcaacctcttattggaagattatccaaaagcattatctgcataccagaggtactacagtttacagtctgactactggaagaatgctgcctttttatatggtcttggtttggtctacttccattataatgcatttcagtgggcaattaaagcatttcaggaggtgctttatgttgatcccagcttttgtcgagccaaggaaattcatttacgacttgggcttatgttcaaagtgaacacagactatgagtctagtttaaagcattttcagttagctttggttgactgtaatccctgcactttgtccaatgctgaaattcaatttcacattgcccacttatatgaaacccagaggaaatatcattctgcaaaagaagcttatgaacaacttttgcagacagagaatctttctgcacaagtaaaagcaactgtcttacaacagttaggttggatgcatcacactgtagatctcctgggagataaagccaccaaggaaagctatgctattcagtatctccaaaagtccttggaagcagatcctaattctggccagtcctggtatttcctcggaaggtgctattcaagtattgggaaagttcaggatgcctttatatcttacaggcagtctattgataaatcagaagcaagtgcagatacatggtgttcaataggtgtgctatatcagcagcaaaatcagcccatggatgctttacaggcctatatttgtgctgtacaattggaccatggccatgctgcagcctggatggacctaggcactctctatgaatcctgcaaccagcctcaggatgccattaaatgctacttaaatgcaactagaagcaaaagttgtagtaatacctctgcacttgcagcacgaattaagtatttacaggctcagttgtgtaaccttccacaaggtagtctacagaataaaactaaattacttcctagtattgaggaggcgtggagcctaccaattcccgcagagcttacctccaggcagggtgccatgaacacagcacagcaggcatgtaaacctcatcatccaaatactgaacctgtattaggcctcagtcaaacaccaatttcacagcaatccttgccactacacatgattccttctagccaagtagatgacctgtccagtcctgccaagaggaaaagaacatctagtccaacaaagaatacttctgacaattggagtggtggacatgctgtgtcacatcctccagtacagcaacaagctcattcatggtgtttgacaccacagaaattacagcatttggaacagctccgcgcaaatagaaataatttaaatccagcacagaaactgatgctggaacagctggaaagtcagtttgtcttaatgcaacaacaccaaatgagaccaacaggagttgcacaggtacgatctactggaattcctaatgggccaacagctgactcatcactgcctacaaactcagtctctggccagcagccacagcttgctctgaccagagtgcctagcgtctctcagcctggagtccgtcctgcctgccctgggcagcctttggccaatggacccttttctgcaggccatgttccctgtagcacatcaagaacgctgggaagtacagacactattttgataggcaataatcatataacaggaagtggaagtaatggaaacgtgccttacctgcagcgaaacgcactcactctacctcataaccgcacaaacctgaccagcagcgcagaggagccgtggaaaaaccaactatctaactccactcaggggcttcacaaaggtcagagttcacattcggcaggtcctaatggtgaacgacctctctcttccactgggccttcccagcatctccaggcagctggctctggtattcagaatcagaacggacatcccaccctgcctagcaattcagtaacacagggggctgctctcaatcacctctcctctcacactgctacctcaggtggacaacaaggcattaccttaaccaaagagagcaagccttcaggaaacatattgacggtgcctgaaacaagcaggcacactggagagacacctaacagcactgccagtgtcgagggacttcctaatcatgtccatcagatgacggcagatgctgtttgcagtcctagccatggagattctaagtcaccaggtttactaagttcagacaatcctcagctctctgccttgttgatgggaaaagccaataacaatgtgggtactggaacctgtgacaaagtcaataacatccacccagctgttcatacaaagactgataactctgttgcctcttcaccatcttcagccatttcaacagcaacaccttctccaaaatccactgagcagacaaccacaaacagtgttaccagccttaacagccctcacagtgggctacacacaattaatggagaagggatggaagaatctcagagccccatgaaaacagatctgcttctggttaaccacaaacctagtccacagatcataccatcaatgtctgtgtccatataccccagctcagcagaagttctgaaggcatgcaggaatctaggtaaaaatggcttatctaacagtagcattttgttggataaatgtccacctccaagaccaccatcttcaccataccctcccttgccaaaggacaagttgaatccacctacacctagtatttacttggaaaataaacgtgatgctttctttcctccattacatcaattttgtacaaatccgaacaaccctgttacagtaatacgtggccttgctggagctcttaagttagacctgggacttttctctactaaaactttggtggaagctaacaatgaacatatggtagaagtgaggacacagttgttgcagccagcagatgaaaactgggatcccactggaacaaagaaaatctggcattgtgaaagtaatagatctcatactacaattgctaaatatgcacagtaccaggcctcctcattccaggaatcattgagagaagaaaatgaaaaaagaagtcatcataaagaccactcagatagtgaatctacatcgtcagataattctgggaggaggaggaaaggaccctttaaaaccataaagtttgggaccaatattgacctatctgatgacaaaaagtggaagttgcagctacatgagctgactaaacttcctgcttttgtgcgtgtcgtatcagcaggaaatcttctaagccatgttggtcataccatattgggcatgaacacagttcaactatacatgaaagttccagggagcagaacaccaggtcatcaggaaaataacaacttctgttcagttaacataaatattggcccaggtgactgtgaatggtttgttgttcctgaaggttactggggtgttctgaatgacttctgtgaaaaaaataatttgaatttcctaatgggttcttggtggcccaatcttgaagatctttatgaagcaaatgttccagtgtataggtttattcagcgacctggagatttggtctggataaatgcaggcactgttcattgggttcaggctattggctggtgcaacaacattgcttggaatgttggtccacttacagcctgccagtataaattggcagtggaacggtacgaatggaacaaattgcaaagtgtgaagtcaatagtacccatggttcatctttcctggaatatggcacgaaatatcaaggtctcagatccaaagctttttgaaatgattaagtattgtcttctaagaactctgaagcaatgtcagacattgagggaagctctcattgctgcaggaaaagagattatatggcatgggcggacaaaagaagaaccagctcattactgtagcatttgtgaagtggaggtttttgatctgctttttgtcactaatgagagtaattcacgaaagacctacatagtacattgccaagattgtgcacgaaaaacaagcggaaacttggaaaactttgtggtgctagaacagtacaaaatggaggacctgatgcaagtctatgaccaatttacattagctcctccattaccatccgcctcatcttgatattgttccatggacattaaatgagaccttttctgctattcaggaaataacccagttctgcaccactggtttttgtagctatctcgtaaggctgctggctgaaaactgtgtctatgcaaccttccaagtgcggagtgtcaaccaactggacgggagagagtactgctcctactccaggactctcacaaagctgatgagctgtacttcagaaaaaaataataatttccatgttttgtatatatctgacaaaactggcaacatcttacagactactgacttgaagacaacctcttttatatttctctatttctgggctgatgaatttgttttcatctgtcttttcccccttcagaattttccttggaaaaaaaatactagcctagctggtcatttctttgtaaggtagttagcaattttaagtctttctttggtcaacttttttttaatgtgaaaagttaggtaagacacttttttactgcttttatgtttttctgtcttgttttgagaccatgatggttacacttttggttcctaaataaaatttaaaaaattaacagccaagtcacaaaggtaatggattgcacatagactaaggaataaacttcagatttgtgatttttgtttctaatcttgatgtaaatttacactatttataaatacatatttattgcttgaaaatatttgtgaatggaatgctgttattttttccagatttacctgccattgaaattttaaggagttctgtaatttcaaacactactcctattacattttctatgtgtaaataaaactgcttagcattgtacagaaacttttattaaaattgtttaatgtttaaagagttttctattgtttgagttttaaaaaagactttatgtacagtgcccagtttttgttcatttttgaaatctgattatatatattttatatatacttatgtatgtatatataatatatatagaaatctggatatatatgtataaatctttagaacttaaatttttctcgttttaagtttcacatctatggtagatttttgaggtgtctactgtaaagtattgcttacaaaaagtatgattatttttaaagaaatatatatggtatgtatcctcaagacctaaaatgtcagactggtttattgttaagttgcaattactgcaatgacagaccaataaacaattgctgcc

SEQ ID NO: 109560 - protein, 1408 aa, Artificial Sequence
  derived and/or modified sequence
MKSCGVSLATAAAAAAAFGDEEKKMAAGKASGESEEASPSLTAEEREALGGLDSRLFGFVRFHEDGARTKALLGKAVRCYESLILKAEGKVESDFFCQLGHFNLLLEDYPKALSAYQRYYSLQSDYWKNAAFLYGLGLVYFHYNAFQWAIKAFQEVLYVDPSFCRAKEIHLRLGLMFKVNTDYESSLKHFQLALVDCNPCTLSNAEIQFHIAHLYETQRKYHSAKEAYEQLLQTENLSAQVKATVLQQLGWMHHTVDLLGDKATKESYAIQYLQKSLEADPNSGQSWYFLGRCYSSIGKVQDAFISYRQSIDKSEASADTWCSIGVLYQQQNQPMDALQAYICAVQLDHGHAAAWMDLGTLYESCNQPQDAIKCYLNATRSKSCSNTSALAARIKYLQACKPHHPNTEPVLGLSQTPISQQSLPLHMIPSSQVDDLSSPAKRKRTSSPTKNTSDNWSGGHAVSHPPVQQQAHSWCLTPQKLQHLEQLRANRNNLNPAQKLMLEQLESQFVLMQQHQMRPTGVAQVRSTGIPNGPTADSSLPTNSVSGQQPQLALTRVPSVSQPGVRPACPGQPLANGPFSAGHVPCSTSRTLGSTDTILIGNNHITGSGSNGNVPYLQRNALTLPHNRTNLTSSAEEPWKNQLSNSTQGLHKGQSSHSAGPNGERPLSSTGPSQHLQAAGSGIQNQNGHPTLPSNSVTQGAALNHLSSHTATSGGQQGITLTKESKPSGNILTVPETSRHTGETPNSTASVEGLPNHVHQMTADAVCSPSHGDSKSPGLLSSDNPQLSALLMGKANNNVGTGTCDKVNNIHPAVHTKTDNSVASSPSSAISTATPSPKSTEQTTTNSVTSLNSPHSGLHTINGEGMEESQSPMKTDLLLVNHKPSPQIIPSMSVSIYPSSAEVLKACRNLGKNGLSNSSILLDKCPPPRPPSSPYPPLPKDKLNPPTPSIYLENKRDAFFPPLHQFCTNPNNPVTVIRGLAGALKLDLGLFSTKTLVEANNEHMVEVRTQLLQPADENWDPTGTKKIWHCESNRSHTTIAKYAQYQASSFQESLREENEKRSHHKDHSDSESTSSDNSGRRRKGPFKTIKFGTNIDLSDDKKWKLQLHELTKLPAFVRVVSAGNLLSHVGHTILGMNTVQLYMKVPGSRTPGHQENNNFCSVNINIGPGDCEWFVVPEGYWGVLNDFCEKNNLNFLMGSWWPNLEDLYEANVPVYRFIQRPGDLVWINAGTVHWVQAIGWCNNIAWNVGPLTACQYKLAVERYEWNKLQSVKSIVPMVHLSWNMARNIKVSDPKLFEMIKYCLLRTLKQCQTLREALIAAGKEIIWHGRTKEEPAHYCSICEVEVFDLLFVTNESNSRKTYIVHCQDCARKTSGNLENFVVLEQYKMEDLMQVYDQFTLAPPLPSASS

SEQ ID NO: 109561 - DNA, 4227 bp, Artificial Sequence
  derived and/or modified sequence
atgaagtcttgtggagtctcactagctaccgccgctgctgcagctgccgcttttggcgacgaagaaaagaagatggcagcaggtaaggctagcggagagtcagaggaagcatcgcccagcctgaccgccgaggagcgcgaggccttaggcggcttagacagccggctctttgggttcgtcaggtttcacgaggacggggctagaactaaagctctgttaggcaaagcggtcagatgctatgagtcgctgattctgaaagctgagggcaaggttgaatcagacttcttctgccaattgggccattttaacctgctattggaagattatcccaaggccctgtctgcctatcagcgctactactccctccaaagtgactactggaaaaacgcagcctttttgtatggcctgggattagtgtattttcactacaacgcctttcaatgggccatcaaggcatttcaagaggtgttgtacgtcgatcccagcttctgtcgagcgaaagaaattcatcttagactcgggctgatgttcaaggtgaacacagactacgaaagcagcctgaaacactttcagctggcactggtcgattgcaatccttgtacactgagcaacgcggagatccagtttcacatcgcacacttgtatgagacacagagaaaatatcactcagctaaggaggcttatgaacagctcctccagacggagaacctcagcgcacaagtgaaggccacagtactgcagcagttagggtggatgcaccacaccgtcgatctactcggtgataaagccacaaaagaaagctacgccatccagtatttacagaaaagtcttgaggctgaccctaattctgggcaaagttggtactttctgggcaggtgttacagttctattggcaaggtgcaagacgcatttatctcgtaccgacagagtattgacaaaagcgaggccagcgctgacacgtggtgcagcatcggagtgctgtatcagcagcagaaccagccgatggatgcgcttcaggcctacatttgtgcagttcagcttgatcatggtcatgccgccgcctggatggacctcgggaccttgtatgagtcctgcaaccagccccaggacgcaatcaagtgctacctaaatgctacaaggtccaagtcttgtagtaatacaagcgcattagctgcgcgcatcaaatacttacaggcgtgcaagcctcatcacccaaacactgaaccagtgcttggcctcagccaaacccctatcagtcagcaatctcttcccctccacatgattcctagcagtcaggtcgacgatctttctagtcctgcaaagcggaagcggacatcgagccctacaaaaaatacctcggataattggtctggaggtcacgctgtgagccacccacctgtccagcagcaggcgcatagctggtgcctgacaccacagaaactccagcatctggagcaactgcgggcgaatcgtaacaatctgaaccctgcccaaaaactgatgctagagcagttggaatcgcaattcgtgctgatgcagcagcaccaaatgcgacctacaggtgtcgcccaggtgaggtcgaccggcatccctaatggaccaacggcagattcctccctgccgacaaactcggtgtcaggccagcagccccagctcgcgctaactagagtaccttccgtgtctcagcccggtgtgcgcccagcatgtccggggcagcccttagccaatggaccgttctccgctggacacgtaccgtgctcgacttcgagaactctgggttcgaccgataccatcttaataggtaataaccatatcacagggtcaggatccaacggcaacgtgccctatctccaaagaaacgccctcactctgccccacaatcggacaaacctgacgagctccgctgaagagccctggaaaaaccagctgagcaacagtacccagggcctgcataaagggcagtccagccatagcgcaggccccaacggggagcgtcccctttcctctacaggacccagccagcaccttcaggcggccgggagcggtatccagaaccagaatggtcaccctactctccctagcaatagcgtgacacaaggggcagctctgaaccatctgtcctctcatacagccacctccggaggccagcaggggatcacactgactaaagagagcaagccatctggtaatatcctgactgtccccgagacatcccggcacaccggggaaacgcctaattcaactgcgtccgtcgagggcttgcctaaccacgtgcaccagatgactgcagacgccgtttgcagtccctcacacggcgattctaagtcaccaggcctgttgtcctcagataacccacagctgtctgccctccttatgggcaaggcaaataacaatgtgggaaccggaacttgcgacaaagttaacaacatccaccctgcggtccacaccaagactgataactctgtggcctcctcgccaagttccgccatttctacggctacgcctagccctaagtccactgagcaaaccaccactaattccgtgacaagtctcaattctccccactcgggtctgcataccatcaacggagagggaatggaagagagtcagtcaccaatgaagacggatttgctgctcgttaaccacaagccctccccacagattataccatctatgagcgtgagtatctatccgagttccgccgaggttttgaaagcttgcaggaatctgggcaagaatggcttaagcaactcatctatcctcctcgacaagtgccctccccctagacctccaagcagcccatatcctccgctgcctaaagacaaactgaatcctccgaccccctcaatttatttggaaaacaagcgtgacgctttctttccgcctctccaccagttttgtaccaatcccaacaatcccgtaaccgtgatacgaggcctggccggcgcccttaagctggatctcgggctcttcagcacaaaaacactcgtcgaagccaataacgagcacatggtagaggtgcgcacccagctgctgcagcctgccgatgaaaactgggatccaactggcactaaaaaaatctggcattgcgaaagcaatcggtcccacacaactatcgcaaagtacgcacaataccaggccagctcctttcaagagagtctccgcgaggagaatgagaagcggagccaccataaagatcattccgactccgaatctacgtcttctgataatagcggcagaagacgtaaagggcctttcaagacaattaaattcggcacgaacatcgacttatctgatgacaagaagtggaaactgcagctccacgagctgactaaactacccgccttcgtgagagtggtgtcagcaggaaatttgctgtctcacgttggacacacaattctcggcatgaacacagtgcagctgtatatgaaggtgcctggatccaggactccaggacaccaagaaaataataacttctgcagcgtgaacattaatatcggacccggcgactgcgagtggtttgtggtgccagaggggtattggggcgtgctgaatgacttttgcgaaaaaaacaacctgaacttcctgatgggttcttggtggcccaatctggaggatctgtatgaggccaatgtcccagtttacagatttattcagcggccgggcgatttggtctggatcaatgcgggcactgtgcactgggtccaagccattggctggtgcaataatattgcgtggaatgtggggccgctcacagcctgtcaatacaagctggccgttgaacgatatgaatggaacaagctccagtcagtaaaaagcatagtcccaatggttcatttaagctggaacatggcccgtaacatcaaagtatctgacccaaagttattcgaaatgatcaaatattgcctactcagaacattgaagcaatgccagactctccgggaagccctgatcgcagcaggcaaggagatcatatggcacggccgaactaaggaagagcctgcccattattgttccatatgtgaagttgaggtgttcgacctgctgttcgtgaccaatgagtcgaatagtcgtaagacttacatagtacactgtcaggactgcgcacggaagacaagtggtaacctggagaactttgtggtgctggagcagtacaagatggaggacctgatgcaggtttatgaccagttcacactggctcctcccctcccttccgcctccagttag

SEQ ID NO: 109562 - DNA, 4227 bp, Artificial Sequence
  derived and/or modified sequence
atgaagagctgtggggtgtccctggccacagctgctgctgctgctgctgcctttggagatgaggagaagaagatggctgctgggaaggccagcggggagagcgaggaggccagccccagcctgacagctgaggagcgggaggccctgggcggcctggacagccggctgtttggatttgtgcgcttccatgaagatggagcccggaccaaggccctgctgggcaaggctgtgcgctgctatgagagcctcatcctgaaggccgagggcaaggtggagagtgacttcttctgccagctgggccacttcaacctgctgctggaggactaccccaaggccctgagcgcctaccagcgctactacagcctgcagagcgactactggaagaatgctgccttcctgtatggcctgggcctggtgtacttccactacaatgccttccagtgggccatcaaggccttccaggaggtgctgtatgtggaccccagcttctgccgggccaaggagatccacctgcggctgggcctgatgttcaaggtgaacacagattatgagagcagcctgaagcacttccagctggccctggtggactgcaacccctgcaccctgagcaatgctgagatccagttccacatcgcccacctgtatgagacccagaggaagtaccacagcgccaaggaggcctatgagcagctgctgcagacagagaacctgagcgcccaggtgaaggccaccgtgctgcagcagctgggctggatgcaccacacagtggacctgctgggggacaaggccaccaaggagagctatgccatccagtacctgcagaagagcctggaggccgaccccaacagcggccagagctggtacttcctgggccgctgctacagcagcatcggcaaggtgcaggatgccttcatctcctaccggcagagcattgacaagtctgaggccagcgctgacacctggtgcagcattggagtgctgtaccagcagcagaaccagcccatggatgccctgcaggcctacatctgtgctgtgcagctggaccacggccacgccgccgcctggatggacctgggcaccctgtatgagagctgcaaccagccccaggatgccatcaagtgctacctgaatgccaccaggagcaagagctgcagcaacaccagcgccctggccgcccgcatcaagtacctgcaggcctgcaagccccaccaccccaacacagagcctgtgctgggcctgagccagacccccatcagccagcagagcctgcccctgcacatgatccccagcagccaggtggatgacctgagcagccctgccaagaggaagaggaccagcagccccaccaagaacaccagtgacaactggagcggcggccatgctgtgagccacccccctgtgcagcagcaggcccacagctggtgcctgaccccccagaagctgcagcacctggagcagctgcgggccaacagaaacaacctgaacccagcccagaagctgatgctggagcagctggagagccagtttgtgctgatgcagcagcaccagatgaggcccaccggggtggcccaggtgcgcagcacaggcatccccaacggccccacagctgacagcagcctgcccaccaacagcgtgtctggccagcagccccagctggccctgaccagggtgcccagcgtgtcccagcccggggtgcggcctgcctgccccggccagcccctggccaacggccccttctctgctggccacgtgccctgcagcaccagcaggaccctgggcagcacagacaccatcctgattggcaacaaccacatcaccggcagcggcagcaatggaaatgtgccctacctgcagagaaatgccctgaccctgccccacaacagaaccaacctgaccagcagcgctgaggagccctggaagaaccagctgagcaacagcacccagggcctgcacaagggccagagcagccacagcgctggccccaacggggagcggcccctgagcagcacaggccccagccagcacctgcaggccgccggcagcggcatccagaaccagaatggccaccccaccctgcccagcaacagcgtgacccagggcgccgccctgaaccacctgagcagccacacagccaccagcggcggccagcagggcatcaccctgaccaaggagagcaagcccagcggcaacatcctgactgtgcctgagaccagccgccacactggagagacccccaacagcacagcctctgtggagggcctgcccaaccacgtgcaccagatgacagcagatgctgtgtgcagccccagccatggagacagcaagagccctggcctgctgagcagtgacaacccccagctgagcgccctgctgatgggcaaggccaacaacaacgtgggcaccggcacctgtgacaaggtgaacaacatccaccctgctgtgcacaccaagacagacaacagcgtggccagcagccccagcagcgccatcagcacagccacccccagccccaagagcacagagcagaccaccaccaacagcgtgaccagcctgaacagcccccacagcggcctgcacaccatcaacggggagggcatggaggagagccagagccccatgaagacagacctgctgctggtgaaccacaagcccagcccccagatcatccccagcatgtctgtgtccatctaccccagcagcgctgaggtgctgaaggcctgcaggaacctgggcaagaatggcctgagcaacagcagcatcctgctggacaagtgccccccaccccggccccccagcagcccctacccacccctgcccaaggacaagctgaacccccccacccccagcatctacctggagaacaagagagatgccttcttcccccccctgcaccagttctgcaccaaccccaacaaccctgtgaccgtcatccggggcctggccggggccctgaagctggacctgggcctcttcagcaccaagaccctggtggaggccaacaatgagcacatggtggaggtgaggacccagctgctgcagcctgcagatgagaactgggaccccaccggcaccaagaagatctggcactgtgagagcaacagaagccacaccaccatcgccaagtatgcccagtaccaggccagcagcttccaggagagcctgcgggaggagaatgagaagaggagccaccacaaggaccacagcgacagcgagagcaccagcagtgacaacagcggcagaagaaggaagggccccttcaagaccatcaagtttggcaccaacatcgacctgagtgatgacaagaagtggaagctgcagctgcacgagctgaccaagctgcctgcctttgtgcgggtggtgtctgctggcaacctgctgagccacgtgggccacaccatcctgggcatgaacacagtgcagctgtacatgaaggtgcccggcagcaggaccccaggccaccaggagaacaacaacttctgcagcgtgaacatcaacatcggccctggggactgtgagtggtttgtggtgcctgagggctactggggcgtgctgaatgacttctgtgagaagaacaacctgaacttcctgatgggctcctggtggcccaacctggaggacctgtatgaggccaacgtgcctgtgtaccgcttcatccagaggcctggggacctggtgtggatcaatgccggcaccgtgcactgggtgcaggccatcggctggtgcaacaacatcgcctggaatgtgggccccctgacagcctgccagtacaagctggccgtggagagatatgagtggaacaagctgcagagcgtgaagagcatcgtgcccatggtgcacctgtcctggaacatggccaggaacatcaaggtgtctgaccccaagctgtttgagatgatcaagtactgcctgctgcggaccctgaagcagtgccagaccctgcgggaggccctgattgctgctgggaaggagatcatctggcacggccgcaccaaggaggagcccgcccactactgcagcatctgtgaggtggaggtgtttgacctgctgtttgtgaccaatgaaagcaacagcaggaagacctacatcgtgcactgccaggactgtgccaggaagaccagcggcaacctggagaactttgtggtgctggagcagtacaagatggaggacctgatgcaggtgtatgaccagttcaccctggccccacccctgcccagcgccagcagctag

SEQ ID NO: 109563 - DNA, 4337 bp, Artificial Sequence
  derived and/or modified sequence
gaattcgctgcgtttccatgaaatcctgcggagtgtcgctcgctaccgccgccgctgccgccgccgctttcggtgatgaggaaaagaaaatggcggcgggaaaagcgagcggcgagagcgaggaggcgtcccccagcctgacagccgaggagagggaggcgctcggcggactggacagccgcctctttgggttcgtgagatttcatgaagatggcgccaggacgaaggccctactgggcaaggctgttcgctgctatgaatctctaatcttaaaagctgaaggaaaagtggagtctgatttcttttgtcaattaggtcacttcaacctcttattggaagattatccaaaagcattatctgcataccagaggtactacagtttacagtctgactactggaagaatgctgcctttttatatggtcttggtttggtctacttccattataatgcatttcagtgggcaattaaagcatttcaggaggtgctttatgttgatcccagcttttgtcgagccaaggaaattcatttacgacttgggcttatgttcaaagtgaacacagactatgagtctagtttaaagcattttcagttagctttggttgactgtaatccctgcactttgtccaatgctgaaattcaatttcacattgcccacttatatgaaacccagaggaaatatcattctgcaaaagaagcttatgaacaacttttgcagacagagaatctttctgcacaagtaaaagcaactgtcttacaacagttaggttggatgcatcacactgtagatctcctgggagataaagccaccaaggaaagctatgctattcagtatctccaaaagtccttggaagcagatcctaattctggccagtcctggtatttcctcggaaggtgctattcaagtattgggaaagttcaggatgcctttatatcttacaggcagtctattgataaatcagaagcaagtgcagatacatggtgttcaataggtgtgctatatcagcagcaaaatcagcccatggatgctttacaggcctatatttgtgctgtacaattggaccatggccatgctgcagcctggatggacctaggcactctctatgaatcctgcaaccagcctcaggatgccattaaatgctacttaaatgcaactagaagcaaaagttgtagtaatacctctgcacttgcagcacgaattaagtatttacaggcatgtaaacctcatcatccaaatactgaacctgtattaggcctcagtcaaacaccaatttcacagcaatccttgccactacacatgattccttctagccaagtagatgacctgtccagtcctgccaagaggaaaagaacatctagtccaacaaagaatacttctgacaattggagtggtggacatgctgtgtcacatcctccagtacagcaacaagctcattcatggtgtttgacaccacagaaattacagcatttggaacagctccgcgcaaatagaaataatttaaatccagcacagaaactgatgctggaacagctggaaagtcagtttgtcttaatgcaacaacaccaaatgagaccaacaggagttgcacaggtacgatctactggaattcctaatgggccaacagctgactcatcactgcctacaaactcagtctctggccagcagccacagcttgctctgaccagagtgcctagcgtctctcagcctggagtccgtcctgcctgccctgggcagcctttggccaatggacccttttctgcaggccatgttccctgtagcacatcaagaacgctgggaagtacagacactattttgataggcaataatcatataacaggaagtggaagtaatggaaacgtgccttacctgcagcgaaacgcactcactctacctcataaccgcacaaacctgaccagcagcgcagaggagccgtggaaaaaccaactatctaactccactcaggggcttcacaaaggtcagagttcacattcggcaggtcctaatggtgaacgacctctctcttccactgggccttcccagcatctccaggcagctggctctggtattcagaatcagaacggacatcccaccctgcctagcaattcagtaacacagggggctgctctcaatcacctctcctctcacactgctacctcaggtggacaacaaggcattaccttaaccaaagagagcaagccttcaggaaacatattgacggtgcctgaaacaagcaggcacactggagagacacctaacagcactgccagtgtcgagggacttcctaatcatgtccatcagatgacggcagatgctgtttgcagtcctagccatggagattctaagtcaccaggtttactaagttcagacaatcctcagctctctgccttgttgatgggaaaagccaataacaatgtgggtactggaacctgtgacaaagtcaataacatccacccagctgttcatacaaagactgataactctgttgcctcttcaccatcttcagccatttcaacagcaacaccttctccaaaatccactgagcagacaaccacaaacagtgttaccagccttaacagccctcacagtgggctacacacaattaatggagaagggatggaagaatctcagagccccatgaaaacagatctgcttctggttaaccacaaacctagtccacagatcataccatcaatgtctgtgtccatataccccagctcagcagaagttctgaaggcatgcaggaatctaggtaaaaatggcttatctaacagtagcattttgttggataaatgtccacctccaagaccaccatcttcaccataccctcccttgccaaaggacaagttgaatccacctacacctagtatttacttggaaaataaacgtgatgctttctttcctccattacatcaattttgtacaaatccgaacaaccctgttacagtaatacgtggccttgctggagctcttaagttagacctgggacttttctctactaaaactttggtggaagctaacaatgaacatatggtagaagtgaggacacagttgttgcagccagcagatgaaaactgggatcccactggaacaaagaaaatctggcattgtgaaagtaatagatctcatactacaattgctaaatatgcacagtaccaggcctcctcattccaggaatcattgagagaagaaaatgaaaaaagaagtcatcataaagaccactcagatagtgaatctacatcgtcagataattctgggaggaggaggaaaggaccctttaaaaccataaagtttgggaccaatattgacctatctgatgacaaaaagtggaagttgcagctacatgagctgactaaacttcctgcttttgtgcgtgtcgtatcagcaggaaatcttctaagccatgttggtcataccatattgggcatgaacacagttcaactatacatgaaagttccagggagcagaacaccaggtcatcaggaaaataacaacttctgttcagttaacataaatattggcccaggtgactgtgaatggtttgttgttcctgaaggttactggggtgttctgaatgacttctgtgaaaaaaataatttgaatttcctaatgggttcttggtggcccaatcttgaagatctttatgaagcaaatgttccagtgtataggtttattcagcgacctggagatttggtctggataaatgcaggcactgttcattgggttcaggctattggctggtgcaacaacattgcttggaatgttggtccacttacagcctgccagtataaattggcagtggaacggtacgaatggaacaaattgcaaagtgtgaagtcaatagtacccatggttcatctttcctggaatatggcacgaaatatcaaggtctcagatccaaagctttttgaaatgattaagtattgtcttctaagaactctgaagcaatgtcagacattgagggaagctctcattgctgcaggaaaagagattatatggcatgggcggacaaaagaagaaccagctcattactgtagcatttgtgaagtggaggtttttgatctgctttttgtcactaatgagagtaattcacgaaagacctacatagtacattgccaagattgtgcacgaaaaacaagcggaaacttggaaaactttgtggtgctagaacagtacaaaatggaggacctgatgcaagtctatgaccaatttacattagctcctccattaccatccgcctcatcttgatattgttccatggacattaaatgagaccttttctgctattcaggaaataacccagttctgcaccactggtttttgtagctatctcgtaaggct

SEQ ID NO: 109564 - DNA, 4227 bp, Artificial Sequence
  derived and/or modified sequence
atgaagagctgcggcgtgagcctggccaccgccgccgccgccgccgccgcttttggagacgaggagaagaagatggcagctgggaaggcctcgggggagagtgaagaagccagtccgagcctgactgccgaggagcgggaggctcttggcggtctggatagccgcctctttggatttgtgagatttcacgaggatggcgcgaggaccaaggccttgctggggaaagccgttaggtgctacgagtccctaattctgaaagctgaagggaaagtcgagagtgacttcttttgtcagctgggacatttcaacctgttgctcgaggattaccccaaagccctgagcgcttatcagaggtattacagcctgcagtcagactactggaagaacgctgcgtttctctacgggttaggcttggtgtacttccattacaatgctttccagtgggcgattaaagcgttccaggaagttctgtatgtggatcctagcttctgtcgagcaaaagagatccatcttcggttggggcttatgttcaaggttaatactgattacgaatcctcgctcaagcatttccaactggctttggtcgattgcaacccgtgcaccctgtctaatgcagaaattcaattccacatagcacatttatatgaaacccaaagaaaataccattctgccaaagaggcatacgaacaattgctccagaccgagaatctctctgcgcaggtgaaagccacagtcctccaacagctgggctggatgcaccatactgtcgatttgttaggagacaaggctactaaggagtcgtacgctatccagtacctgcaaaaatccctggaggcggaccctaattccggacagtcatggtatttcctgggccgctgctacagctctatcggtaaggttcaggacgcatttatctcgtaccggcagtcaatagataagtctgaggcctccgcagatacctggtgtagtataggcgtactctaccagcagcagaatcagcccatggacgcgcttcaggcctatatttgcgctgttcagctggaccacggtcacgcggctgcatggatggacctcggaactctctacgaaagctgcaatcagcctcaggatgctataaaatgctatctgaacgcgactaggtctaagtcctgctcaaacacttcggctctggcagccagaatcaaatacctgcaagcctgtaaaccccatcacccgaacaccgaaccagtgctggggctctcccagacaccaatatctcaacaaagccttcccctccatatgattccatcatcccaggtggacgatttgtcatctcccgcaaagcgtaaacggacaagctcccctacaaagaacacctccgataactggtccggggggcacgccgttagtcacccacccgtccaacagcaggcccactcctggtgcctcacccctcaaaagcttcagcatctggagcagttgcgagctaataggaataatttaaatcccgcccagaagctcatgctggagcagctcgagagtcagttcgtgctgatgcaacagcaccagatgaggcccactggggttgcacaagttaggtccaccggcattcccaatggtccgactgctgatagctccctcccaacaaactccgtgtccgggcagcagccccagcttgccctgacgcgcgtcccatctgtttctcagccaggagtccgaccggcttgccccggacagcctctggcaaatggaccctttagcgccggccatgttccgtgctccacctccagaaccttgggatctactgataccatccttatcggaaacaatcacatcacaggctccgggtccaatgggaacgtgccgtatctgcagagaaatgccctaacactgccccacaaccgcacaaacctcaccagcagtgcggaggaaccttggaaaaatcagctgtctaactctacccaagggctgcacaaaggacagagtagccactcagcaggccccaatggcgagagaccgcttagttcaactggcccaagtcagcatcttcaggcagccgggtctgggatacagaatcagaacgggcacccgacactcccaagcaatagcgttacgcagggcgctgctctcaaccatctaagcagccatacagccaccagtggcgggcaacaaggcattaccctgacaaaggaatctaagccttccgggaacatcctgactgtgcctgaaaccagtcggcacaccggagagacccccaacagtaccgcatcggtggagggattgcctaaccatgtccaccagatgacagcggatgcggtctgcagcccaagtcatggcgacagcaaatcgcccgggctgctatcttctgacaacccccagctgagcgcattattgatgggtaaggctaataataacgtgggcactggaacatgcgataaggtgaataatattcaccctgccgtccatactaagaccgacaactcggtagcaagcagtccaagctccgcaataagtacagccacgccaagcccaaaatccactgaacagacgactaccaatagcgtcacctccctgaattcaccacattccggtctgcacaccatcaacggagagggaatggaggagagccagagcccaatgaagaccgatcttctgttagtgaaccataaaccaagcccccaaattatccccagcatgtctgtctccatatacccctctagtgctgaagtccttaaggcgtgcagaaacctgggtaagaacgggttgagtaactcctctatcctcctggacaaatgcccccctccccgtcctccttcttctccatacccacccctgccgaaggataagctgaaccctccaactccctcaatctacttggaaaataaaagggatgcgttctttccgcccctgcaccagttctgcacaaaccctaacaaccccgtcaccgttatcagaggccttgctggcgccctcaagctggacttgggattattctctacaaaaaccctcgtcgaagccaataacgagcacatggtggaggtgcgcacgcagctgctccagcccgcggatgagaattgggatcctacgggtacaaagaaaatatggcactgtgagtccaaccggagccacacaaccattgctaaatacgcacaataccaagcctctagcttccaggagtctctgagggaagaaaatgaaaaacgatctcaccataaggaccattctgactcagagtcaaccagctcggataattcagggagacgcaggaagggccccttcaaaacaattaaattcggcaccaatattgacttgagcgacgataaaaagtggaagctgcagctgcacgagctcactaaactccctgccttcgttagggtagtctcagctggcaacttactgagtcatgtaggccacacgatcctgggtatgaacaccgtgcaactatatatgaaagtccccggctcgagaacccccggccatcaggaaaataataacttctgctcggtaaatataaacatcggccctggcgattgcgaatggttcgtcgtgcctgaggggtactggggtgtgctgaacgatttctgcgaaaagaacaacctcaactttctgatgggaagctggtggccgaacctggaggacctctacgaggctaatgtaccggtctacaggtttattcagcgcccaggggacctggtgtggatcaatgcagggacagtgcactgggtgcaggctataggctggtgtaacaacatcgcatggaatgtcggcccactgactgcttgtcagtacaaactggctgttgagaggtatgaatggaataagcttcagtccgtgaaatccatcgtgcccatggtgcatttgtcttggaacatggccaggaatattaaggtctcagacccaaagttgttcgaaatgattaaatactgcttgctgaggactctgaaacagtgccagacattacgcgaggccctgattgccgcaggaaaggagattatatggcacggccgtaccaaggaggaaccggctcattattgtagcatctgcgaggtggaagtcttcgaccttttattcgtaactaatgaaagcaatagtcggaagacttatattgtacattgtcaggactgtgctaggaaaacttccgggaatttggaaaatttcgttgttctggagcagtataaaatggaagacctgatgcaggtgtatgatcaattcacacttgcacctccactgccatccgccagtagttag

SEQ ID NO: 109565 - DNA, 4227 bp, Artificial Sequence
  derived and/or modified sequence
atgaaatcctgcggcgtgtcactggcaacggcagccgctgctgccgctgccttcggggatgaggaaaagaaaatggccgctggcaaggcaagcggtgaaagcgaagaggcgagtccgtcactaacagccgaggaacgcgaggccctgggtggactggacagtaggctgttcgggtttgtccgattccatgaagacggcgctaggaccaaagcgcttctaggtaaagcagtgcggtgctacgagtctttgattctcaaagccgaagggaaagtggaatccgacttcttttgtcagttgggacactttaacctactgctggaggactaccctaaagcactctcggcataccagcgctattacagcctgcagtctgactactggaagaatgcagcctttctctacgggttgggactagtctattttcattacaacgcttttcagtgggctattaaagccttccaagaggttttgtatgtggacccttcattttgccgggctaaggaaattcacctaagactgggactaatgtttaaggtgaataccgactatgagtcttcgctgaagcactttcaactggccttggttgattgcaacccctgcacgctgtcgaatgctgaaatccaattccacattgcccacctctatgaaacgcagaggaagtaccactctgctaaggaggcttatgaacagctgctgcagacagagaacctatctgcccaagtgaaggcgaccgttctgcaacaactgggatggatgcaccatacagttgatctgctcggagataaagccaccaaggaatcttacgccatccaatacctgcaaaaaagtctggaggctgaccccaattcaggtcagtcctggtactttctaggtcgctgctattcgtccattggtaaagttcaagatgcctttatctcctatcgacagtctatagacaaatcagaggccagcgccgatacctggtgttcaattggtgtgctgtaccaacagcagaatcagcccatggatgcattacaggcctacatttgcgcggtgcaacttgatcacggccatgcagccgcttggatggacctcggtacactctacgagtcctgtaatcagcctcaggacgctattaagtgctatctcaacgcgactagaagcaagtcttgttcgaatacctccgccctcgccgctaggataaagtacttacaggcctgtaagccccatcacccgaacacagaaccagtacttggactgtctcagactccgatcagtcagcagtccctgccactacatatgattcctagctcgcaggtcgatgatttgtcatcccccgcaaagcgtaagcgaaccagcagtcccaccaagaatacgtcagacaattggagtggtggacacgcagtctctcatccgccagttcagcagcaggcgcactcatggtgtctgactccacagaagttgcagcatctcgaacagttgagggccaataggaataacctgaatcctgctcaaaaactgatgctggagcagctcgaaagtcagtttgtactgatgcagcagcaccaaatgcgccctactggagtggctcaggtgagatccactggaattccaaacggacccactgcggactcatccttgccaacaaactccgtgtctggccaacagccccagctggcattgacccgcgttccatctgtgtcacaaccaggcgtgcgccctgcttgcccaggacagcctcttgctaacggacccttctctgctggccacgtcccgtgcagtacaagccgcaccctcgggtccaccgatacaattctgattggaaataatcatatcactggttccggcagcaatgggaatgtcccatacctgcagagaaatgcactaaccttaccacacaataggaccaatctgacaagtagtgcggaagaaccgtggaagaaccagctctcgaacagcactcagggcttgcataagggacagtcaagtcattcagctggccctaatggcgaacgacctttatcatctaccggacccagtcagcacctccaggcagcgggaagcgggatacaaaatcaaaatggccacccaaccctgcctagcaactctgtgacccaaggcgcagctttaaatcacctgagtagccacactgcaacctccggcggtcagcagggtataactctcaccaaggagtcgaagcccagcggcaacattctcacagtgcctgaaacttcaaggcacaccggagagacaccaaactctacggcatcagtagagggcttgcccaaccatgttcatcaaatgacagctgacgctgtgtgcagcccaagccacggggacagcaagtccccgggtctactttcgagtgataaccctcaactctccgctctcttgatgggtaaagcaaataacaacgtggggaccggcacctgtgataaggtgaacaatattcatcctgctgtgcacactaaaaccgacaatagcgtggccagttcacccagtagcgccatctcaactgcaaccccaagtcctaagtccactgaacagactaccactaactctgtcacgtcactgaacagtccccactctggtttgcatacaatcaatggagagggcatggaggagagccaatcaccgatgaagactgatcttttacttgtgaaccacaaaccttctccccagattattcccagtatgtccgtgtccatttacccttctagtgccgaagtgctgaaagcctgtcgcaatctggggaagaatggactcagtaattcgtctattttgctcgataagtgtccccctcctcgacccccatcctcgccctatcctccactcccaaaggacaaactcaacccccctacaccgtcaatttatctggagaacaaaagagacgccttctttccaccactacaccagttttgtactaacccaaacaatccagtgacagtgattagaggtctagctggagctctgaagctggacttgggtctcttttccaccaagacactagtagaggcgaacaatgagcacatggtagaggtgagaacgcagcttctgcagcctgccgatgagaattgggatcctacagggactaagaaaatttggcactgcgagtctaacagatcacataccaccattgcaaagtacgctcaatatcaggcatcctcattccaggagtcattaagagaagaaaatgagaagcggtcccatcataaagaccacagcgacagcgagagtacctcatccgacaactctggccgtcgccgaaaggggccattcaaaacgattaaatttggtaccaacatcgatctgtctgacgataagaaatggaaactgcagctccacgaactaacaaaactgcccgcttttgtgagggtggtgtcagctggaaatctgctgagccatgtaggccataccatcctaggcatgaacactgtccagctgtacatgaaagtgcctggctctaggactcctggccaccaggagaacaacaacttctgtagcgtgaacattaatattggcccaggcgattgcgaatggtttgtggtgccagaggggtactggggcgtacttaatgatttttgtgagaaaaataacttaaatttcctcatgggtagctggtggcccaatttagaagatctgtacgaggcaaacgtgccagtatataggtttattcaaaggccaggcgacttagtgtggattaatgccggaaccgtgcactgggtgcaggccatcggatggtgcaataatattgcctggaatgtaggccctcttacagcttgccagtataaattagccgtcgaaaggtacgagtggaacaaacttcaaagcgtgaagtccatagtccccatggtacatttgagttggaatatggcgcgtaacattaaggtttcagatcccaagttattcgagatgattaagtattgtcttctccgcacactgaaacaatgtcagacattgagagaggccctgatcgccgctgggaaggaaatcatctggcatggacgtactaaggaggagcctgcacactactgtagcatttgtgaagtagaagtcttcgatctactattcgtcacaaacgaaagtaacagtaggaaaacctacatcgtgcactgtcaagattgtgccagaaaaaccagtgggaacttagagaatttcgtcgtgctggaacaatacaagatggaagatctgatgcaggtctacgaccagttcacgctagcccctcctctgccatctgcgtcatcatag

SEQ ID NO: 109566 - DNA, 4227 bp, Artificial Sequence
  derived and/or modified sequence
atgaagagctgcggcgtgagcctggccaccgccgccgccgccgccgccgccttcggcgacgaggagaagaagatggccgccggcaaggccagcggcgagagcgaggaggccagccccagcctgaccgccgaggagagagaggccctgggcggcctggacagcagactgttcggcttcgtgagattccacgaggacggcgccagaaccaaggccctgctgggcaaggccgtgagatgctacgagagcctgatcctgaaggccgagggcaaggtggagagcgacttcttctgccagctgggccacttcaacctgctgctggaggactaccccaaggccctgagcgcctaccagagatactacagcctgcagagcgactactggaagaacgccgccttcctgtacggcctgggcctggtgtacttccactacaacgccttccagtgggccatcaaggccttccaggaggtgctgtacgtggaccccagcttctgcagagccaaggagatccacctgagactgggcctgatgttcaaggtgaacaccgactacgagagcagcctgaagcacttccagctggccctggtggactgcaacccctgcaccctgagcaacgccgagatccagttccacatcgcccacctgtacgagacccagagaaagtaccacagcgccaaggaggcctacgagcagctgctgcagaccgagaacctgagcgcccaggtgaaggccaccgtgctgcagcagctgggctggatgcaccacaccgtggacctgctgggcgacaaggccaccaaggagagctacgccatccagtacctgcagaagagcctggaggccgaccccaacagcggccagagctggtacttcctgggcagatgctacagcagcatcggcaaggtgcaggacgccttcatcagctacagacagagcatcgacaagagcgaggccagcgccgacacctggtgcagcatcggcgtgctgtaccagcagcagaaccagcccatggacgccctgcaggcctacatctgcgccgtgcagctggaccacggccacgccgccgcctggatggacctgggcaccctgtacgagagctgcaaccagccccaggacgccatcaagtgctacctgaacgccaccagaagcaagagctgcagcaacaccagcgccctggccgccagaatcaagtacctgcaggcctgcaagccccaccaccccaacaccgagcccgtgctgggcctgagccagacccccatcagccagcagagcctgcccctgcacatgatccccagcagccaggtggacgacctgagcagccccgccaagagaaagagaaccagcagccccaccaagaacaccagcgacaactggagcggcggccacgccgtgagccacccccccgtgcagcagcaggcccacagctggtgcctgaccccccagaagctgcagcacctggagcagctgagagccaacagaaacaacctgaaccccgcccagaagctgatgctggagcagctggagagccagttcgtgctgatgcagcagcaccagatgagacccaccggcgtggcccaggtgagaagcaccggcatccccaacggccccaccgccgacagcagcctgcccaccaacagcgtgagcggccagcagccccagctggccctgaccagagtgcccagcgtgagccagcccggcgtgagacccgcctgccccggccagcccctggccaacggccccttcagcgccggccacgtgccctgcagcaccagcagaaccctgggcagcaccgacaccatcctgatcggcaacaaccacatcaccggcagcggcagcaacggcaacgtgccctacctgcagagaaacgccctgaccctgccccacaacagaaccaacctgaccagcagcgccgaggagccctggaagaaccagctgagcaacagcacccagggcctgcacaagggccagagcagccacagcgccggccccaacggcgagagacccctgagcagcaccggccccagccagcacctgcaggccgccggcagcggcatccagaaccagaacggccaccccaccctgcccagcaacagcgtgacccagggcgccgccctgaaccacctgagcagccacaccgccaccagcggcggccagcagggcatcaccctgaccaaggagagcaagcccagcggcaacatcctgaccgtgcccgagaccagcagacacaccggcgagacccccaacagcaccgccagcgtggagggcctgcccaaccacgtgcaccagatgaccgccgacgccgtgtgcagccccagccacggcgacagcaagagccccggcctgctgagcagcgacaacccccagctgagcgccctgctgatgggcaaggccaacaacaacgtgggcaccggcacctgcgacaaggtgaacaacatccaccccgccgtgcacaccaagaccgacaacagcgtggccagcagccccagcagcgccatcagcaccgccacccccagccccaagagcaccgagcagaccaccaccaacagcgtgaccagcctgaacagcccccacagcggcctgcacaccatcaacggcgagggcatggaggagagccagagccccatgaagaccgacctgctgctggtgaaccacaagcccagcccccagatcatccccagcatgagcgtgagcatctaccccagcagcgccgaggtgctgaaggcctgcagaaacctgggcaagaacggcctgagcaacagcagcatcctgctggacaagtgccccccccccagaccccccagcagcccctacccccccctgcccaaggacaagctgaacccccccacccccagcatctacctggagaacaagagagacgccttcttcccccccctgcaccagttctgcaccaaccccaacaaccccgtgaccgtgatcagaggcctggccggcgccctgaagctggacctgggcctgttcagcaccaagaccctggtggaggccaacaacgagcacatggtggaggtgagaacccagctgctgcagcccgccgacgagaactgggaccccaccggcaccaagaagatctggcactgcgagagcaacagaagccacaccaccatcgccaagtacgcccagtaccaggccagcagcttccaggagagcctgagagaggagaacgagaagagaagccaccacaaggaccacagcgacagcgagagcaccagcagcgacaacagcggcagaagaagaaagggccccttcaagaccatcaagttcggcaccaacatcgacctgagcgacgacaagaagtggaagctgcagctgcacgagctgaccaagctgcccgccttcgtgagagtggtgagcgccggcaacctgctgagccacgtgggccacaccatcctgggcatgaacaccgtgcagctgtacatgaaggtgcccggcagcagaacccccggccaccaggagaacaacaacttctgcagcgtgaacatcaacatcggccccggcgactgcgagtggttcgtggtgcccgagggctactggggcgtgctgaacgacttctgcgagaagaacaacctgaacttcctgatgggcagctggtggcccaacctggaggacctgtacgaggccaacgtgcccgtgtacagattcatccagagacccggcgacctggtgtggatcaacgccggcaccgtgcactgggtgcaggccatcggctggtgcaacaacatcgcctggaacgtgggccccctgaccgcctgccagtacaagctggccgtggagagatacgagtggaacaagctgcagagcgtgaagagcatcgtgcccatggtgcacctgagctggaacatggccagaaacatcaaggtgagcgaccccaagctgttcgagatgatcaagtactgcctgctgagaaccctgaagcagtgccagaccctgagagaggccctgatcgccgccggcaaggagatcatctggcacggcagaaccaaggaggagcccgcccactactgcagcatctgcgaggtggaggtgttcgacctgctgttcgtgaccaacgagagcaacagcagaaagacctacatcgtgcactgccaggactgcgccagaaagaccagcggcaacctggagaacttcgtggtgctggagcagtacaagatggaggacctgatgcaggtgtacgaccagttcaccctggccccccccctgcccagcgccagcagctag

SEQ ID NO: 109567 - protein, 999 aa, Artificial Sequence
  derived and/or modified sequence
  misc_feature (1)..(1): Xaa can be any naturally occurring amino acid
XGTLYESCNQPQDAIKCYLNATRSKSCSNTSALAARIKYLQNTSDNWSGGHAVSHPPVQQQAHSWCLTPQKLQHLEQLRANRNNLNPAQKLMLEQLESQFVLMQQHQMRPTGVAQVRSTGIPNGPTADSSLPTNSVSGQQPQLALTRVPSVSQPGVRPACPGQPLANGPFSAGHVPCSTSRTLGSTDTILIGNNHITGSGSNGNVPYLQRNALTLPHNRTNLTSSAEEPWKNQLSNSTQGLHKGQSSHSAGPNGERPLSSTGPSQHLQAAGSGIQNQNGHPTLPSNSVTQGAALNHLSSHTATSGGQQGITLTKESKPSGNILTVPETSRHTGETPNSTASVEGLPNHVHQMTADAVCSPSHGDSKSPGLLSSDNPQLSALLMGKANNNVGTGTCDKVNNIHPAVHTKTDNSVASSPSSAISTATPSPKSTEQTTTNSVTSLNSPHSGLHTINGEGMEESQSPMKTDLLLVNHKPSPQIIPSMSVSIYPSSAEVLKACRNLGKNGLSNSSILLDKCPPPRPPSSPYPPLPKDKLNPPTPSIYLENKRDAFFPPLHQFCTNPNNPVTVIRGLAGALKLDLGLFSTKTLVEANNEHMVEVRTQLLQPADENWDPTGTKKIWHCESNRSHTTIAKYAQYQASSFQESLREENEKRSHHKDHSDSESTSSDNSGRRRKGPFKTIKFGTNIDLSDDKKWKLQLHELTKLPAFVRVVSAGNLLSHVGHTILGMNTVQLYMKVPGSRTPGHQENNNFCSVNINIGPGDCEWFVVPEGYWGVLNDFCEKNNLNFLMGSWWPNLEDLYEANVPVYRFIQRPGDLVWINAGTVHWVQAIGWCNNIAWNVGPLTACQYKLAVERYEWNKLQSVKSIVPMVHLSWNMARNIKVSDPKLFEMIKYCLLRTLKQCQTLREALIAAGKEIIWHGRTKEEPAHYCSICEVEVFDLLFVTNESNSRKTYIVHCQDCARKTSGNLENFVVLEQYKMEDLMQVYDQFTLAPPLPSASS

SEQ ID NO: 109568 - protein, 1356 aa, Artificial Sequence
  derived and/or modified sequence
MKSCGVSLATAAAAAAAFGDEEKKMAAGKASGESEEASPSLTAEEREALGGLDSRLFGFVRFHEDGARTKALLGKAVRCYESLILKAEGKVESDFFCQLGHFNLLLEDYPKALSAYQRYYSLQSDYWKNAAFLYGLGLVYFHYNAFQWAIKAFQEVLYVDPSFCRAKEIHLRLGLMFKVNTDYESSLKHFQLALVDCNPCTLSNAEIQFHIAHLYETQRKYHSAKEAYEQLLQTENLSAQVKATVLQQLGWMHHTVDLLGDKATKESYAIQYLQKSLEADPNSGQSWYFLGRCYSSIGKVQDAFISYRQSIDKSEASADTWCSIGVLYQQQNQPMDALQAYICAVQLDHGHAAAWMDLGTLYESCNQPQDAIKCYLNATRSKSCSNTSALAARIKYLQNTSDNWSGGHAVSHPPVQQQAHSWCLTPQKLQHLEQLRANRNNLNPAQKLMLEQLESQFVLMQQHQMRPTGVAQVRSTGIPNGPTADSSLPTNSVSGQQPQLALTRVPSVSQPGVRPACPGQPLANGPFSAGHVPCSTSRTLGSTDTILIGNNHITGSGSNGNVPYLQRNALTLPHNRTNLTSSAEEPWKNQLSNSTQGLHKGQSSHSAGPNGERPLSSTGPSQHLQAAGSGIQNQNGHPTLPSNSVTQGAALNHLSSHTATSGGQQGITLTKESKPSGNILTVPETSRHTGETPNSTASVEGLPNHVHQMTADAVCSPSHGDSKSPGLLSSDNPQLSALLMGKANNNVGTGTCDKVNNIHPAVHTKTDNSVASSPSSAISTATPSPKSTEQTTTNSVTSLNSPHSGLHTINGEGMEESQSPMKTDLLLVNHKPSPQIIPSMSVSIYPSSAEVLKACRNLGKNGLSNSSILLDKCPPPRPPSSPYPPLPKDKLNPPTPSIYLENKRDAFFPPLHQFCTNPNNPVTVIRGLAGALKLDLGLFSTKTLVEANNEHMVEVRTQLLQPADENWDPTGTKKIWHCESNRSHTTIAKYAQYQASSFQESLREENEKRSHHKDHSDSESTSSDNSGRRRKGPFKTIKFGTNIDLSDDKKWKLQLHELTKLPAFVRVVSAGNLLSHVGHTILGMNTVQLYMKVPGSRTPGHQENNNFCSVNINIGPGDCEWFVVPEGYWGVLNDFCEKNNLNFLMGSWWPNLEDLYEANVPVYRFIQRPGDLVWINAGTVHWVQAIGWCNNIAWNVGPLTACQYKLAVERYEWNKLQSVKSIVPMVHLSWNMARNIKVSDPKLFEMIKYCLLRTLKQCQTLREALIAAGKEIIWHGRTKEEPAHYCSICEVEVFDLLFVTNESNSRKTYIVHCQDCARKTSGNLENFVVLEQYKMEDLMQVYDQFTLAPPLPSASS

SEQ ID NO: 109569 - DNA, 4071 bp, Artificial Sequence
  derived and/or modified sequence
atgaagtcctgcggggtcagcctggccacagcagcagccgccgccgccgcgttcggcgatgaggagaaaaagatggcagcgggaaaggcttccggtgaatctgaagaggcctctccttcgttaacagcggaagagcgtgaagcgctgggaggactggactccagactgtttggcttcgttaggtttcacgaggacggggcgagaacaaaagcgctgctaggaaaagctgtgcggtgctacgagagcctgatccttaaagcagagggcaaagtagaatctgatttcttctgccagttgggacacttcaacctgctcctggaggactatccaaaggccctgtcagcctaccagcgttactattctctgcagagcgactactggaaaaatgctgcttttctgtacggcctgggactggtatacttccattataatgctttccagtgggcgattaaagcgttccaggaagtcctgtacgtggacccgtctttctgtcgtgcaaaagagatccatctccgtttaggactcatgtttaaggttaacacggattacgagagcagccttaaacacttccaactggctttagttgattgtaatccttgtaccttgtctaacgccgagatccagtttcatatcgcccacctgtatgagacacaacgaaaatatcactctgccaaggaagcatacgaacagctgctccagacggagaatctgagcgcacaagttaaggccacagtgcttcagcagcttggctggatgcaccacacagtagatctccttggggacaaggccactaaagagtcctacgcaatccagtatctccagaaatctctggaggctgaccccaactcaggccagagttggtatttcctcgggcgctgctattcttcaatcgggaaagtgcaggatgcgttcatatcttatcggcagtccatcgacaaaagcgaggcctccgccgatacatggtgctcaatcggggtgctttaccagcaacagaaccagcctatggatgccctacaagcctacatatgtgccgtgcagttagaccatggacacgcggcggcctggatggatctgggcactctgtatgagagttgcaaccagcctcaagacgctataaagtgctatctgaacgctacacgctcaaaatcctgctccaataccagtgccctagctgctcggattaaatacctgcaaaacacctccgacaattggagcggtggccacgccgtctctcatccacccgtacaacaacaagcacattcatggtgtctgacgccccagaagttacaacatctagaacagctacgcgccaataggaacaacctgaatcccgctcagaagctgatgctggagcagctggagtctcagttcgtcctgatgcaacagcatcaaatgagacccacgggcgttgctcaggtccggtcaaccgggattcctaatggtccaactgctgattcttctctgcccacaaatagcgtgtccggccagcagccacagctcgcactgacaagggtgccctcagtgtcgcagcccggggtacggccggcatgccccggacagcctctggctaacgggccattctccgccgggcacgttccctgtagtactagcagaactctagggagtaccgacacaatactgataggtaataatcatattaccggtagcgggtcgaatggaaatgttccgtacctccagcgcaacgcgctcaccctcccacacaacagaaccaacctgacctcctccgcggaggaaccatggaaaaaccagttgagcaattctacccagggtctgcacaaggggcagagctcgcatagcgccggccctaacggggaaagacccttgtctagcactggcccctctcagcatctgcaggcagccggtagcggaatccagaatcagaatgggcatcccacgctgcccagcaactctgttacacagggtgcagctctgaaccacctatccagccataccgctacctctggagggcagcaggggattacgctgaccaaagagtccaaaccttccggcaatatattgacagttccggagacgagtcgacacaccggagaaacaccaaattccaccgcatcagtggaggggctgcccaaccacgtgcatcagatgacagcggacgcggtctgctcaccctcacatggcgatagcaagtcacctggtctgctgagctccgacaaccctcagctgagcgcattactaatgggtaaggccaacaataacgtgggtaccgggacctgcgacaaggtaaacaacatccaccccgcagtgcataccaagaccgataactctgtcgctagctccccatcttctgccatttctactgccaccccttcccctaagtccacggagcagacgaccactaattccgttacatccctaaacagccctcactctggactgcacacaattaatggagagggcatggaggaatctcagtcaccgatgaaaacagacctcctccttgtgaatcataaaccctcgcctcagattatcccctccatgtcggtatctatttacccgtcctcagccgaggtactgaaggcatgcaggaatcttggtaaaaacggcttgtccaattcctctatactgctggataagtgcccacctccaagacctccaagctccccataccctccattgccaaaggataaactgaatccccctaccccgtctatctatctggagaacaaacgggacgccttttttcctcctctccatcagttctgtacaaaccctaataaccccgtgactgtgatacgtggactggcaggcgcgctcaagttagatctcggtctcttctccacaaagacgttggtcgaggcaaataatgagcacatggtggaggtacggactcagctgctgcagccagcggacgagaactgggaccccaccggtactaagaaaatctggcactgcgaaagcaacagaagccatactaccatcgctaagtatgctcagtaccaagccagcagcttccaggaaagcctgcgcgaggaaaatgaaaaacggagtcatcacaaagatcactcagattcagaatccacgtcctccgataattctggaaggcggagaaaggggccatttaaaactattaagtttggaactaacattgatttgtctgatgacaagaagtggaaattacagttgcacgaactcacgaaactgcctgctttcgtccgggtggtgtctgctggcaacctcctaagtcatgtgggccacacaatcttgggtatgaacacagttcagctttatatgaaagtgccaggttcccggacgccaggtcatcaggagaacaataatttttgctctgtgaatatcaacatcggcccaggcgactgtgagtggtttgtggttccagaaggatactggggcgtcctcaacgacttctgtgagaagaataatctaaacttcctgatgggttcctggtggccaaacctggaggatctttatgaagctaatgtgccggtgtaccggtttatccaaaggcctggcgatttggtctggatcaacgcaggaaccgtgcactgggttcaggctatcgggtggtgtaataatatcgcatggaatgtcggacctctcacggcctgtcaatataagctggcagtggagagatatgaatggaataagctccagtctgtaaagtccattgttccaatggtgcacctgagttggaatatggcccggaatattaaggtgtctgatccaaagctcttcgaaatgattaagtactgtctgctgaggaccctgaagcagtgccagacccttagggaggcgctcatcgcagctggaaaggagatcatttggcacggcaggaccaaggaagaaccagcccattactgctcaatttgcgaggttgaggtttttgaccttctgtttgtgacaaatgaaagcaattcccggaagacgtacatagtgcactgtcaggactgcgcgcgtaaaaccagcggtaaccttgagaattttgtagtgttggaacagtacaagatggaggacctgatgcaggtgtacgaccagtttactctggctcctcctctcccctccgcctccagctag

SEQ ID NO: 109570 - DNA, 4071 bp, Artificial Sequence
  derived and/or modified sequence
atgaagagctgtggggtgtccctggccacagctgctgctgctgctgctgcctttggagatgaggagaagaagatggctgctgggaaggccagcggggagagcgaggaggccagccccagcctgacagctgaggagcgggaggccctgggcggcctggacagccggctgtttggatttgtgcgcttccatgaagatggagcccggaccaaggccctgctgggcaaggctgtgcgctgctatgagagcctcatcctgaaggccgagggcaaggtggagagtgacttcttctgccagctgggccacttcaacctgctgctggaggactaccccaaggccctgagcgcctaccagcgctactacagcctgcagagcgactactggaagaatgctgccttcctgtatggcctgggcctggtgtacttccactacaatgccttccagtgggccatcaaggccttccaggaggtgctgtatgtggaccccagcttctgccgggccaaggagatccacctgcggctgggcctgatgttcaaggtgaacacagattatgagagcagcctgaagcacttccagctggccctggtggactgcaacccctgcaccctgagcaatgctgagatccagttccacatcgcccacctgtatgagacccagaggaagtaccacagcgccaaggaggcctatgagcagctgctgcagacagagaacctgagcgcccaggtgaaggccaccgtgctgcagcagctgggctggatgcaccacacagtggacctgctgggggacaaggccaccaaggagagctatgccatccagtacctgcagaagagcctggaggccgaccccaacagcggccagagctggtacttcctgggccgctgctacagcagcatcggcaaggtgcaggatgccttcatctcctaccggcagagcattgacaagtctgaggccagcgctgacacctggtgcagcattggagtgctgtaccagcagcagaaccagcccatggatgccctgcaggcctacatctgtgctgtgcagctggaccacggccacgccgccgcctggatggacctgggcaccctgtatgagagctgcaaccagccccaggatgccatcaagtgctacctgaatgccaccaggagcaagagctgcagcaacaccagcgccctggccgcccgcatcaagtacctgcagaacaccagtgacaactggagcggcggccatgctgtgagccacccccctgtgcagcagcaggcccacagctggtgcctgaccccccagaagctgcagcacctggagcagctgcgggccaacagaaacaacctgaacccagcccagaagctgatgctggagcagctggagagccagtttgtgctgatgcagcagcaccagatgaggcccaccggggtggcccaggtgcgcagcacaggcatccccaacggccccacagctgacagcagcctgcccaccaacagcgtgtctggccagcagccccagctggccctgaccagggtgcccagcgtgtcccagcccggggtgcggcctgcctgccccggccagcccctggccaacggccccttctctgctggccacgtgccctgcagcaccagcaggaccctgggcagcacagacaccatcctgattggcaacaaccacatcaccggcagcggcagcaatggaaatgtgccctacctgcagagaaatgccctgaccctgccccacaacagaaccaacctgaccagcagcgctgaggagccctggaagaaccagctgagcaacagcacccagggcctgcacaagggccagagcagccacagcgctggccccaacggggagcggcccctgagcagcacaggccccagccagcacctgcaggccgccggcagcggcatccagaaccagaatggccaccccaccctgcccagcaacagcgtgacccagggcgccgccctgaaccacctgagcagccacacagccaccagcggcggccagcagggcatcaccctgaccaaggagagcaagcccagcggcaacatcctgactgtgcctgagaccagccgccacactggagagacccccaacagcacagcctctgtggagggcctgcccaaccacgtgcaccagatgacagcagatgctgtgtgcagccccagccatggagacagcaagagccctggcctgctgagcagtgacaacccccagctgagcgccctgctgatgggcaaggccaacaacaacgtgggcaccggcacctgtgacaaggtgaacaacatccaccctgctgtgcacaccaagacagacaacagcgtggccagcagccccagcagcgccatcagcacagccacccccagccccaagagcacagagcagaccaccaccaacagcgtgaccagcctgaacagcccccacagcggcctgcacaccatcaacggggagggcatggaggagagccagagccccatgaagacagacctgctgctggtgaaccacaagcccagcccccagatcatccccagcatgtctgtgtccatctaccccagcagcgctgaggtgctgaaggcctgcaggaacctgggcaagaatggcctgagcaacagcagcatcctgctggacaagtgccccccaccccggccccccagcagcccctacccacccctgcccaaggacaagctgaacccccccacccccagcatctacctggagaacaagagagatgccttcttcccccccctgcaccagttctgcaccaaccccaacaaccctgtgaccgtcatccggggcctggccggggccctgaagctggacctgggcctcttcagcaccaagaccctggtggaggccaacaatgagcacatggtggaggtgaggacccagctgctgcagcctgcagatgagaactgggaccccaccggcaccaagaagatctggcactgtgagagcaacagaagccacaccaccatcgccaagtatgcccagtaccaggccagcagcttccaggagagcctgcgggaggagaatgagaagaggagccaccacaaggaccacagcgacagcgagagcaccagcagtgacaacagcggcagaagaaggaagggccccttcaagaccatcaagtttggcaccaacatcgacctgagtgatgacaagaagtggaagctgcagctgcacgagctgaccaagctgcctgcctttgtgcgggtggtgtctgctggcaacctgctgagccacgtgggccacaccatcctgggcatgaacacagtgcagctgtacatgaaggtgcccggcagcaggaccccaggccaccaggagaacaacaacttctgcagcgtgaacatcaacatcggccctggggactgtgagtggtttgtggtgcctgagggctactggggcgtgctgaatgacttctgtgagaagaacaacctgaacttcctgatgggctcctggtggcccaacctggaggacctgtatgaggccaacgtgcctgtgtaccgcttcatccagaggcctggggacctggtgtggatcaatgccggcaccgtgcactgggtgcaggccatcggctggtgcaacaacatcgcctggaatgtgggccccctgacagcctgccagtacaagctggccgtggagagatatgagtggaacaagctgcagagcgtgaagagcatcgtgcccatggtgcacctgtcctggaacatggccaggaacatcaaggtgtctgaccccaagctgtttgagatgatcaagtactgcctgctgcggaccctgaagcagtgccagaccctgcgggaggccctgattgctgctgggaaggagatcatctggcacggccgcaccaaggaggagcccgcccactactgcagcatctgtgaggtggaggtgtttgacctgctgtttgtgaccaatgaaagcaacagcaggaagacctacatcgtgcactgccaggactgtgccaggaagaccagcggcaacctggagaactttgtggtgctggagcagtacaagatggaggacctgatgcaggtgtatgaccagttcaccctggccccacccctgcccagcgccagcagctag

SEQ ID NO: 109571 - DNA, 4185 bp, Artificial Sequence
  derived and/or modified sequence
gaattcgctgcgtttccatgaaatcctgcggagtgtcgctcgctaccgccgccgctgccgccgccgctttcggtgatgaggaaaagaaaatggcggcgggaaaagcgagcggcgagagcgaggaggcgtcccccagcctgacagccgaggagagggaggcgctcggcggactggacagccgcctctttgggttcgtgagatttcatgaagatggcgccaggacgaaggccctactgggcaaggctgttcgctgctatgaatctctaatcttaaaagctgaaggaaaagtggagtctgatttcttttgtcaattaggtcacttcaacctcttattggaagattatccaaaagcattatctgcataccagaggtactacagtttacagtctgactactggaagaatgctgcctttttatatggtcttggtttggtctacttccattataatgcatttcagtgggcaattaaagcatttcaggaggtgctttatgttgatcccagcttttgtcgagccaaggaaattcatttacgacttgggcttatgttcaaagtgaacacagactatgagtctagtttaaagcattttcagttagctttggttgactgtaatccctgcactttgtccaatgctgaaattcaatttcacattgcccacttatatgaaacccagaggaaatatcattctgcaaaagaagcttatgaacaacttttgcagacagagaatctttctgcacaagtaaaagcaactgtcttacaacagttaggttggatgcatcacactgtagatctcctgggagataaagccaccaaggaaagctatgctattcagtatctccaaaagtccttggaagcagatcctaattctggccagtcctggtatttcctcggaaggtgctattcaagtattgggaaagttcaggatgcctttatatcttacaggcagtctattgataaatcagaagcaagtgcagatacatggtgttcaataggtgtgctatatcagcagcaaaatcagcccatggatgctttacaggcctatatttgtgctgtacaattggaccatggccatgctgcagcctggatggacctaggcactctctatgaatcctgcaaccagcctcaggatgccattaaatgctacttaaatgcaactagaagcaaaagttgtagtaatacctctgcacttgcagcacgaattaagtatttacagaatacttctgacaattggagtggtggacatgctgtgtcacatcctccagtacagcaacaagctcattcatggtgtttgacaccacagaaattacagcatttggaacagctccgcgcaaatagaaataatttaaatccagcacagaaactgatgctggaacagctggaaagtcagtttgtcttaatgcaacaacaccaaatgagaccaacaggagttgcacaggtacgatctactggaattcctaatgggccaacagctgactcatcactgcctacaaactcagtctctggccagcagccacagcttgctctgaccagagtgcctagcgtctctcagcctggagtccgtcctgcctgccctgggcagcctttggccaatggacccttttctgcaggccatgttccctgtagcacatcaagaacgctgggaagtacagacactattttgataggcaataatcatataacaggaagtggaagtaatggaaacgtgccttacctgcagcgaaacgcactcactctacctcataaccgcacaaacctgaccagcagcgcagaggagccgtggaaaaaccaactatctaactccactcaggggcttcacaaaggtcagagttcacattcggcaggtcctaatggtgaacgacctctctcttccactgggccttcccagcatctccaggcagctggctctggtattcagaatcagaacggacatcccaccctgcctagcaattcagtaacacagggggctgctctcaatcacctctcctctcacactgctacctcaggtggacaacaaggcattaccttaaccaaagagagcaagccttcaggaaacatattgacggtgcctgaaacaagcaggcacactggagagacacctaacagcactgccagtgtcgagggacttcctaatcatgtccatcagatgacggcagatgctgtttgcagtcctagccatggagattctaagtcaccaggtttactaagttcagacaatcctcagctctctgccttgttgatgggaaaagccaataacaatgtgggtactggaacctgtgacaaagtcaataacatccacccagctgttcatacaaagactgataactctgttgcctcttcaccatcttcagccatttcaacagcaacaccttctccaaaatccactgagcagacaaccacaaacagtgttaccagccttaacagccctcacagtgggctacacacaattaatggagaagggatggaagaatctcagagccccatgaaaacagatctgcttctggttaaccacaaacctagtccacagatcataccatcaatgtctgtgtccatataccccagctcagcagaagttctgaaggcatgcaggaatctaggtaaaaatggcttatctaacagtagcattttgttggataaatgtccacctccaagaccaccatcttcaccataccctcccttgccaaaggacaagttgaatccacctacacctagtatttacttggaaaataaacgtgatgctttctttcctccattacatcaattttgtacaaatccgaacaaccctgttacagtaatacgtggccttgctggagctcttaagttagacctgggacttttctctactaaaactttggtggaagctaacaatgaacatatggtagaagtgaggacacagttgttgcagccagcagatgaaaactgggatcccactggaacaaagaaaatctggcattgtgaaagtaatagatctcatactacaattgctaaatatgcacagtaccaggcctcctcattccaggaatcattgagagaagaaaatgaaaaaagaagtcatcataaagaccactcagatagtgaatctacatcgtcagataattctgggaggaggaggaaaggaccctttaaaaccataaagtttgggaccaatattgacctatctgatgacaaaaagtggaagttgcagctacatgagctgactaaacttcctgcttttgtgcgtgtcgtatcagcaggaaatcttctaagccatgttggtcataccatattgggcatgaacacagttcaactatacatgaaagttccagggagcagaacaccaggtcatcaggaaaataacaacttctgttcagttaacataaatattggcccaggtgactgtgaatggtttgttgttcctgaaggttactggggtgttctgaatgacttctgtgaaaaaaataatttgaatttcctaatgggttcttggtggcccaatcttgaagatctttatgaagcaaatgttccagtgtataggtttattcagcgacctggagatttggtctggataaatgcaggcactgttcattgggttcaggctattggctggtgcaacaacattgcttggaatgttggtccacttacagcctgccagtataaattggcagtggaacggtacgaatggaacaaattgcaaagtgtgaagtcaatagtacccatggttcatctttcctggaatatggcacgaaatatcaaggtctcagatccaaagctttttgaaatgattaagtattgtcttctaagaactctgaagcaatgtcagacattgagggaagctctcattgctgcaggaaaagagattatatggcatgggcggacaaaagaagaaccagctcattactgtagcatttgtgaagtggaggtttttgatctgctttttgtcactaatgagagtaattcacgaaagacctacatagtacattgccaagattgtgcacgaaaaacaagcggaaacttggaaaactttgtggtgctagaacagtacaaaatggaggacctgatgcaagtctatgaccaatttacattagctcctccattaccatccgcctcatcttgatattgttccatggacattaaatgagaccttttctgctattcaggaaataacccagttctgcaccactggtttttgtagctatctcgtaaggctgctg

SEQ ID NO: 109572 - DNA, 4071 bp, Artificial Sequence
  derived and/or modified sequence
atgaagagctgcggcgtgagcctggccaccgccgccgccgccgccgcggcgttcggtgacgaggaaaaaaagatggcagcaggaaaagcttctggggagagcgaagaggcttctccttcccttacagctgaggagcgagaggcactaggagggttagattcaagactgttcggttttgtccggttccacgaggacggtgcgcggacgaaggcactgctggggaaggccgtgaggtgttatgagagcctcatcctcaaggctgaagggaaggttgaaagcgactttttctgtcaactcgggcattttaatttgttgctagaagattatcccaaggcactaagcgcttaccagagatattacagtctccagagtgattattggaaaaatgccgccttcttatacggattaggtctggtgtactttcactataatgccttccagtgggctatcaaggccttccaagaggtgttgtacgttgacccctcattctgcagagctaaggaaattcatctccgcctagggctcatgtttaaggtgaatacagattacgaatcctctctcaaacatttccaattggctctggtagactgcaacccgtgcacactgagcaatgccgagatacagttccatattgctcatctatatgagacacagcgtaagtaccactctgctaaggaggcatatgaacagctcctgcagacagagaatcttagtgcacaggtcaaagcgacagtgctccaacaactcggttggatgcaccacacagtagacctcttgggggacaaagccactaaggagagctatgctatccagtatcttcagaagtcactcgaggccgatccaaattcaggccagtcatggtacttcctgggaaggtgttactcaagcattggcaaggtccaggatgcgtttattagctaccgccagagcatcgataagagcgaagccagcgccgacacatggtgctcaatcggggtgttgtatcaacagcagaaccagcctatggatgccctccaagcgtacatttgcgctgttcagcttgaccacgggcacgccgctgcttggatggacctggggaccctgtatgaaagctgcaatcagcctcaggatgcgattaagtgctacctcaatgctacccgctcaaaatcctgctctaacaccagcgccttggccgcccggatcaagtatttgcagaacaccagcgataattggagcggggggcatgccgtgagccacccccccgtgcaacagcaagcccactcctggtgtttaaccccccagaagctccaacacttggaacagctcagagccaaccggaataatctcaatccagcccagaaacttatgctcgagcagcttgaatctcaattcgtactcatgcaacagcatcagatgcggcctaccggtgtggcacaggtgaggagcaccggcatccccaacggaccgaccgccgatagctccttacccactaactctgtttctgggcaacaaccacagctggcactgacacgggtcccttcagtgtctcagcccggagtacgacccgcgtgtcctgggcagccgctggctaatggaccgttctccgcaggacatgtcccctgcagcaccagccggactctgggaagcaccgataccatcttgattggaaataatcatattactgggtctggctcgaatggaaacgtcccatacctgcagaggaacgccctaactctgccgcataacagaacaaatctcaccagctcagctgaagagccctggaagaaccagttgtcgaacagcacacaggggctgcacaaagggcaaagcagccatagcgctggcccaaatggcgagcggccactgtcttctaccggcccttcacagcacttacaagcggcaggaagcggcattcaaaaccaaaatgggcatccgacgctgccttcgaatagcgtgacacagggggccgcccttaaccatttaagtagccacaccgctacttcgggcggacagcagggcataacactgaccaaagagtccaaaccttccggcaacattctcacagtgcccgagacttctaggcacacaggcgagaccccaaactcgaccgctagcgtcgagggcctgccaaaccacgtgcatcagatgacggccgacgcggtatgcagcccttcccacggggattcaaaaagtcctggcctcctgagcagcgacaatcctcagctctccgccctgctgatgggaaaggctaataacaatgtgggaacgggcacttgcgacaaggtgaataacattcacccagctgtgcatacaaaaaccgataattcagtggctagctccccatcatccgccattagcacggccaccccgagtccaaagtccacagaacagacaacgacaaactcggtcacttcactgaactctccccatagtggcctccatacaatcaatggggaaggcatggaagaatctcaaagtccaatgaaaacagacttactcttggtcaatcacaaaccttcaccccagattatcccttcaatgagtgtgtctatatatccttcgagtgcagaggtcctgaaggcttgtagaaatttgggaaagaatggacttagtaactcttcaattcttctcgataagtgccccccaccacgccccccatcttctccttatccgcctctacccaaagataaactgaatccacctacaccctcgatctacttagaaaataaacgggacgccttcttcccccctctgcatcaattctgcaccaaccccaataaccccgtcacagtgatccgggggctggctggagcactgaagcttgacctaggtctgtttagtaccaaaacactggtggaagccaacaacgagcacatggtggaggtgagaactcagctgctgcaaccggcagacgagaactgggacccgaccggaaccaagaagatatggcattgcgagtctaaccgcagtcataccactattgccaagtatgcgcagtatcaggcctcttcctttcaggagtctctccgcgaggagaatgagaaaaggtctcaccataaggatcattctgactcggagagcactagcagtgataacagcggcaggaggagaaaaggccctttcaagacaatcaaatttggaacgaatatagacctgtccgatgataagaagtggaagcttcagctccatgagttgacaaagctccctgcttttgtccgtgtcgttagcgcagggaaccttctcagtcatgtaggtcatacaattcttggcatgaacacagtccaactttacatgaaagtgcctgggagccgcacaccaggtcaccaggaaaataacaacttctgttccgtaaacataaacatcgggcccggggattgcgagtggttcgtggtgccagagggctactggggagtgctgaacgatttttgtgagaagaataacctcaactttctcatggggtcatggtggcccaacctggaagacctctatgaggctaatgtccctgtatatcggtttattcagagaccaggggacctggtgtggattaatgccggcacagtgcactgggtgcaggccattggatggtgcaacaatatcgcctggaatgtcggtcccctgaccgcatgtcagtataagcttgcagtggagcgctatgaatggaacaagctgcagagcgttaagagcatcgtaccaatggtccacctgagctggaacatggctagaaacattaaagtgtccgatccgaagctttttgaaatgatcaaatattgtctcctcagaacactgaaacagtgtcaaacccttcgggaagccctgattgctgccggcaaggagatcatctggcacggaaggaccaaggaggaaccggctcactactgctccatctgcgaagtagaggtgtttgacctcctgttcgtgacaaacgaatcgaactccagaaaaacctacatcgtgcattgccaggattgtgcccgaaaaacaagcggtaacctggagaacttcgttgtgctggaacaatacaagatggaagatctgatgcaagtttatgatcagtttactctagctcccccgctcccatctgcatcatcatag

SEQ ID NO: 109573 - DNA, 4071 bp, Artificial Sequence
  derived and/or modified sequence
atgaaatcctgtggtgtctctctcgccactgccgctgccgctgccgcagcttttggcgatgaggagaaaaaaatggcagccggaaaagctagtggggaaagcgaagaagctagcccctccctgactgccgaagaaagggaggcactgggtgggttggactcaaggctgttcggatttgtgaggttccatgaggatggggctcgcacaaaggcgctgctggggaaggccgtgagatgttatgaaagccttattctaaaagcggagggaaaagtcgagtccgattttttctgtcagcttggtcattttaacctgctcctcgaagactatcctaaagccctctctgcctaccagcggtattattctctgcagtctgattactggaaaaatgccgcatttctgtatggtctgggccttgtgtattttcactacaacgcctttcagtgggccataaaggctttccaggaagtgctttatgtggacccctcattttgccgcgctaaagagatacacctgaggcttggactcatgtttaaagtgaataccgattacgaaagcagcttaaagcacttccagctcgcactggtggattgcaacccctgtacactgtccaatgctgaaatacagtttcacattgcgcacctctacgagactcagcgcaagtatcacagtgccaaggaagcctacgagcagctgctgcagactgagaacttatccgcccaagtcaaggctaccgtgctgcagcagttgggctggatgcaccatactgttgacctcctcggggataaagccactaaggagtcctacgctatccaatacctccagaagtcgctggaggccgaccccaacagcggacagtcatggtattttctgggcaggtgctatagcagcataggtaaggtgcaggacgcctttatcagctataggcagagtattgacaaatccgaggcctccgcggacacgtggtgttccattggcgtgctgtatcagcagcagaaccagccaatggatgccctgcaagcgtatatttgcgcggtacaactcgatcacgggcacgcggctgcatggatggacctgggcaccctgtatgaatcttgcaatcagccacaggacgccataaagtgctacctaaacgcaacacggagtaaatcctgctccaacacctcagctctagcagccagaataaaatacctgcagaacacatctgataactggagcgggggacacgcggtgagccacccccctgtgcagcaacaggctcactcatggtgcctgactcctcagaagctccagcaccttgaacagctgagagccaaccgcaataaccttaatcccgctcagaaattgatgttagagcaattggagagtcagtttgtgctcatgcaacagcaccagatgcggccaactggagttgcccaggttaggagcacagggatccccaatggcccaaccgcagacagcagcctgcctactaattcggtgagcggccagcagcctcagctggctctcacccgcgtgccttcagtgtcacagccaggtgttcgcccagcctgtcccggtcaacccctggcgaacggacccttcagcgccggtcatgttccatgttcaacttcacggactctcggatcaaccgatacaatcctcatcggcaacaaccatattacgggatcgggaagcaacggcaatgtgccatacctacagaggaacgctctgacgttgccccacaatcgcaccaacctcacctcgtctgcggaggagccctggaagaatcagctcagcaacagtactcaggggctgcataagggccagtcttcccattccgcaggaccaaatggggaaagacctctttctagcacagggccttctcaacacctccaggctgctgggtcaggcatccagaatcagaacgggcaccctacattaccctccaactcagttacgcaaggggcagccctcaatcatcttagcagtcacaccgctacaagtggaggtcagcagggcatcactctgacgaaggaaagtaagcccagcggtaatatcctgactgtcccagaaacatcaagacacacaggagagacccccaattctacggcatctgtcgaaggacttcccaaccatgtacatcagatgaccgctgatgcggtgtgctctccctcacatggcgacagtaagtctcccggactactctcttccgataacccacaattgagcgccctgctcatgggtaaggctaacaataatgtaggtacaggaacttgtgacaaagtgaacaacatccatccagcagtgcacactaagaccgacaactccgtggccagctccccctcctctgccatttctaccgccacacccagcccaaagtcaactgaacagacaacgaccaatagcgtcaccagtctgaacagccctcactctggactccatactatcaatggtgaaggtatggaggaatctcagtcaccgatgaagaccgatttgctgctggttaaccacaaacctagtccccaaatcattccgagcatgtccgtctctatttatccgtccagcgccgaggtgcttaaagcttgccggaatctggggaagaatggtctttctaacagctccattctgctcgataagtgtcccccaccacggcctccctcttctccgtacccgcctctcccaaaggataagctgaatccaccgactccctcaatctacctagagaataaacgcgacgctttttttccccctcttcatcaattttgcacgaatcctaacaaccctgtgacagtaatccggggtctagcaggcgcactcaaactggatctgggactgtttagtactaaaactcttgtggaggccaacaacgagcatatggtggaggtgcgcacccaattgttgcagcccgcagatgaaaattgggaccccaccgggactaaaaagatttggcactgcgaatctaacaggtcacacactaccatcgcaaaatacgctcagtaccaggccagcagtttccaggaatctcttagggaagagaatgaaaagaggagtcaccacaaggatcactctgatagcgagtctaccagcagtgacaattcgggacgccgtaggaagggcccttttaagacaattaagtttggtaccaatatagacctgtccgacgacaagaaatggaaattacagctgcatgagttgacaaagcttcccgcatttgtgagagtagttagcgcaggaaacctcctgagccatgtcggtcacaccattctcggcatgaacacagtacaactgtatatgaaagtccccggttctcggaccccaggccaccaggaaaataataatttctgcagcgtgaacattaatatcggaccgggagactgcgaatggtttgtggtgcctgagggttattggggcgtactcaatgacttctgtgagaaaaacaatctgaattttctgatgggctcttggtggccaaatctcgaagacctgtacgaagctaatgtgcccgtgtatcgattcatccagcgacctggcgacctggtctggatcaatgctggtaccgtgcattgggtgcaggccatcggttggtgcaataacatcgcatggaatgtgggcccactcactgcctgccagtataaactggccgtcgagcgctacgaatggaacaaactgcagagtgtgaagagtatagttcctatggtccacctgtcctggaatatggcaaggaacatcaaagtatcggatccgaagctatttgagatgataaaatattgtcttctgcgcactttaaagcaatgtcagactctgcgcgaagccttgattgcagccggaaaagagatcatctggcacggacgaactaaagaagagcctgcacactactgctcaatatgtgaggtggaggtgtttgaccttctgtttgtgaccaatgagtcgaactctcgcaagacatatattgtgcattgtcaagactgtgccagaaagacaagcggtaacctcgagaactttgtagtactggagcagtacaaaatggaagacctcatgcaggtgtatgaccagtttaccttagcaccgccactaccaagcgcaagcagctag

SEQ ID NO: 109574 - DNA, 4071 bp, Artificial Sequence
  derived and/or modified sequence
atgaagagctgcggcgtgagcctggccaccgccgccgccgccgccgccgccttcggcgacgaggagaagaagatggccgccggcaaggccagcggcgagagcgaggaggccagccccagcctgaccgccgaggagagagaggccctgggcggcctggacagcagactgttcggcttcgtgagattccacgaggacggcgccagaaccaaggccctgctgggcaaggccgtgagatgctacgagagcctgatcctgaaggccgagggcaaggtggagagcgacttcttctgccagctgggccacttcaacctgctgctggaggactaccccaaggccctgagcgcctaccagagatactacagcctgcagagcgactactggaagaacgccgccttcctgtacggcctgggcctggtgtacttccactacaacgccttccagtgggccatcaaggccttccaggaggtgctgtacgtggaccccagcttctgcagagccaaggagatccacctgagactgggcctgatgttcaaggtgaacaccgactacgagagcagcctgaagcacttccagctggccctggtggactgcaacccctgcaccctgagcaacgccgagatccagttccacatcgcccacctgtacgagacccagagaaagtaccacagcgccaaggaggcctacgagcagctgctgcagaccgagaacctgagcgcccaggtgaaggccaccgtgctgcagcagctgggctggatgcaccacaccgtggacctgctgggcgacaaggccaccaaggagagctacgccatccagtacctgcagaagagcctggaggccgaccccaacagcggccagagctggtacttcctgggcagatgctacagcagcatcggcaaggtgcaggacgccttcatcagctacagacagagcatcgacaagagcgaggccagcgccgacacctggtgcagcatcggcgtgctgtaccagcagcagaaccagcccatggacgccctgcaggcctacatctgcgccgtgcagctggaccacggccacgccgccgcctggatggacctgggcaccctgtacgagagctgcaaccagccccaggacgccatcaagtgctacctgaacgccaccagaagcaagagctgcagcaacaccagcgccctggccgccagaatcaagtacctgcagaacaccagcgacaactggagcggcggccacgccgtgagccacccccccgtgcagcagcaggcccacagctggtgcctgaccccccagaagctgcagcacctggagcagctgagagccaacagaaacaacctgaaccccgcccagaagctgatgctggagcagctggagagccagttcgtgctgatgcagcagcaccagatgagacccaccggcgtggcccaggtgagaagcaccggcatccccaacggccccaccgccgacagcagcctgcccaccaacagcgtgagcggccagcagccccagctggccctgaccagagtgcccagcgtgagccagcccggcgtgagacccgcctgccccggccagcccctggccaacggccccttcagcgccggccacgtgccctgcagcaccagcagaaccctgggcagcaccgacaccatcctgatcggcaacaaccacatcaccggcagcggcagcaacggcaacgtgccctacctgcagagaaacgccctgaccctgccccacaacagaaccaacctgaccagcagcgccgaggagccctggaagaaccagctgagcaacagcacccagggcctgcacaagggccagagcagccacagcgccggccccaacggcgagagacccctgagcagcaccggccccagccagcacctgcaggccgccggcagcggcatccagaaccagaacggccaccccaccctgcccagcaacagcgtgacccagggcgccgccctgaaccacctgagcagccacaccgccaccagcggcggccagcagggcatcaccctgaccaaggagagcaagcccagcggcaacatcctgaccgtgcccgagaccagcagacacaccggcgagacccccaacagcaccgccagcgtggagggcctgcccaaccacgtgcaccagatgaccgccgacgccgtgtgcagccccagccacggcgacagcaagagccccggcctgctgagcagcgacaacccccagctgagcgccctgctgatgggcaaggccaacaacaacgtgggcaccggcacctgcgacaaggtgaacaacatccaccccgccgtgcacaccaagaccgacaacagcgtggccagcagccccagcagcgccatcagcaccgccacccccagccccaagagcaccgagcagaccaccaccaacagcgtgaccagcctgaacagcccccacagcggcctgcacaccatcaacggcgagggcatggaggagagccagagccccatgaagaccgacctgctgctggtgaaccacaagcccagcccccagatcatccccagcatgagcgtgagcatctaccccagcagcgccgaggtgctgaaggcctgcagaaacctgggcaagaacggcctgagcaacagcagcatcctgctggacaagtgccccccccccagaccccccagcagcccctacccccccctgcccaaggacaagctgaacccccccacccccagcatctacctggagaacaagagagacgccttcttcccccccctgcaccagttctgcaccaaccccaacaaccccgtgaccgtgatcagaggcctggccggcgccctgaagctggacctgggcctgttcagcaccaagaccctggtggaggccaacaacgagcacatggtggaggtgagaacccagctgctgcagcccgccgacgagaactgggaccccaccggcaccaagaagatctggcactgcgagagcaacagaagccacaccaccatcgccaagtacgcccagtaccaggccagcagcttccaggagagcctgagagaggagaacgagaagagaagccaccacaaggaccacagcgacagcgagagcaccagcagcgacaacagcggcagaagaagaaagggccccttcaagaccatcaagttcggcaccaacatcgacctgagcgacgacaagaagtggaagctgcagctgcacgagctgaccaagctgcccgccttcgtgagagtggtgagcgccggcaacctgctgagccacgtgggccacaccatcctgggcatgaacaccgtgcagctgtacatgaaggtgcccggcagcagaacccccggccaccaggagaacaacaacttctgcagcgtgaacatcaacatcggccccggcgactgcgagtggttcgtggtgcccgagggctactggggcgtgctgaacgacttctgcgagaagaacaacctgaacttcctgatgggcagctggtggcccaacctggaggacctgtacgaggccaacgtgcccgtgtacagattcatccagagacccggcgacctggtgtggatcaacgccggcaccgtgcactgggtgcaggccatcggctggtgcaacaacatcgcctggaacgtgggccccctgaccgcctgccagtacaagctggccgtggagagatacgagtggaacaagctgcagagcgtgaagagcatcgtgcccatggtgcacctgagctggaacatggccagaaacatcaaggtgagcgaccccaagctgttcgagatgatcaagtactgcctgctgagaaccctgaagcagtgccagaccctgagagaggccctgatcgccgccggcaaggagatcatctggcacggcagaaccaaggaggagcccgcccactactgcagcatctgcgaggtggaggtgttcgacctgctgttcgtgaccaacgagagcaacagcagaaagacctacatcgtgcactgccaggactgcgccagaaagaccagcggcaacctggagaacttcgtggtgctggagcagtacaagatggaggacctgatgcaggtgtacgaccagttcaccctggccccccccctgcccagcgccagcagctag

SEQ ID NO: 109575 - protein, 1322 aa, Artificial Sequence
  derived and/or modified sequence
MKSCGVSLATAAAAAAAFGDEEKKMAAGKASGESEEASPSLTAEEREALGGLDSRLFGFVRFHEDGARTKALLGKAVRCYESLILKAEGKVESDFFCQLGHFNLLLEDYPKALSAYQRYYSLQSDYWKNAAFLYGLGLVYFHYNAFQWAIKAFQEVLYVDPSFCRAKEIHLRLGLMFKVNTDYESSLKHFQLALVDCNPCTLSNAEIQFHIAHLYETQRKYHSAKEAYEQLLQTENLSAQVKATVLQQLGWMHHTVDLLGDKATKESYAIQYLQKSLEADPNSGQSWYFLGRCYSSIGKVQDAFISYRQSIDKSEASADTWCSIGVLYQQQNQPMDALQAYICAVQLDHGHAAAWMDLGTLYESCNQPQDAIKCYLNATRSKSCSNTSALAARIKYLQNTSDNWSGGHAVSHPPVQQQAHSWCLTPQKLQMRPTGVAQVRSTGIPNGPTADSSLPTNSVSGQQPQLALTRVPSVSQPGVRPACPGQPLANGPFSAGHVPCSTSRTLGSTDTILIGNNHITGSGSNGNVPYLQRNALTLPHNRTNLTSSAEEPWKNQLSNSTQGLHKGQSSHSAGPNGERPLSSTGPSQHLQAAGSGIQNQNGHPTLPSNSVTQGAALNHLSSHTATSGGQQGITLTKESKPSGNILTVPETSRHTGETPNSTASVEGLPNHVHQMTADAVCSPSHGDSKSPGLLSSDNPQLSALLMGKANNNVGTGTCDKVNNIHPAVHTKTDNSVASSPSSAISTATPSPKSTEQTTTNSVTSLNSPHSGLHTINGEGMEESQSPMKTDLLLVNHKPSPQIIPSMSVSIYPSSAEVLKACRNLGKNGLSNSSILLDKCPPPRPPSSPYPPLPKDKLNPPTPSIYLENKRDAFFPPLHQFCTNPNNPVTVIRGLAGALKLDLGLFSTKTLVEANNEHMVEVRTQLLQPADENWDPTGTKKIWHCESNRSHTTIAKYAQYQASSFQESLREENEKRSHHKDHSDSESTSSDNSGRRRKGPFKTIKFGTNIDLSDDKKWKLQLHELTKLPAFVRVVSAGNLLSHVGHTILGMNTVQLYMKVPGSRTPGHQENNNFCSVNINIGPGDCEWFVVPEGYWGVLNDFCEKNNLNFLMGSWWPNLEDLYEANVPVYRFIQRPGDLVWINAGTVHWVQAIGWCNNIAWNVGPLTACQYKLAVERYEWNKLQSVKSIVPMVHLSWNMARNIKVSDPKLFEMIKYCLLRTLKQCQTLREALIAAGKEIIWHGRTKEEPAHYCSICEVEVFDLLFVTNESNSRKTYIVHCQDCARKTSGNLENFVVLEQYKMEDLMQVYDQFTLAPPLPSASS

SEQ ID NO: 109576 - DNA, 3969 bp, Artificial Sequence
  derived and/or modified sequence
atgaagagctgcggagtttccctggcgaccgccgctgccgccgccgccgccttcggtgatgaagaaaaaaaaatggcagctggaaaagcctcaggagagtccgaggaagcatctcccagcctaaccgctgaagagagggaggcattgggtggactggattctagactatttggatttgtccggtttcacgaggacggggcccgcactaaggccttactgggtaaagctgtgcgatgctatgagagcctgatcctcaaggcagagggaaaggtggagtccgatttcttctgccagctcggtcatttcaacctacttctggaggattatccaaaagccctcagcgcataccagcgctactatagtcttcagtcggattattggaagaatgctgcgttcctgtatggcctgggtctggtctacttccattataatgccttccaatgggccattaaagcctttcaggaggtactctacgtcgatccatctttttgccgcgccaaggagatacacctacgactcgggctcatgtttaaggttaatacggattatgaaagctcgctgaagcactttcagctggcactggtagactgcaacccctgcaccttatctaatgccgaaatacagtttcatatcgcccacttgtacgagactcagcgtaagtatcattccgccaaggaagcctacgaacagttgttgcagactgaaaacttaagtgcccaggtgaaggctacagtcctacagcagctcgggtggatgcatcacactgttgatttgcttggcgacaaggctactaaagaatcctatgctattcagtatttgcagaagagcctcgaagcagatccgaactctggacagagctggtatttcctggggcgatgttattcctccattgggaaagtgcaggatgcctttatatcctataggcagtctattgacaagtctgaggccagtgccgacacatggtgtagtatcggtgtgctgtaccaacagcagaatcaacctatggacgcgctgcaggcttacatctgtgcagtccaactagatcatgggcatgctgctgcttggatggatctgggaaccctctatgagtcatgcaatcagccacaggacgccatcaagtgctacctgaacgctactcgtagcaagtcttgttccaatacctctgcactcgccgcccgcattaaatacctccaaaacacgtccgataattggagtggtggacacgccgtatcacatcctcccgtgcagcagcaagcgcactcttggtgcctcacgccccagaaacttcagatgcgcccaaccggcgtggcccaagtacggagcacaggtatcccgaatggacccaccgccgacagcagtctgcctactaacagcgtcagcggacagcaacctcagctggctttaacccgcgtacccagcgtgagccagcctggggtgcgtcctgcatgccctggacagcctctagcaaatggaccattttccgctggccatgtgccatgctcaacctcacggacactggggagcactgatacaattctgatagggaacaatcacattacgggtagcggctcgaacgggaacgtcccttaccttcaacggaatgccctcacactgcctcacaatcggacgaacctgacgtcctccgctgaggagccatggaagaaccaactatcgaatagcacccagggactccacaagggacagtctagccacagtgctggtcctaacggcgaacgacccctctcatcgacaggtccgtcccagcatttacaggcagcaggttcaggtattcagaaccagaatggtcatcccactctgccatcaaattctgtcactcagggcgccgcacttaaccacttgtcaagccacacagccacttccggcggccagcaaggcatcaccctcactaaagagtccaaaccttccggcaatatactcaccgtccctgagacttccagacacacaggcgaaacacctaacagcaccgcctctgtggagggccttcccaaccatgttcaccagatgaccgccgacgcggtgtgctcgccctcccacggagactctaagtcacccgggctcctcagctcagataacccccagctgtccgccctcctcatgggcaaagccaacaataatgtgggcacaggtacatgcgataaggtcaataatatccaccctgccgtccacaccaaaaccgataatagcgtggcctcatctccatcctccgcaatcagcacagccacaccatccccgaagagcaccgagcagacaaccactaatagcgtcacaagtttgaattctccccactccggtctgcatactatcaacggcgagggaatggaagaaagccagagccccatgaagaccgatctcctcctagtgaatcacaaaccgagccctcagattatcccatccatgagcgtcagcatctaccccagttccgccgaggtcttgaaagcatgtagaaatctgggcaaaaacggtctgagcaactctagtattctactcgacaaatgtcccccacccaggcctccctcttcaccttatccccctctgccaaaggataaactgaatcccccaaccccgagtatatatctggaaaataagagagacgcatttttccctccactgcaccagttttgcaccaatcccaataatcccgtgaccgtcattagaggtctcgccggagccttgaagctagatttgggactgttcagcactaagaccctagtggaagcgaataacgaacacatggtggaagtgcgcacacagttgctgcaacctgccgatgagaattgggaccccactggaacaaagaaaatctggcactgtgaatctaacaggagtcatactactatagctaaatacgcacagtatcaggcgtcttcctttcaagagtccttgcgggaggagaatgagaagaggtctcaccataaggaccatagcgactccgagtctacgagctctgacaacagcgggcgacgccgcaaaggacccttcaagaccattaaattcgggaccaacattgacctttcagatgacaaaaagtggaagctacaattacacgagctgacaaaacttccagccttcgtccgcgtcgtgtccgccgggaatcttctaagccacgtggggcacacgatcctaggtatgaacaccgtgcagctgtacatgaaagtcccaggtagtagaacacccgggcaccaggaaaataataatttctgcagcgtgaatatcaacattggcccaggggattgcgagtggttcgttgtgcccgagggttattggggtgtgctgaatgacttttgtgaaaagaataatctgaactttttgatgggttcgtggtggcctaacctggaggatctgtatgaagccaatgtccccgtctacagatttatacagcgaccaggtgacttggtatggattaatgccggcacagtgcactgggtccaagcaattgggtggtgtaataatatcgcctggaatgtgggccctctcacagcctgtcagtacaaactggccgttgagagatatgagtggaacaagctgcaaagcgtcaagtctattgtccccatggtgcacctttcctggaatatggccagaaatataaaagtcagcgatccaaaacttttcgaaatgatcaaatactgcctgctgcgaactctgaaacagtgccagaccctccgggaggctctgatagctgccggtaaagaaattatatggcatggacgcaccaaggaagagcctgctcactactgtagcatctgtgaggtagaggtgtttgacctcctgtttgtgacaaatgagagcaacagtaggaagacctatatcgtgcattgtcaggattgtgctcgaaagacttccggcaacctggagaattttgtcgtgttggaacagtataagatggaagacttaatgcaggtgtacgaccagttcactttggcacctccgctcccatcggcatcatcctag

SEQ ID NO: 109577 - DNA, 3969 bp, Artificial Sequence
  derived and/or modified sequence
atgaagagctgtggggtgtccctggccacagctgctgctgctgctgctgcctttggagatgaggagaagaagatggctgctgggaaggccagcggggagagcgaggaggccagccccagcctgacagctgaggagcgggaggccctgggcggcctggacagccggctgtttggatttgtgcgcttccatgaagatggagcccggaccaaggccctgctgggcaaggctgtgcgctgctatgagagcctcatcctgaaggccgagggcaaggtggagagtgacttcttctgccagctgggccacttcaacctgctgctggaggactaccccaaggccctgagcgcctaccagcgctactacagcctgcagagcgactactggaagaatgctgccttcctgtatggcctgggcctggtgtacttccactacaatgccttccagtgggccatcaaggccttccaggaggtgctgtatgtggaccccagcttctgccgggccaaggagatccacctgcggctgggcctgatgttcaaggtgaacacagattatgagagcagcctgaagcacttccagctggccctggtggactgcaacccctgcaccctgagcaatgctgagatccagttccacatcgcccacctgtatgagacccagaggaagtaccacagcgccaaggaggcctatgagcagctgctgcagacagagaacctgagcgcccaggtgaaggccaccgtgctgcagcagctgggctggatgcaccacacagtggacctgctgggggacaaggccaccaaggagagctatgccatccagtacctgcagaagagcctggaggccgaccccaacagcggccagagctggtacttcctgggccgctgctacagcagcatcggcaaggtgcaggatgccttcatctcctaccggcagagcattgacaagtctgaggccagcgctgacacctggtgcagcattggagtgctgtaccagcagcagaaccagcccatggatgccctgcaggcctacatctgtgctgtgcagctggaccacggccacgccgccgcctggatggacctgggcaccctgtatgagagctgcaaccagccccaggatgccatcaagtgctacctgaatgccaccaggagcaagagctgcagcaacaccagcgccctggccgcccgcatcaagtacctgcagaacaccagtgacaactggagcggcggccatgctgtgagccacccccctgtgcagcagcaggcccacagctggtgcctgaccccccagaagctgcagatgaggcccaccggggtggcccaggtgcgcagcacaggcatccccaacggccccacagctgacagcagcctgcccaccaacagcgtgtctggccagcagccccagctggccctgaccagggtgcccagcgtgtcccagcccggggtgcggcctgcctgccccggccagcccctggccaacggccccttctctgctggccacgtgccctgcagcaccagcaggaccctgggcagcacagacaccatcctgattggcaacaaccacatcaccggcagcggcagcaatggaaatgtgccctacctgcagagaaatgccctgaccctgccccacaacagaaccaacctgaccagcagcgctgaggagccctggaagaaccagctgagcaacagcacccagggcctgcacaagggccagagcagccacagcgctggccccaacggggagcggcccctgagcagcacaggccccagccagcacctgcaggccgccggcagcggcatccagaaccagaatggccaccccaccctgcccagcaacagcgtgacccagggcgccgccctgaaccacctgagcagccacacagccaccagcggcggccagcagggcatcaccctgaccaaggagagcaagcccagcggcaacatcctgactgtgcctgagaccagccgccacactggagagacccccaacagcacagcctctgtggagggcctgcccaaccacgtgcaccagatgacagcagatgctgtgtgcagccccagccatggagacagcaagagccctggcctgctgagcagtgacaacccccagctgagcgccctgctgatgggcaaggccaacaacaacgtgggcaccggcacctgtgacaaggtgaacaacatccaccctgctgtgcacaccaagacagacaacagcgtggccagcagccccagcagcgccatcagcacagccacccccagccccaagagcacagagcagaccaccaccaacagcgtgaccagcctgaacagcccccacagcggcctgcacaccatcaacggggagggcatggaggagagccagagccccatgaagacagacctgctgctggtgaaccacaagcccagcccccagatcatccccagcatgtctgtgtccatctaccccagcagcgctgaggtgctgaaggcctgcaggaacctgggcaagaatggcctgagcaacagcagcatcctgctggacaagtgccccccaccccggccccccagcagcccctacccacccctgcccaaggacaagctgaacccccccacccccagcatctacctggagaacaagagagatgccttcttcccccccctgcaccagttctgcaccaaccccaacaaccctgtgaccgtcatccggggcctggccggggccctgaagctggacctgggcctcttcagcaccaagaccctggtggaggccaacaatgagcacatggtggaggtgaggacccagctgctgcagcctgcagatgagaactgggaccccaccggcaccaagaagatctggcactgtgagagcaacagaagccacaccaccatcgccaagtatgcccagtaccaggccagcagcttccaggagagcctgcgggaggagaatgagaagaggagccaccacaaggaccacagcgacagcgagagcaccagcagtgacaacagcggcagaagaaggaagggccccttcaagaccatcaagtttggcaccaacatcgacctgagtgatgacaagaagtggaagctgcagctgcacgagctgaccaagctgcctgcctttgtgcgggtggtgtctgctggcaacctgctgagccacgtgggccacaccatcctgggcatgaacacagtgcagctgtacatgaaggtgcccggcagcaggaccccaggccaccaggagaacaacaacttctgcagcgtgaacatcaacatcggccctggggactgtgagtggtttgtggtgcctgagggctactggggcgtgctgaatgacttctgtgagaagaacaacctgaacttcctgatgggctcctggtggcccaacctggaggacctgtatgaggccaacgtgcctgtgtaccgcttcatccagaggcctggggacctggtgtggatcaatgccggcaccgtgcactgggtgcaggccatcggctggtgcaacaacatcgcctggaatgtgggccccctgacagcctgccagtacaagctggccgtggagagatatgagtggaacaagctgcagagcgtgaagagcatcgtgcccatggtgcacctgtcctggaacatggccaggaacatcaaggtgtctgaccccaagctgtttgagatgatcaagtactgcctgctgcggaccctgaagcagtgccagaccctgcgggaggccctgattgctgctgggaaggagatcatctggcacggccgcaccaaggaggagcccgcccactactgcagcatctgtgaggtggaggtgtttgacctgctgtttgtgaccaatgaaagcaacagcaggaagacctacatcgtgcactgccaggactgtgccaggaagaccagcggcaacctggagaactttgtggtgctggagcagtacaagatggaggacctgatgcaggtgtatgaccagttcaccctggccccacccctgcccagcgccagcagctag

SEQ ID NO: 109578 - DNA, 2876 bp, Artificial Sequence
  derived and/or modified sequence
atgaaatcctgcggagtgtcgctcgctaccgccgccgctgccgccgccgctttcggtgatgaggaaaagaaaatggcggcgggaaaagcgagcggcgagagcgaggaggcgtcccccagcctgacagccgaggagagggaggcgctcggcggactggacagccgcctctttgggttcgtgagatttcatgaagatggcgccaggacgaaggccctactgggcaaggctgttcgctgctatgaatctctaatcttaaaagctgaaggaaaagtggagtctgatttcttttgtcaattaggtcacttcaacctcttattggaagattatccaaaagcattatctgcataccagaggtactacagtttacagtctgactactggaagaatgctgcctttttatatggtcttggtttggtctacttccattataatgcatttcagtgggcaattaaagcatttcaggaggtgctttatgttgatcccagcttttgtcgagccaaggaaattcatttacgacttgggcttatgttcaaagtgaacacagactatgagtctagtttaaagcattttcagttagctttggttgactgtaatccctgcactttgtccaatgctgaaattcaatttcacattgcccacttatatgaaacccaggttggatgcatcacactgtagatctcctgggagataaagccaccaaggaaagctatgctattcagtatctccaaaagtccttggaagcagatcctaattctggccagtcctggtatttcctcggaaggtgctattcaagtattgggaaagttcaggatgcctttatatcttacaggcagtctattgataaatcagaagcaagtgcagatacatggtgttcaataggtgtgctatatcagcagcaaaatcagcccatggatgctttacaggcctatatttgtgctgtacaattggaccatggccatgctgcagcctggatggacctaggcactctctatgaatcctgcaaccagcctcaggatgccattaaatgctacttaaatgcaactagaagcaaaagttgtagtaatacctctgcacttgcagcacgaattaagtatttacagaatacttctgacaattggagtggtggacatgctgtgtcacatcctccagtacagcaacaagctcattcatggtgtttgacaccacagaaattacagatgagaccaacaggagttgcacaggtacgatctactggaattcctaatgggccaacagctgactcatcactgcctacaaactcagtctctggccagcagccacagcttgctctgaccagagtgcctagcgtctctcagcctggagtccgtcctgcctgccctgggcagcctttggccaatggacccttttctgcaggccatgttccctgtagcacatcaagaacgctgggaagtacagacactattttgataggcaataatcatataacaggaagtggaagtaatggaaacgtgccttacctgcagcgaaacgcactcactctacctcataaccgcacaaacctgaccagcagcgcagaggagccgtggaaaaaccaactatctaactccactcaggggcttcacaaaggtcagagttcacattcggcaggtcctaatggtgaacgacctctctcttccactgggccttcccagcatctccaggcagctggctctggtattcagaatcagaacggacatcccaccctgcctagcaattcagtaacacagggggctgctctcaatcacctctcctctcacactgctacctcaggtggacaacaaggcattaccttaaccaaagagagcaagccttcaggaaacatattgacggtgcctgaaacaagcaggcacactggagagacacctaacagcactgccagtgtcgagggacttcctaatcatgtccatcagatgacggcagatgctgtttgcagtcctagccatggagattctaagtcaccaggtttactaagttcagacaatcctcagctctctgccttgttgatgggaaaagccaataacaatgtgggtactggaacctgtgacaaagtcaataacatccacccagctgttcatacaaagactgataactctgttgcctcttcaccatcttcagccatttcaacagcaacaccttctccaaaatccactgagcagacaaccacaaacagtgttaccagccttaacagccctcacagtgggctacacacaattaatggagaagggatggaagaatctcagagccccatgaaaacagatctgcttctggttaaccacaaacctagtccacagatcataccatcaatgtctgtgtccatataccccagctcagcagaagttctgaaggcatgcaggaatctaggtaaaaatggcttatctaacagtagcattttgttggataaatgtccacctccaagaccaccatcttcaccataccctcccttgccaaaggacaagttgaatccacctacacctagtatttacttggaaaataaacgtgatgctttctttcctccattacatcaattttgtacaaatccgaacaaccctgttacagtaatacgtggccttgctggagctctcattgctgcaggaaaagagattatatggcatgggcggacaaaagaagaaccagctcattactgtagcatttgtgaagtggaggtttttgatctgctttttgtcactaatgagagtaattcacgaaagacctacatagtacattgccaagattgtgcacgaaaaacaagcggaaacttggaaaactttgtggtgctagaacagtacaaaatggaggacctgatgcaagtctatgaccaatttacattagctcctccattaccatccgcctcatcttga

SEQ ID NO: 109579 - DNA, 3969 bp, Artificial Sequence
  derived and/or modified sequence
atgaaatcctgcggagtgtcgctcgctaccgccgccgctgccgccgccgctttcggtgatgaggaaaagaaaatggcggcgggaaaagcgagcggcgagagcgaggaggcgtcccccagcctgacagccgaggagagggaggcgctcggcggactggacagccgcctctttgggttcgtgagatttcatgaagatggcgccaggacgaaggccctactgggcaaggctgttcgctgctatgaatctctaatcttaaaagctgaaggaaaagtggagtctgatttcttttgtcaattaggtcacttcaacctcttattggaagattatccaaaagcattatctgcataccagaggtactacagtttacagtctgactactggaagaatgctgcctttttatatggtcttggtttggtctacttccattataatgcatttcagtgggcaattaaagcatttcaggaggtgctttatgttgatcccagcttttgtcgagccaaggaaattcatttacgacttgggcttatgttcaaagtgaacacagactatgagtctagtttaaagcattttcagttagctttggttgactgtaatccctgcactttgtccaatgctgaaattcaatttcacattgcccacttatatgaaacccagaggaaatatcattctgcaaaagaagcttatgaacaacttttgcagacagagaatctttctgcacaagtaaaagcaactgtcttacaacagttaggttggatgcatcacactgtagatctcctgggagataaagccaccaaggaaagctatgctattcagtatctccaaaagtccttggaagcagatcctaattctggccagtcctggtatttcctcggaaggtgctattcaagtattgggaaagttcaggatgcctttatatcttacaggcagtctattgataaatcagaagcaagtgcagatacatggtgttcaataggtgtgctatatcagcagcaaaatcagcccatggatgctttacaggcctatatttgtgctgtacaattggaccatggccatgctgcagcctggatggacctaggcactctctatgaatcctgcaaccagcctcaggatgccattaaatgctacttaaatgcaactagaagcaaaagttgtagtaatacctctgcacttgcagcacgaattaagtatttacagaatacttctgacaattggagtggtggacatgctgtgtcacatcctccagtacagcaacaagctcattcatggtgtttgacaccacagaaattacagatgagaccaacaggagttgcacaggtacgatctactggaattcctaatgggccaacagctgactcatcactgcctacaaactcagtctctggccagcagccacagcttgctctgaccagagtgcctagcgtctctcagcctggagtccgtcctgcctgccctgggcagcctttggccaatggacccttttctgcaggccatgttccctgtagcacatcaagaacgctgggaagtacagacactattttgataggcaataatcatataacaggaagtggaagtaatggaaacgtgccttacctgcagcgaaacgcactcactctacctcataaccgcacaaacctgaccagcagcgcagaggagccgtggaaaaaccaactatctaactccactcaggggcttcacaaaggtcagagttcacattcggcaggtcctaatggtgaacgacctctctcttccactgggccttcccagcatctccaggcagctggctctggtattcagaatcagaacggacatcccaccctgcctagcaattcagtaacacagggggctgctctcaatcacctctcctctcacactgctacctcaggtggacaacaaggcattaccttaaccaaagagagcaagccttcaggaaacatattgacggtgcctgaaacaagcaggcacactggagagacacctaacagcactgccagtgtcgagggacttcctaatcatgtccatcagatgacggcagatgctgtttgcagtcctagccatggagattctaagtcaccaggtttactaagttcagacaatcctcagctctctgccttgttgatgggaaaagccaataacaatgtgggtactggaacctgtgacaaagtcaataacatccacccagctgttcatacaaagactgataactctgttgcctcttcaccatcttcagccatttcaacagcaacaccttctccaaaatccactgagcagacaaccacaaacagtgttaccagccttaacagccctcacagtgggctacacacaattaatggagaagggatggaagaatctcagagccccatgaaaacagatctgcttctggttaaccacaaacctagtccacagatcataccatcaatgtctgtgtccatataccccagctcagcagaagttctgaaggcatgcaggaatctaggtaaaaatggcttatctaacagtagcattttgttggataaatgtccacctccaagaccaccatcttcaccataccctcccttgccaaaggacaagttgaatccacctacacctagtatttacttggaaaataaacgtgatgctttctttcctccattacatcaattttgtacaaatccgaacaaccctgttacagtaatacgtggccttgctggagctcttaagttagacctgggacttttctctactaaaactttggtggaagctaacaatgaacatatggtagaagtgaggacacagttgttgcagccagcagatgaaaactgggatcccactggaacaaagaaaatctggcattgtgaaagtaatagatctcatactacaattgctaaatatgcacagtaccaggcctcctcattccaggaatcattgagagaagaaaatgaaaaaagaagtcatcataaagaccactcagatagtgaatctacatcgtcagataattctgggaggaggaggaaaggaccctttaaaaccataaagtttgggaccaatattgacctatctgatgacaaaaagtggaagttgcagctacatgagctgactaaacttcctgcttttgtgcgtgtcgtatcagcaggaaatcttctaagccatgttggtcataccatattgggcatgaacacagttcaactatacatgaaagttccagggagcagaacaccaggtcatcaggaaaataacaacttctgttcagttaacataaatattggcccaggtgactgtgaatggtttgttgttcctgaaggttactggggtgttctgaatgacttctgtgaaaaaaataatttgaatttcctaatgggttcttggtggcccaatcttgaagatctttatgaagcaaatgttccagtgtataggtttattcagcgacctggagatttggtctggataaatgcaggcactgttcattgggttcaggctattggctggtgcaacaacattgcttggaatgttggtccacttacagcctgccagtataaattggcagtggaacggtacgaatggaacaaattgcaaagtgtgaagtcaatagtacccatggttcatctttcctggaatatggcacgaaatatcaaggtctcagatccaaagctttttgaaatgattaagtattgtcttctaagaactctgaagcaatgtcagacattgagggaagctctcattgctgcaggaaaagagattatatggcatgggcggacaaaagaagaaccagctcattactgtagcatttgtgaagtggaggtttttgatctgctttttgtcactaatgagagtaattcacgaaagacctacatagtacattgccaagattgtgcacgaaaaacaagcggaaacttggaaaactttgtggtgctagaacagtacaaaatggaggacctgatgcaagtctatgaccaatttacattagctcctccattaccatccgcctcatcttga

SEQ ID NO: 109580 - DNA, 3969 bp, Artificial Sequence
  derived and/or modified sequence
atgaagagctgcggcgtgagcctggccaccgccgccgccgccgccgccgcgtttggggatgaagaaaagaagatggccgcaggaaaggcctctggagaatcagaagaagccagtcccagtctgacggctgaggagagggaggcactcggaggtctggactctagattgttcggcttcgtcaggttccatgaggacggagcgagaacaaaagcgctgctggggaaagcggtgcgatgttacgagtctctaattctcaaggcagagggcaaagtcgaatcagactttttctgccagttaggtcattttaatctcctgctggaagactatcccaaagctctgtccgcgtaccagcgatactactccctccagagcgactactggaagaacgcagcatttctgtacggcctgggactcgtgtatttccactataacgcattccagtgggccattaaggccttccaggaggttttgtacgtagacccctccttctgtcgtgccaaggaaattcacctgcgtttgggattaatgttcaaggtaaatactgactacgagtctagcctcaagcactttcagctggccctagtcgactgcaatccctgcacactgagtaatgccgagattcagtttcacatcgcccatttgtacgaaacacaacgcaagtaccatagcgccaaggaagcctacgagcagctcctacagactgagaatctctctgcgcaagtgaaagcaaccgtgctgcaacagctcggttggatgcatcataccgtggatttgctgggggacaaggcgacaaaggagtcctatgccatccaatacttacaaaaaagcctcgaggccgacccaaactccggacagtcatggtatttcctcggcagatgttattccagtataggcaaggtgcaggatgcttttattagttatcgtcagtccattgacaagtcagaagctagcgccgacacctggtgttcaattggagttctttatcagcagcagaaccagccgatggacgctctacaggcctacatctgtgccgttcaactggaccatggccacgccgccgcatggatggatctgggaaccttatatgagtcctgtaaccagccccaggatgcgatcaagtgctatttgaacgcaacacggagtaagagctgtagcaacacctcagccctagcggcaaggatcaagtatttgcagaatactagtgacaattggtccggaggacatgcagtaagtcacccacctgtgcagcagcaggcccactcttggtgcctcactccacaaaagttgcagatgagacccactggcgtcgcccaagtgcggagcacaggaatccctaacggacctacagccgatagctctctgcccaccaatagtgtatctggccagcagccacagttagcacttaccagggtgccctctgtatcacagccaggcgttcgtcctgcctgtcccggtcaacctttggcaaacggacccttttctgctgggcacgtgccgtgttccacgagccggacgctcgggagtacagacacaatcttgatagggaacaatcacatcactggtagcggcagtaacggtaacgtgccatatctgcaaaggaacgcgctgacactgccccataaccgtaccaacctgaccagtagcgcggaggaaccatggaaaaaccagcttagtaactctacacagggcctccacaaagggcaatcctctcactctgcagggccaaacggggagcggcccttgtcttcaactggcccttctcagcacctgcaggctgcgggctccggcattcagaaccaaaacggtcaccctacgcttcctagcaactctgtgacacagggggctgccttaaaccatctgtcctcacacactgcgacgagcggtgggcagcaaggcattacattaaccaaagagagcaaaccgtcgggaaacattctcacagttcccgaaacatcacgacacaccggagaaacaccaaactccactgctagcgttgagggcctcccgaaccatgtacaccagatgaccgctgacgctgtgtgtagtccatctcatggcgactccaagagtccaggactgctttcctctgacaacccccaactttcggctcttctgatggggaaagctaataataacgtcggcactggcacttgcgataaagtcaacaacatccatcccgctgtccacacaaaaaccgataactcagtagcgtccagtccctctagtgccatcagcacggcaacaccttcaccaaaatcaaccgagcagacaactactaacagcgtgacctccctgaatagtccacattcaggcctgcacacaatcaacggcgaagggatggaggaatcccagtcccccatgaaaacagacttgctgctggttaaccacaagccgtctccacagattataccctcaatgagtgtctcgatctatccgagctcagccgaggtgctaaaggcctgtcgtaatcttgggaagaatggcctcagcaattcatcaattttgctggacaagtgtccccctccgcggccgccatctagcccttatccgcccctgccgaaagacaagctgaatccccccaccccctcaatctacctcgaaaataagcgggatgccttcttcccgcccctgcaccagttttgtactaatccaaacaatccagtgacagtgattcgtggcttggccggcgccctcaaattagacctggggcttttctcaaccaagaccctggtggaagcaaataacgaacatatggttgaagtacgcacccaactgctgcagcctgccgacgaaaactgggacccaactggaaccaaaaagatctggcattgtgagagcaatcgcagccacactactattgcaaagtacgcccagtatcaagcatcttcgttccaggaaagtttaagggaggaaaacgaaaaacgctcacatcataaggatcactcagatagcgaatcgacatcttccgacaatagtgggagacgccgtaaggggccctttaagactatcaagtttggcacaaacattgatctgtccgacgataagaaatggaagcttcagctgcacgagctgactaaactgcccgcctttgtccgcgtcgtgtccgccgggaaccttctgtcccacgtcgggcatacaatccttggcatgaataccgtgcagctgtacatgaaggtcccggggtctagaaccccaggccaccaggaaaataacaatttttgctccgttaatatcaatattggtcccggggactgcgaatggttcgtcgttccggaggggtactggggcgtgcttaatgacttctgtgagaaaaacaatctcaatttccttatggggagctggtggcccaacctggaggacctttacgaggccaacgttcccgtatatcgcttcatccagaggccgggtgatctggtctggatcaatgccgggactgtgcactgggtgcaggctataggatggtgcaataatatcgcctggaacgttggccctctcacggcttgccagtacaaactcgcggtggaacggtacgagtggaataaactgcagtccgttaagagtatcgttcctatggtacatctgagctggaacatggccagaaacataaaagtgagcgatcccaaactttttgaaatgatcaaatactgcctattaaggactttgaagcaatgccaaacattacgggaagcattgattgccgcagggaaggagatcatttggcatggccggactaaggaagaacccgcgcactattgcagcatctgtgaagtggaggttttcgacctcctgttcgtgacgaatgaaagtaactcccgcaaaacttatatagttcactgtcaggattgtgcgagaaaaacctccgggaatctggaaaactttgtggtgctggagcagtacaaaatggaagatctcatgcaagtctacgaccagtttacattagcaccccctctcccatccgcctcttcctag

SEQ ID NO: 109581 - DNA, 3969 bp, Artificial Sequence
  derived and/or modified sequence
atgaagtcatgtggcgtcagtctagcaaccgccgcagctgccgctgcggcatttggcgatgaggagaagaagatggcagccggtaaggcgtctggcgaaagcgaagaggcaagcccctccctgacggccgaggagcgggaagcattagggggactggactctagactgttcggctttgttcgattccacgaagatggcgctcgtacaaaggctctgttgggaaaggccgtgagatgttacgaaagccttatactcaaggctgagggtaaggtggagtctgatttcttttgccagctgggccacttcaacctcctgttagaggattacccaaaggccttaagcgcgtaccagcggtactattcccttcagagcgactattggaagaacgctgccttcttatacggcttaggactggtgtacttccactataacgcattccagtgggccatcaaggcatttcaggaagtcctttatgtcgacccaagcttctgtagggccaaggagatccatctgcggctcggattgatgtttaaggtcaacactgattacgaatccagtctaaaacatttccagcttgccctggtagactgtaacccctgtaccctgtccaacgcagagatccagttccatatagctcacctatacgaaacgcagaggaaataccactcggccaaagaggcttatgagcagttgcttcaaacagagaacctgtcagcgcaggtgaaagcaacagtcctgcagcagctgggctggatgcatcacacggttgacctgctgggcgacaaagctacaaaggagagctacgcaatacagtatctgcagaaaagcctggaggccgatcccaattccggccagtcctggtattttcttggacgttgttacagctccatcgggaaggtgcaggatgcctttattagctaccgacaaagtatcgataagtcagaggcatctgctgacacttggtgctctattggcgtgttgtaccagcagcaaaaccagcctatggacgccctgcaagcctacatctgcgccgtgcagctggatcatggtcacgcggcagcctggatggatctcggaactctgtatgagtcctgtaatcagccacaagacgcgatcaagtgttatctcaacgccacaagaagcaagagttgctctaacacctcagctctagcggctcgaataaaatatcttcagaatacgagcgacaactggtctggtgggcacgccgtatctcatccacccgtccaacagcaagcccattcttggtgtttgactcctcagaaactacagatgaggcctacgggcgtggcacaggttcgttcaactgggattccgaacggcccaaccgccgattcatccctgcccacgaactcggtcagcggccagcagccgcagttagctctcaccagggtgcccagcgtgtctcagccaggagtgcgcccagcgtgtcctggacagcccttagccaacggtccctttagtgccggtcatgtgccatgcagcacatcaagaacactgggatccaccgatacaatcctaattggcaataaccatatcaccggtagcggctcgaatgggaacgtgccctacttacagcggaacgccctgactctgccgcataaccgcacgaatctgacaagttccgccgaagagccatggaaaaaccagctctccaattccacccagggcctccataagggtcagtcaagccatagtgctggaccaaacggggaaagaccactgagttccacaggtccatctcagcatctccaagcggcaggatccggaattcagaaccaaaacgggcatcccactttgccctcaaactctgtgacccagggtgccgcactcaaccatctttccagtcacacagctacttctgggggtcaacagggaattactctcaccaaggagagtaagcctagcggaaacatactgacagtgcccgagacgtcccgccatactggagagacgcccaatagtacagcttccgtagaagggctgcctaaccacgtgcatcagatgactgccgacgctgtgtgtagtcctagtcacggggatagcaaatcccctggcttactgtcatccgataacccccagctctccgccttactgatggggaaagctaacaacaatgttggtactgggacatgtgataaggtgaacaatatccacccagcagtgcacacaaagaccgacaacagcgtggcaagttccccctcaagcgctatatccactgccacaccatcaccaaagagtaccgagcagaccacaaccaatagcgtgacaagcttgaactccccccactcagggttgcacactataaacggcgagggcatggaagagtcccagagcccgatgaaaacggacctactcttggtgaaccataaaccaagtcctcaaattatcccatccatgtctgtcagtatctacccatcatctgctgaagtgctgaaggcctgcagaaacctcgggaagaacgggctctcgaactcatccattttattggataaatgcccgcctcccagaccacctagtagcccgtaccccccactgcccaaggataaattaaatcctcccacgcctagcatctacctggagaacaagagagacgccttctttcctccactccatcagttctgcactaatcccaacaaccccgtaactgtcattcgcggtctcgctggtgcgctcaaactcgacctgggcctttttagcactaaaactctcgttgaggccaacaacgaacacatggttgaggtccgaactcagctcttgcaacctgccgacgagaactgggatcctaccgggacaaagaaaatctggcattgcgaaagcaatagatcacacactaccatagcaaaatacgcacaatatcaggctagctcattccaggagagccttagggaggagaacgaaaaacgctctcatcacaaggatcacagcgacagtgaatctacaagcagcgataattccggcaggaggcgcaaaggacccttcaaaacaatcaagttcgggacaaacatcgatctgagcgacgataaaaaatggaagctgcagttacacgaactgaccaagctgcctgccttcgtgagagtcgtctcggctggcaacctgctatctcacgtgggacacaccatcctcggaatgaacactgtgcagctctacatgaaggttccagggagcagaacacccggacaccaggaaaataacaatttttgctccgttaatataaacattgggcctggggattgtgaatggttcgtcgtgcctgagggatactggggagtactcaatgacttctgcgaaaagaacaatctgaattttctgatggggtcttggtggccaaatcttgaggacctgtacgaagccaacgttcctgtgtataggtttatacagagacctggcgacctggtttggatcaacgctggaaccgtgcattgggtgcaggcaattgggtggtgcaataacattgcctggaatgtaggacccctgaccgcctgtcagtacaaactggctgtggagagatacgaatggaataagctgcaatccgttaaatctatagtacctatggtacacctgtcttggaacatggccaggaatataaaagtgtccgaccccaagctcttcgagatgattaagtactgcctgctacggactctgaagcaatgtcagaccttgagggaggcacttatcgctgccggtaaggaaatcatctggcacgggaggacgaaagaagaacccgcacactattgttcgatctgtgaggtagaagtcttcgacctgctgtttgtgaccaatgagtcaaacagtcggaagacctacatcgtccattgccaggattgcgccaggaaaacttccggaaacttagaaaatttcgttgtgcttgagcagtacaaaatggaggatctcatgcaagtgtatgaccaattcaccctcgctccgcctttgccctcagcaagttcttag

SEQ ID NO: 109582 - DNA, 3969 bp, Artificial Sequence
  derived and/or modified sequence
atgaagagctgcggcgtgagcctggccaccgccgccgccgccgccgccgccttcggcgacgaggagaagaagatggccgccggcaaggccagcggcgagagcgaggaggccagccccagcctgaccgccgaggagagagaggccctgggcggcctggacagcagactgttcggcttcgtgagattccacgaggacggcgccagaaccaaggccctgctgggcaaggccgtgagatgctacgagagcctgatcctgaaggccgagggcaaggtggagagcgacttcttctgccagctgggccacttcaacctgctgctggaggactaccccaaggccctgagcgcctaccagagatactacagcctgcagagcgactactggaagaacgccgccttcctgtacggcctgggcctggtgtacttccactacaacgccttccagtgggccatcaaggccttccaggaggtgctgtacgtggaccccagcttctgcagagccaaggagatccacctgagactgggcctgatgttcaaggtgaacaccgactacgagagcagcctgaagcacttccagctggccctggtggactgcaacccctgcaccctgagcaacgccgagatccagttccacatcgcccacctgtacgagacccagagaaagtaccacagcgccaaggaggcctacgagcagctgctgcagaccgagaacctgagcgcccaggtgaaggccaccgtgctgcagcagctgggctggatgcaccacaccgtggacctgctgggcgacaaggccaccaaggagagctacgccatccagtacctgcagaagagcctggaggccgaccccaacagcggccagagctggtacttcctgggcagatgctacagcagcatcggcaaggtgcaggacgccttcatcagctacagacagagcatcgacaagagcgaggccagcgccgacacctggtgcagcatcggcgtgctgtaccagcagcagaaccagcccatggacgccctgcaggcctacatctgcgccgtgcagctggaccacggccacgccgccgcctggatggacctgggcaccctgtacgagagctgcaaccagccccaggacgccatcaagtgctacctgaacgccaccagaagcaagagctgcagcaacaccagcgccctggccgccagaatcaagtacctgcagaacaccagcgacaactggagcggcggccacgccgtgagccacccccccgtgcagcagcaggcccacagctggtgcctgaccccccagaagctgcagatgagacccaccggcgtggcccaggtgagaagcaccggcatccccaacggccccaccgccgacagcagcctgcccaccaacagcgtgagcggccagcagccccagctggccctgaccagagtgcccagcgtgagccagcccggcgtgagacccgcctgccccggccagcccctggccaacggccccttcagcgccggccacgtgccctgcagcaccagcagaaccctgggcagcaccgacaccatcctgatcggcaacaaccacatcaccggcagcggcagcaacggcaacgtgccctacctgcagagaaacgccctgaccctgccccacaacagaaccaacctgaccagcagcgccgaggagccctggaagaaccagctgagcaacagcacccagggcctgcacaagggccagagcagccacagcgccggccccaacggcgagagacccctgagcagcaccggccccagccagcacctgcaggccgccggcagcggcatccagaaccagaacggccaccccaccctgcccagcaacagcgtgacccagggcgccgccctgaaccacctgagcagccacaccgccaccagcggcggccagcagggcatcaccctgaccaaggagagcaagcccagcggcaacatcctgaccgtgcccgagaccagcagacacaccggcgagacccccaacagcaccgccagcgtggagggcctgcccaaccacgtgcaccagatgaccgccgacgccgtgtgcagccccagccacggcgacagcaagagccccggcctgctgagcagcgacaacccccagctgagcgccctgctgatgggcaaggccaacaacaacgtgggcaccggcacctgcgacaaggtgaacaacatccaccccgccgtgcacaccaagaccgacaacagcgtggccagcagccccagcagcgccatcagcaccgccacccccagccccaagagcaccgagcagaccaccaccaacagcgtgaccagcctgaacagcccccacagcggcctgcacaccatcaacggcgagggcatggaggagagccagagccccatgaagaccgacctgctgctggtgaaccacaagcccagcccccagatcatccccagcatgagcgtgagcatctaccccagcagcgccgaggtgctgaaggcctgcagaaacctgggcaagaacggcctgagcaacagcagcatcctgctggacaagtgccccccccccagaccccccagcagcccctacccccccctgcccaaggacaagctgaacccccccacccccagcatctacctggagaacaagagagacgccttcttcccccccctgcaccagttctgcaccaaccccaacaaccccgtgaccgtgatcagaggcctggccggcgccctgaagctggacctgggcctgttcagcaccaagaccctggtggaggccaacaacgagcacatggtggaggtgagaacccagctgctgcagcccgccgacgagaactgggaccccaccggcaccaagaagatctggcactgcgagagcaacagaagccacaccaccatcgccaagtacgcccagtaccaggccagcagcttccaggagagcctgagagaggagaacgagaagagaagccaccacaaggaccacagcgacagcgagagcaccagcagcgacaacagcggcagaagaagaaagggccccttcaagaccatcaagttcggcaccaacatcgacctgagcgacgacaagaagtggaagctgcagctgcacgagctgaccaagctgcccgccttcgtgagagtggtgagcgccggcaacctgctgagccacgtgggccacaccatcctgggcatgaacaccgtgcagctgtacatgaaggtgcccggcagcagaacccccggccaccaggagaacaacaacttctgcagcgtgaacatcaacatcggccccggcgactgcgagtggttcgtggtgcccgagggctactggggcgtgctgaacgacttctgcgagaagaacaacctgaacttcctgatgggcagctggtggcccaacctggaggacctgtacgaggccaacgtgcccgtgtacagattcatccagagacccggcgacctggtgtggatcaacgccggcaccgtgcactgggtgcaggccatcggctggtgcaacaacatcgcctggaacgtgggccccctgaccgcctgccagtacaagctggccgtggagagatacgagtggaacaagctgcagagcgtgaagagcatcgtgcccatggtgcacctgagctggaacatggccagaaacatcaaggtgagcgaccccaagctgttcgagatgatcaagtactgcctgctgagaaccctgaagcagtgccagaccctgagagaggccctgatcgccgccggcaaggagatcatctggcacggcagaaccaaggaggagcccgcccactactgcagcatctgcgaggtggaggtgttcgacctgctgttcgtgaccaacgagagcaacagcagaaagacctacatcgtgcactgccaggactgcgccagaaagaccagcggcaacctggagaacttcgtggtgctggagcagtacaagatggaggacctgatgcaggtgtacgaccagttcaccctggccccccccctgcccagcgccagcagctag

SEQ ID NO: 109583 - protein, 211 aa, Artificial Sequence
  derived and/or modified sequence
MGPQHLRLVQLFCLLGAISTLPRMSCGAGCYKTQKGTARGVVGFKGCSSSSSYPAQISYLVSPPGVSIASYSRVCRSYLCNNLTNLEPFVKLKASTPKSITSASCSCPTCVGEHMKDCLPNFVTTNSCPLAASTCYSSTLKFQAGFLNTTFLLMGCAREHNQLLADFHHIGSIKVTEVLNILEKSQIVGAASSRQDPAWGVVLGLLFAFRD

SEQ ID NO: 109584 - DNA, 636 bp, Artificial Sequence
  derived and/or modified sequence
atgggcccccagcacctgagactggtgcagctgttctgcctgctgggcgccatcagcaccctgcccagaatgagctgcggcgccggctgctacaagacccagaagggcaccgccagaggcgtggtgggcttcaagggctgcagcagcagcagcagctaccccgcccagatcagctacctggtgagcccccccggcgtgagcatcgccagctacagcagagtgtgcagaagctacctgtgcaacaacctgaccaacctggagcccttcgtgaagctgaaggccagcacccccaagagcatcaccagcgccagctgcagctgccccacctgcgtgggcgagcacatgaaggactgcctgcccaacttcgtgaccaccaacagctgccccctggccgccagcacctgctacagcagcaccctgaagttccaggccggcttcctgaacaccaccttcctgctgatgggctgcgccagagagcacaaccagctgctggccgacttccaccacatcggcagcatcaaggtgaccgaggtgctgaacatcctggagaagagccagatcgtgggcgccgccagcagcagacaggaccccgcctggggcgtggtgctgggcctgctgttcgccttcagagactag

SEQ ID NO: 109585 - DNA, 636 bp, Artificial Sequence
  derived and/or modified sequence
atgggcccccaacatttgagactcgtccagcttttctgtttactgggcgctatatcaaccctgcctaggatgtcctgtggagcggggtgttacaagacgcaaaaaggcacagccagaggtgtggttgggttcaaaggctgttcttcctccagctcatatccggcccaaatctcctatctggtgtcccctccaggcgtctcaatagccagttactcgagagtatgtagatcctatttatgcaacaatcttacaaaccttgaaccattcgttaaacttaaggccagtacgccaaagagtataacttcagcctcctgcagttgccccacatgtgttggggagcatatgaaagattgcctacccaattttgtgaccaccaatagctgtcccttagccgcctccacatgctactcatctacgctcaagtttcaggcaggttttcttaatacgacattcttgctgatgggatgcgctcgggagcacaatcagctgctggctgatttccaccacatcggatcgattaaagtgacagaagtcctcaatattctcgagaagagtcaaatcgtaggggctgcatcatccaggcaagatcccgcatggggcgtagtgttaggtcttctcttcgcatttagagactag

SEQ ID NO: 109586 - DNA, 705 bp, Artificial Sequence
  derived and/or modified sequence
atgggaccccagcatttgagacttgtgcagctgttctgccttctaggggccatctccactctgcctcgtatgtcctgtggggctggatgctataagacccagaaagggactgcaaggggagttgtgggctttaaaggctgcagctcgtcttcgtcttaccctgcgcaaatctcctaccttgtttccccacccggagtgtccattgcctcctacagtcgcgtctgccggtcttatctctgcaacaacctcaccaatttggagccttttgtgaaactcaaggccagcactcctaagtctatcacatctgcgtcctgtagctgcccgacctgtgtgggcgagcacatgaaggattgcctcccaaattttgtcaccactaattcttgccccttggctgcttctacgtgttacagttccaccttaaaatttcaggcagggtttctcaataccaccttcctcctcatggggtgtgctcgtgaacataaccagcttttagcagattttcatcatattgggagcatcaaagtgactgaggtcctcaacatcttagagaagtctcagattgttggtgcagcatcctccaggcaagatcctgcttggggtgtcgtcttaggcctcctgtttgccttcagggactgaccatctagctgcacccgacaagcacccagactctttcacataacaaataaaatagcagagttccctttc

SEQ ID NO: 109587 - DNA, 636 bp, Artificial Sequence
  derived and/or modified sequence
atgggcccccagcacctgcggctggtgcagctgttctgcctgctgggcgccatcagcaccctgcccaggatgagctgtggggccggctgctacaagacccagaagggcacagcccggggcgtggtgggcttcaagggctgcagcagcagcagcagctacccagcccagatctcctacctggtgtccccacctggggtgtccatcgccagctacagccgggtgtgccgcagctacctgtgcaacaacctgaccaacctggagccctttgtgaagctgaaggccagcacccccaagagcatcaccagcgccagctgcagctgccccacctgtgtgggggagcacatgaaggactgcctgcccaactttgtgaccaccaacagctgccccctggccgccagcacctgctacagcagcaccctgaagttccaggccggcttcctgaacaccaccttcctgctgatgggctgtgcccgggagcacaaccagctgctggccgacttccaccacatcggcagcatcaaggtgacagaggtgctgaacatcctggagaagagccagatcgtgggcgccgccagcagccggcaggaccctgcctggggcgtggtgctgggcctgctgtttgccttccgggactag

SEQ ID NO: 109588 - DNA, 636 bp, Artificial Sequence
  derived and/or modified sequence
atgggcccccagcacctgcggctggtgcagctgttctgcctgctgggggccatcagcacattaccaagaatgtcatgcggagccggctgttacaagacacagaaaggcaccgctcgaggcgtcgtcgggtttaaaggctgttcgagcagtagttcctaccccgcgcaaataagctatctggtgagcccccctggcgtcagtatcgccagttactctagagtctgtcgttcttacctatgtaacaatctgactaatctggaaccctttgtgaagctgaaagctagtactcctaaatctattacaagtgccagttgtagttgccccacgtgcgtcggcgaacatatgaaagattgccttccaaatttcgttacaactaattcatgtccactggcggcctcaacttgctattcatccacactgaaatttcaggccgggttcttgaacaccacgtttttattgatgggctgcgcacgcgagcataaccagctcttggctgattttcaccacattggctctattaaggtaacagaggtcctgaatattctggagaagtctcaaatcgtgggcgctgcctcaagtcgtcaagatcccgcatggggggtggtgctggggttgctcttcgcctttcgcgactag

SEQ ID NO: 109589 - DNA, 636 bp, Artificial Sequence
  derived and/or modified sequence
atgggtccgcagcacctaagactggtgcagttgttctgtcttttgggtgcaatttctaccttgccaaggatgtcctgtggcgcaggctgctataaaacccagaaggggaccgcgagaggggttgtgggctttaagggctgtagctcatcttccagctatccggcacaaatcagttacctggtgtccccaccaggagtgtccattgcctcatatagccgggtatgtcgttcctacctttgcaataatctcaccaatttagaacctttcgtgaagctcaaagcgagcaccccgaagtcaatcactagcgcaagctgttcctgtccgacctgtgtcggcgagcacatgaaggactgcctgccaaattttgtgactactaattcctgcccactcgctgcatctacttgttactccagcacccttaagttccaggctggcttcttaaacaccactttcctgctcatgggttgtgctcgagaacataaccagcttctggccgatttccaccacatcggatctatcaaagttacggaagtcctgaacattctggaaaaaagccaaatcgtcggcgcagcatctagtcggcaggacccggcttggggagtggttcttggtcttctgttcgcatttagagactag

SEQ ID NO: 109590 - DNA, 1918 bp, Artificial Sequence
  derived and/or modified sequence
agtctacagaataaaactaaattacttcctagtattgaggaggcgtggagcctaccaattcccgcagagcttacctccaggcagggtgccatgaacacagcacagcagaatacttctgacaattggagtggtggacatgctgtgtcacatcctccagtacagcaacaagctcattcatggtgtttgacaccacagaaattacagcatttggaacagctccgcgcaaatagaaataatttaaatccagcacagaaactgatgctggaacagctggaaagtcagtttgtcttaatgcaacaacaccaaatgagaccaacaggagttgcacaggtacgatctactggaattcctaatgggccaacagctgactcatcactgcctacaaactcagtctctggccagcagccacagcttgctctgaccagagtgcctagcgtctctcagcctggagtccgtcctgcctgccctgggcagcctttggccaatggacccttttgcaggccatgttccctgtagcacatcaagaacgctgggaagtacagacactattttgataggcaataatcatataacaggaagtggaagtaatggaaacgtgccttacctgcagcgaaacgcactcactctacctcataaccgcacaaacctgaccagcagcgcagaggagccgtggaaaaaccaactatctaactccactcaggggcttcacaaaggtcagagttcacattcggcaggtcctaatggtgaacgacctctctcttccactgggccttcccagcatctccaggcagctggctctggtattcagaatcagaacggacatcccaccctgcctagcaattcagtaacacagggggctgctctcaatcacctctcctctcacactgctacctcaggtggacaacaaggcattaccttaaccaaagagagcaagccttcaggaaacatattgacggtgcctgaaacaagcaggcacactggagagacacctaacagcactgccagtgtcgagggacttcctaatcatgtccatcagatgacggcagatgctgtttgcagtcctagccatggagattctaagtcaccaggtttactaagttcagacaatcctcagctctctgccttgttgatgggaaaagccaataacaatgtgggtactggaacctgtgacaaagtcaataacatccacccagctgttcatacaaagactgataactctgttgcctcttcaccatcttcagccatttcaacagcaacaccttctccaaaatccactgagcagacaaccacaaacagtgttaccagccttaacagccctcacagtgggctacacacaattaatggagaagggatggaagaatctcagagccccatgaaaacagatctgcttctggttaaccacaaacctagtccacagatcataccatcaatgtctgtgtccatataccccagctcagcagaagttctgaaggcatgcaggaatctaggtaaaaatggcttatctaacagtagcattttgttggataaatgtccacctccaagaccaccatcttcaccataccctcccttgccaaaggacaagttgaatccacctacacctagtatttacttggaaaataaacgtgatgctttctttcctccattacatcaattttgtacaaatccgaacaaccctgttacagtaatacgtggccttgctggagctcttaagttagacctgggacttttctctactaaaactttggtggaagctaacaatgaacatatggtagaagtgaggacacagttgttgcagccagcagatgaaaactgggatcccactggaacaaagaaaatctggcattgtgaaagtaatagatctcatactacaattgctaaatatgcacagtaccaggcctcctcattccaggaatcattg

SEQ ID NO: 109591 - protein, 373 aa, Artificial Sequence
  derived and/or modified sequence
MGFPVLCRGWRRTWPGCASWLGAPPPQKPLLSPLLLNHRSSKSSRPKLQAACSSIQEVRWCTRLEMPDNLYTFVLKVKDRTDIIFEVGDEQQLNSWMAELSECTGRGLESTEAEMHIPSALEPSTSSSPRGSTDSLNQGASPGGLLDPACQKTDHFLSCYPWFHGPISRVKAAQLVQLQGPDAHGVFLVRQSETRRGEYVLTFNFQGIAKHLRLSLTERGQCRVQHLHFPSVVDMLHHFQRSPIPLECGAACDVRLSSYVVVVSQPPGSCNTVLFPFSLPHWDSESLPHWGSELGLPHLSSSGCPRGLSPEGLPGRSSPPEQIFHLVPSPEELANSLQHLEHEPVNRARDSDYEMDSSSRSHLRAIDNQYTPL

SEQ ID NO: 109592 - DNA, 1122 bp, Artificial Sequence
  derived and/or modified sequence
atggggtttccagtgctgtgtcgcggatggcggcgcacctggccaggttgcgccagctggctcggcgctcccccgccacagaagcctcttctaagtcccctgctgttgaaccatcggagttccaaatctagtcggcctaaattgcaggcggcatgcagttctatccaagaggtcaggtggtgcacacggctcgaaatgcctgataatctctacacctttgtcctgaaagtgaaagacagaaccgatattatatttgaggtcggggacgagcaacagttgaatagttggatggccgaattgtctgagtgcaccggcagggggctcgagagcacggaggccgaaatgcatattccctcggctctggaacctagtaccagtagtagcccacggggctcaactgatagcctgaaccagggggcctctcccgggggtcttctggaccctgcctgtcagaagactgatcatttcctgtcctgctacccctggtttcacggccctattagtagagtgaaggccgctcagctggtgcagttacagggccctgacgcccacggcgtatttctggtacggcagagcgagaccagacgtggcgagtatgtccttacattcaacttccagggcatcgcaaaacacctgcggctgtcactaacagaaagggggcagtgcagagtacaacatcttcattttccttccgtagtagatatgctacaccacttccaaagatccccaataccactggagtgcggcgccgcctgcgatgtccgtctgtccagctacgtagtcgtggtgtctcagccccccggtagctgcaatactgtgttattccccttctcacttccccactgggactcagagagtcttccacattggggaagtgagctcggcctgccccacctgtcatcatccggctgtcctcgcggacttagtcctgaaggattgccggggcgttcatcccccccagagcaaatttttcacctggtgccgagcccagaggagctagcaaattctcttcagcacttggaacacgaaccggtaaatagggctcgggacagtgactacgaaatggactctagctcccgctcccacctccgagctatcgataaccaatatacccccctgtag

SEQ ID NO: 109593 - DNA, 1122 bp, Artificial Sequence
  derived and/or modified sequence
atgggcttccctgtgctgtgccggggctggaggaggacctggccaggctgtgcctcctggctgggcgcccccccaccccagaagcccctgctgagccccctgctgctgaaccacaggagcagcaagagcagccggcccaagctgcaggccgcctgcagcagcatccaggaggtgcgctggtgcacccggctggagatgccagacaacctgtacacctttgtgctgaaggtgaaggacagaacagacatcatctttgaggtgggagatgagcagcagctgaacagctggatggccgagctgtctgagtgcaccggccggggcctggagagcacagaagctgagatgcacatccccagcgccctggagcccagcaccagcagcagcccccggggcagcacagacagcctgaaccagggcgccagccctgggggcctgctggaccctgcctgccagaagacagaccacttcctgagctgctacccctggttccacggccccatcagccgggtgaaggccgcccagctggtgcagctgcagggcccagatgcccacggcgtcttcctggtgcggcagagcgagaccaggagaggagaatatgtgctgaccttcaacttccagggcatcgccaagcacctgcggctgagcctgacagagcggggccagtgccgggtgcagcacctgcacttccccagcgtggtggacatgctgcaccacttccagaggagccccatccccctggagtgtggggccgcctgtgatgtgcggctgagcagctatgtggtggtggtgtcccagcccccaggcagctgcaacacagtgctcttccccttcagcctgccccactgggacagcgagagcctgccccactggggcagcgagctgggcctgccccacctgagcagcagcggctgcccccggggcctgagccctgagggcctgcccggccgcagcagccccccagagcagatcttccacctggtgcccagccctgaggagctggccaacagcctgcagcacctggagcacgagcctgtgaacagagcccgggacagcgactatgagatggacagcagcagccgcagccacctgcgggccatcgacaaccagtacacccccctgtag

SEQ ID NO: 109594 - DNA, 1122 bp, Artificial Sequence
  derived and/or modified sequence
atgggcttccccgtgctgtgccggggctggcggcggacctggcccggatgtgctagctggctaggtgctccgccgcctcagaaaccattgctgtcccccttacttctgaatcaccgctcctcgaaatcatctcgacctaagttgcaagctgcctgcagctccatccaggaggtgaggtggtgtactaggttggaaatgcccgacaacttgtacacttttgtcttgaaagttaaagaccggactgatattatctttgaagtgggggacgaacagcagcttaactcctggatggctgagttatcagagtgtactggacgcgggctggagtccacagaggccgagatgcacatccctagcgctctggagccttccacaagctcaagcccccgagggagtaccgactctctgaaccagggggcttcccccggcgggcttctcgatccagcttgtcagaagacagatcactttctgtcgtgctacccctggttccacgggcccatttctcgagtgaaagcagcgcaactcgtacaactgcagggtccggatgctcatggagtttttcttgttcgccaaagcgagactcgtcgcggggaatacgtcctgacattcaacttccagggcatcgctaaacacttacgtctgtcactgaccgagcgaggccagtgtagggtccagcacctgcactttccctcagtggtcgacatgcttcaccacttccagcgatctcccattcctctcgagtgtggggctgcctgcgatgtccgactttcctcttacgttgtggtcgtcagccagccccccggatcttgcaacactgtgttgttccccttcagcctgccacactgggatagcgaaagcctcccccattggggcagcgagctaggcctgccccatctgagctcatccggctgtccacggggactgtcccctgagggcctgccaggcagatcgtcccctccagagcagatttttcatttggttccaagcccggaagagctggccaatagcctccagcatctggaacacgagcctgtcaatcgtgcccgggatagtgactacgagatggattccagctctaggagtcacctgagagccatcgacaatcaatacactccgctgtag

SEQ ID NO: 109595 - DNA, 1122 bp, Artificial Sequence
  derived and/or modified sequence
atgggattccccgtgctatgcagggggtggagacgcacctggcctggatgcgcttcttggctgggcgctccacctccgcagaaacccttactgagtcccctgcttctcaaccaccggtcctcaaagtcatcaagacccaaattgcaggccgcatgctcgagcatacaggaagtgcgatggtgtactcgtcttgaaatgccggataacctctatacctttgtccttaaagtaaaggatcggacagatatcatcttcgaggtgggagatgagcaacagttgaatagttggatggcagaactgagcgaatgcaccggtaggggactggagagcaccgaagcagagatgcatattcccagcgccctggaaccttctacctcatccagccctcggggaagcaccgattccctcaatcagggggcttcccccggtggactgctcgaccctgcctgtcagaaaacggaccacttccttagctgttatccttggttccacggccctatatcacgcgtgaaggccgctcaactggtgcagctacagggccctgatgcccacggagtgtttctagttcgtcagtccgaaacccggagaggcgagtatgtactgacattcaacttccaggggatcgccaaacatttgagactttccctgactgaacggggacaatgtcgggtccagcatttgcactttccctcagtggtggatatgttgcaccatttccaaagatcccctattcccctggaatgcggggctgcctgcgacgtccgtctgtccagttatgttgttgtggtatcgcagcccccaggtagttgtaacacagtactgtttccatttagtcttccccattgggattctgagtctctcccccattggggctcagaactgggcctgccacatctgtcaagcagcggctgcccgagggggctgtccccggaagggctgcccggtcggagcagcccacccgagcagatctttcatctggttccctcaccagaggagcttgccaattcactacaacacctggagcacgagccggttaatcgcgcaagagattctgactacgaaatggacagttcaagcaggagccatcttagagctatagacaatcaatatacacccctgtag

SEQ ID NO: 109596 - DNA, 2062 bp, Artificial Sequence
  derived and/or modified sequence
atagtaatgagagtccgtgccgggtggagctcagaaggacatgggattcccggtgctgtgccgtggctggaggaggacctggcctggctgtgccagttggctgggagcccctccaccccagaagcccttgctctcacctcttcttctgaatcatcgttcttcgaagagttcaaggcccaagctacaagcagcttgctccagcatccaggaggtccggtggtgcacacggcttgagatgcctgacaacctttacacctttgtgctgaaggtgaaggaccggacagacatcatctttgaggtgggagacgagcagcagctgaattcatggatggctgagctctcggagtgcacaggccgagggctggagagcacagaagcagagatgcatattccctcagccctagagcctagcacgtccagctccccaaggggcagcacagattcccttaaccaaggtgcttctcctggggggctgctggacccggcctgccagaagacggaccatttcctgtcctgctacccctggttccacggccccatctccagagtgaaagcagctcagctggttcagctgcagggccctgatgctcatggagtgttcctggtgcggcagagcgagacgcggcgtggggaatacgtgctcactttcaactttcaggggatagccaagcacctgcgcctgtcgctgacagagcggggccagtgccgtgtgcagcacctccactttccctcggtcgtggacatgctccaccacttccagcgctcgcccatcccactcgagtgcggcgccgcctgtgatgtccggctctccagctacgtggtagtcgtctcccaaccaccaggttcctgcaacacggtcctcttccctttctcccttcctcactgggattcagagtcccttcctcactggggttcagagttgggccttccccaccttagttcttctggctgtccccgggggctcagcccagagggtctcccagggcgatcctcaccccccgagcagatcttccacctggtgccttcgcccgaagaactggccaacagcctgcagcacctggagcatgagcctgtgaatcgagcccgggactcggactacgaaatggactcatcctcccggagccacctgcgggccatagacaatcagtacacacctctctgaccagtgaggaattccaggcctcaacagctgcccttgaggagcacaggcagaagtgtgaacttgtgaatgtaattgatctttccttccttccagagaaagatttaagggacactgttaactgctcgtgccagtttggaagtgacccttctattaggcctgttgaagggccctcctgtaggtttcatctatccacctggctttctccttattgtttacagatgtagttcttgttagaggatgccgctagctcctgcccggggtccctatgcccagtccccgttactcttagagaaaggagttggggtgagggccagagctggcagtggaaacttgttctctttttcactgacactgtcacagcggatgacagactttctacggggaggagggggggatcatcaggaagcccagaacactaacaagcggttctcccatctaccgtcagtccacatggcaggtctgctgtgtccacaccacagatgaccacatctaatcctgcttctactctcagctttaggacaaaagctctgtcagaggcacaagctgaaggtcaaaaatgatttaaaacattttacctcagactaatttctttaaaggattcaggttcaaaacttaaccactgcttatttcagtgcactgtttcaactaacacccatgctatttttgtagtcagaaacagctatgcaaaccctacctaatttacagtctgagccagcatgctggcttgtctactgcatcctcgggacagtcacctgccactgagtggccactgtccttcctaaatgtcaagaagtgaagtatgtcaccctttcagggaaattcaggcaattactgaaataggagggtggcaagaacagttctatcctggtgccttacgaataaaaaactggattctggttt

SEQ ID NO: 109597 - DNA, 1122 bp, Artificial Sequence
  derived and/or modified sequence
atgggcttccccgtgctgtgcagaggctggagaagaacctggcccggctgcgccagctggctgggcgccccccccccccagaagcccctgctgagccccctgctgctgaaccacagaagcagcaagagcagcagacccaagctgcaggccgcctgcagcagcatccaggaggtgagatggtgcaccagactggagatgcccgacaacctgtacaccttcgtgctgaaggtgaaggacagaaccgacatcatcttcgaggtgggcgacgagcagcagctgaacagctggatggccgagctgagcgagtgcaccggcagaggcctggagagcaccgaggccgagatgcacatccccagcgccctggagcccagcaccagcagcagccccagaggcagcaccgacagcctgaaccagggcgccagccccggcggcctgctggaccccgcctgccagaagaccgaccacttcctgagctgctacccctggttccacggccccatcagcagagtgaaggccgcccagctggtgcagctgcagggccccgacgcccacggcgtgttcctggtgagacagagcgagaccagaagaggcgagtacgtgctgaccttcaacttccagggcatcgccaagcacctgagactgagcctgaccgagagaggccagtgcagagtgcagcacctgcacttccccagcgtggtggacatgctgcaccacttccagagaagccccatccccctggagtgcggcgccgcctgcgacgtgagactgagcagctacgtggtggtggtgagccagccccccggcagctgcaacaccgtgctgttccccttcagcctgccccactgggacagcgagagcctgccccactggggcagcgagctgggcctgccccacctgagcagcagcggctgccccagaggcctgagccccgagggcctgcccggcagaagcagcccccccgagcagatcttccacctggtgcccagccccgaggagctggccaacagcctgcagcacctggagcacgagcccgtgaacagagccagagacagcgactacgagatggacagcagcagcagaagccacctgagagccatcgacaaccagtacacccccctgtag

SEQ ID NO: 109598 - DNA, 126 bp, Artificial Sequence
  derived and/or modified sequence
atggatggcagtggagagcagcccaggggtggagtcagctcacgcattgaacagggcgaatggggcggccgccatccctcctggccatggaccaggtgtctgagaatgcggccaccaagatcgtag

SEQ ID NO: 109599 - DNA, 126 bp, Artificial Sequence
  derived and/or modified sequence
atggatggcagcggggagcagccccggggcggcgtgagcagccgcatcgagcagggcgagtggggcggccgccaccccagctggccctggacccgctgcctgaggatgaggcctcccaggagctag

SEQ ID NO: 109600 - DNA, 126 bp, Artificial Sequence
  derived and/or modified sequence
atggacggcagcggcgagcagccccggggcggcgtgagcagccggatcgaacagggcgagtggggaggccgccacccaagctggccctggacccgctgcctgagaatgcgcccacccagaagttag

SEQ ID NO: 109601 - DNA, 126 bp, Artificial Sequence
  derived and/or modified sequence
atggatgggagcggagagcagccacgcggtggtgtgtcctctcgcattgagcagggcgaatggggaggcagacatccatcttggccctggacacggtgcttacggatgcggcctccaagatcctag

SEQ ID NO: 109602 - DNA, 866 bp, Artificial Sequence
  derived and/or modified sequence
tcacgtgacccgggcgcgctgcggccgcccgcgcggacccggcgagaggcggcggcgggagcggcggtgatggacgggtccggggagcagcccagaggcggggggcccaccagctctgagcagatcatgaagacaggggcccttttgcttcagggtttcatccaggatcgagcagggcgaatggggggggaggcacccgagctggccctggacccggtgcctcaggatgcgtccaccaagaagctgagcgagtgtctcaagcgcatcggggacgaactggacagtaacatggagctgcagaggatgattgccgccgtggacacagactccccccgagaggtctttttccgagtggcagctgacatgttttctgacggcaacttcaactggggccgggttgtcgcccttttctactttgccagcaaactggtgctcaaggctggcgtgaaatggcgtgatctgggctcactgcaacctctgcctcctgggttcaagcgattcacctgcctcagcatcccaaggagctgggattacaggccctgtgcaccaaggtgccggaactgatcagaaccatcatgggctggacattggacttcctccgggagcggctgttgggctggatccaagaccagggtggttggaccgtgaccatctttgtggcgggagtgctcaccgcctcactcaccatctggaagaagatgggctgaggcccccagctgccttggactgtgtttttcctccataaattatggcatttttctgggaggggtggggattgggggacgtgggcatttttcttacttttgtaattattggggggtgtggggaagagtggtcttgagggggtaataaacctccttcgggac

SEQ ID NO: 109603 - DNA, 126 bp, Artificial Sequence
  derived and/or modified sequence
atggacggcagcggcgagcagcccagaggcggcgtgagcagcagaatcgagcagggcgagtggggcggcagacaccccagctggccctggaccagatgcctgagaatgagaccccccagaagctag

SEQ ID NO: 109604 - protein, 795 aa, Artificial Sequence
  derived and/or modified sequence
MRTPSASPRQCLSWSLSPSSSLREGKLQHLLARELVPGDVVSLSIGDRIPADIRLTEVTDLLVDESSFTGEAEPCSKTDSPLTGGGDLTTLSNIVFMGTLVQYGRGQGVVIGTGESSQFGEVFKMMQAEETPKTPLQKSMDRLGKQLTLFSFGIIGLIMLIGWSQGKQLLSMFTIGVSLAVAAIPEGLPIVVMVTLVLGVLRMAKKRVIVKKLPIVETLGCCSVLCSDKTGTLTANEMTVTQLVTSDGLRAEVSGVGYDGQGTVCLLPSKEVIKEFSNVSVGKLVEAGCVANNAVIRKNAVMGQPTEGALMALAMKMDLSDIKNSYIRKKEIPFSSEQKWMAVKCSLKTEDQEDIYFMKGALEEVIRYCTMYNNGGIPLPLTPQQRSFCLQEEKRMGSLGLRVLALASGPELGRLTFLGLVGIIDPPRVGVKEAVQVLSESGVSVKMITGDALETALAIGRNIGLCNGKLQAMSGEEVDSVEKGELADRVGKVSVFFRTSPKHKLKIIKALQESGAIVAMTGDGVNDAVALKSADIGIAMGQTGTDVSKEAANMILVDDDFSAIMNAVEEGKGIFYNIKNFVRFQLSTSISALSLITLSTVFNLPSPLNAMQILWINIIMDGPPAQSLGVEPVDKDAFRQPPRSVRDTILSRALILKILMSAAIIISGTLFIFWKEMPEDRASTPRTTTMTFTCFVFFDLFNALTCRSQTKLIFEIGFLRNHMFLYSVLGSILGQLAVIYIPPLQRVFQTENLGALDLLFLTGLASSVFILSELLKLCEKYCCSPKRVQMHPEDV

SEQ ID NO: 109605 - DNA, 2388 bp, Artificial Sequence
  derived and/or modified sequence
atgcggacaccgagcgcaagcccacggcagtgcctttcttggtctctgagtcctagttcatccctgcgcgaaggaaagctgcagcacttgcttgctagggaattggtgcctggagatgtcgtttccctcagcattggcgacaggattccggccgacattcgccttactgaggtcacagaccttctggttgatgaaagcagcttcaccggtgaagcagagccatgctctaagaccgacagtccactcacgggaggcggcgatctaactactttaagtaacattgtcttcatgggaacacttgtccagtacgggcgcggtcagggagtcgttattgggaccggagagtcttcccaattcggagaagtgttcaaaatgatgcaggcagaagaaaccccaaaaacacccctgcaaaagtccatggaccgactggggaagcagctcaccctgttctcttttggcatcatcggacttatcatgttgatcggctggtcccagggaaaacagcttctttcaatgtttaccattggagtaagcctagctgtcgccgccatccctgaaggcctccccatcgtcgttatggtcactcttgtcctcggagtgcttcggatggccaaaaagagagtcatcgtgaagaaactccccattgtggagactctggggtgctgcagtgtgctgtgctccgataagacgggcactttaacagctaacgagatgacggttacccagttagttacatctgatggcttgcgggctgaggtgtctggtgtcggctacgatggccaaggcaccgtgtgtctgttgcccagcaaagaggtaatcaaggagttttctaacgtgtccgtgggcaaactggtggaggcggggtgtgtggccaacaacgccgtgatcagaaagaacgcggttatgggacagcccaccgagggtgctttaatggccctggccatgaagatggatctgtctgatataaaaaattcatatatcaggaaaaaagaaatccccttctcctcggagcagaaatggatggccgtcaagtgctcactcaagaccgaagaccaagaggacatctactttatgaagggtgctctcgaagaagtcattcgctactgcacaatgtacaataatgggggcatccccctccccctaacgccgcagcagcgaagtttctgtctacaggaggagaagcgaatgggcagcctcggattgcgagtgttggcacttgcaagtgggccagaacttgggaggctcacttttttaggactcgttggcatcatcgatcctcctcgcgttggggttaaggaagccgtgcaggtcctgagcgaaagcggtgttagtgtgaaaatgattacaggtgacgccctagaaacagctttggccatcggtcgaaatataggcctatgcaatggaaagctgcaggctatgtccggggaggaggtggactcagttgaaaaaggagaattagctgaccgagttgggaaggtaagcgttttcttccggacgtcacccaagcacaaactcaagatcattaaagcactgcaggagtcaggagcaattgtcgcaatgacaggagatggggtgaacgatgctgttgcactgaaatccgctgacattgggattgctatgggacagaccggaaccgacgtatctaaggaagccgctaatatgatcctggtggatgacgatttctcggccattatgaacgctgtggaggaagggaagggaatcttttacaacatcaaaaatttcgtccggttccagctgtcaacaagcatttccgccctgtctctgataaccctctctacagtgttcaacctgccgtcacccctgaacgcaatgcagattctgtggatcaacattattatggacgggccaccagcacaaagcctcggagtggagccagtagataaggatgcgtttcgacagccaccgaggtcagtgagggataccatactttcacgagcgcttatcctcaagattttgatgtcggcagccattatcatctcaggcaccctattcattttctggaaggaaatgcctgaggaccgtgccagcacccccaggaccaccaccatgacctttacctgtttcgttttctttgacctgttcaatgccctgacctgtcggagtcagactaagctaatcttcgaaattgggttcctgcgcaaccacatgttcctgtatagtgtgctagggagcatacttggacagttagctgttatttatatcccgccacttcagagggtgttccaaactgaaaaccttggtgccctggacctgctcttcctcacaggtctggcaagcagtgtatttatcctttcagagttactcaagttatgcgagaagtactgctgcagcccaaaacgagtccagatgcatccagaggacgtgtag

SEQ ID NO: 109606 - DNA, 2388 bp, Artificial Sequence
  derived and/or modified sequence
atgaggaccccatctgccagcccccggcagtgcctgtcctggagcctgagccccagcagcagcctgcgggagggcaagctgcagcacctgctggcccgggagctggtgcctggagatgtggtgtccctgagcattggagaccgcatcccagctgacatccggctgacagaggtgacagacctgctggtggatgagagcagcttcaccggggaggccgagccctgcagcaagacagacagccccctgactggaggaggagacctgaccaccctgagcaacatcgtgttcatgggcaccctggtgcagtatggccggggccagggcgtggtgattggaactggagagagcagccagtttggagaggtgttcaagatgatgcaggccgaggagacccccaagacccccctgcagaagtccatggaccggctgggcaagcagctgaccctcttctcctttggcatcatcggcctcatcatgctgattggctggagccagggcaagcagctgctgtccatgttcaccatcggcgtgtccctggccgtggccgccatccctgagggcctgcccatcgtggtgatggtgaccctggtgctgggcgtgctgaggatggccaagaagagggtgattgtgaagaagctgcccatcgtggagaccctgggctgctgcagcgtgctgtgcagcgacaagacaggcaccctgacagccaatgagatgacagtgacccagctggtgaccagtgatggcctgcgggcagaggtgtctggagtgggctatgatggccagggcaccgtgtgcctgctgcccagcaaggaggtgatcaaggagttcagcaatgtgtctgtgggcaagctggtggaggccggctgtgtggccaacaatgctgtgatcaggaagaatgctgtgatgggccagcccacagagggcgccctgatggccctggccatgaagatggacctgagtgacatcaagaacagctacatcaggaagaaggagatccccttcagcagcgagcagaagtggatggctgtgaagtgcagcctgaagacagaggaccaggaggacatctacttcatgaagggggccctggaggaggtgatccgctactgcaccatgtacaacaacggcggcatccccctgcccctgaccccccagcagaggagcttctgcctgcaggaggagaagaggatgggcagcctgggcctgcgggtgctggccctggccagcggccctgagctgggccgcctgaccttcctgggcctggtgggcatcatcgaccccccccgggtgggcgtgaaggaggccgtgcaggtgctgtctgagagcggcgtgtctgtgaagatgatcactggagatgccctggagacagccctggccatcggcagaaatattggcctgtgcaatggcaagctgcaggccatgtctggagaggaggtggacagcgtggagaagggggagctggccgacagagtgggcaaggtgtctgtgttcttccgcaccagccccaagcacaagctgaagatcatcaaggccctgcaggagagcggggccatcgtggccatgactggagatggagtgaatgatgctgtggccctgaagtctgctgacatcggcatcgccatgggccagacaggaacagatgtgtccaaggaggccgccaacatgatcctggtggatgatgacttcagcgccatcatgaatgctgtggaggagggcaagggcatcttctacaacatcaagaactttgtgcgcttccagctgagcaccagcatcagcgccctgagcctcatcaccctgagcaccgtcttcaacctgcccagccccctgaatgccatgcagatcctgtggatcaacatcatcatggatggccccccagcccagagcctgggcgtggagcctgtggacaaggatgccttccggcagcccccaagatctgtgcgggacaccatcctgagccgggccctgatcctgaagatcctgatgtctgctgccatcatcatcagcggcaccctcttcatcttctggaaggagatgccagaagatcgggccagcacccccaggaccaccaccatgaccttcacctgctttgtgttctttgacctcttcaatgccctgacctgccgcagccagaccaagctgatctttgagatcggcttcctgaggaaccacatgttcctgtacagcgtgctgggcagcatcctgggccagctggccgtcatctacatcccccccctgcagagggtcttccagacagagaacctgggcgccctggacctgctcttcctgaccggcctggccagctctgtgttcatcctgtctgagctgctgaagctgtgtgagaagtactgctgcagccccaagagggtgcagatgcacccagaagatgtgtag

SEQ ID NO: 109607 - DNA, 2388 bp, Artificial Sequence
  derived and/or modified sequence
atgcggacccccagcgccagcccccggcagtgcctgagctggagcctgagtccctcctcttccttgcgcgagggcaaactgcagcacctgctggctcgggagctggtgccgggagacgtagttagcctctctattggcgacaggataccagccgacatcagactgacagaggtgaccgacctgctcgttgatgaatccagcttcaccggtgaagctgagccttgtagcaagaccgattcacccctgacgggtgggggcgacctgactactctgagtaacatcgtgttcatgggcacccttgttcaatacggtcgaggacaaggcgtcgtgatcggaaccggtgagagtagccagtttggagaagtgtttaagatgatgcaggccgaagagacaccgaagacaccccttcagaagtcgatggatcggctcggtaaacagttgactctatttagctttgggattattggcctgatcatgctaataggttggtcccaagggaagcagctgctgagtatgttcacgatcggcgtttcactagccgttgccgccatcccagaggggttgccaattgttgtgatggttactctcgtcctgggcgttttgaggatggccaagaagcgcgttatcgtgaagaagctgccaattgtggagacactgggttgctgtagcgttttatgttcggacaagactggcactttaactgcaaacgaaatgacggtgacacagctcgtgacctccgacggtctgagagctgaggtatccggcgtgggttacgatggccagggcactgtctgtctgcttccctccaaggaagtgatcaaagaattcagtaatgtaagtgtcggaaagcttgtggaagctggctgcgtagccaacaatgctgtgatcaggaagaacgccgttatgggccagccaaccgagggggccttgatggcattggccatgaaaatggacctatccgacattaagaattcttacatccgaaagaaggagataccttttagcagcgagcagaagtggatggcagtcaagtgtagcctcaagaccgaagaccaggaagacatttatttcatgaaaggtgcactcgaggaagtgattagatactgtactatgtacaacaatggcggaattcccctgcctctgacaccccagcagaggtcattttgtctccaggaggagaaacgtatgggcagtctgggcctgcgcgtgctggctctggcttccggccctgaactgggaagactaacgtttttgggcctggtaggaataatcgatcccccaagagttggtgtgaaagaggctgttcaagttctctctgagtccggcgtgtcggtaaaaatgatcacaggagacgcgctggaaaccgcactggcaattggtagaaacataggcctgtgtaatgggaagctccaggccatgtctggtgaggaggtagatagcgtggaaaagggggagctcgctgacagggtagggaaggttagcgtttttttccgaacatctccgaagcataagctcaagatcatcaaagccctccaagaatctggtgcgatagtggccatgaccggtgatggcgtgaatgacgcggtggcactgaagtcagctgatatagggatcgccatgggccagaccggcactgacgtatcgaaagaagcggccaacatgatcttagttgacgatgacttcagcgcgattatgaacgcagtggaggaagggaaggggattttttacaacattaagaatttcgtccgcttccagctgtctactagcattagcgcactgtcactgatcacgctaagcaccgtgtttaatctgccttcaccccttaatgccatgcagatattgtggatcaacattatcatggatggtcccccagcacagtccttaggcgtggaacccgtcgacaaagacgcttttcgtcaacccccacgctcagtgagagatactattttaagtagagccctaatattgaagattctgatgtccgctgcgatcatcatctcaggcacacttttcattttctggaaagaaatgccagaagacagggcctccacgccaagaacaacgaccatgacattcacttgctttgttttctttgacctgtttaacgcgttgacatgtcggagccagacgaaactgatctttgagatcgggttccttaggaatcatatgtttctctacagcgtgctaggatccattttaggccaactcgcagtgatctatatccctccgctccagcgagtgtttcagaccgagaatttgggcgcacttgacttactcttcctcactggcctcgctagcagcgtgtttatcttatcagaactgctaaagctttgtgaaaagtactgttgctcaccaaagcgcgtccagatgcacccggaagacgtgtag

SEQ ID NO: 109608 - DNA, 2388 bp, Artificial Sequence
  derived and/or modified sequence
atgcgcaccccttcagcctctcccaggcagtgtttgtcatggtcactctcccccagtagcagtctccgcgaaggcaaattacagcacctattagccagggaactggttccaggagacgtcgtgagtctgtccatcggcgatcgcattcccgcagacattcgcctcactgaagtaacagatctgttagtcgatgaatctagctttaccggtgaagccgagccgtgctctaaaaccgattctcccctgaccggagggggagacctgacgacgctgagtaacatcgtattcatgggtaccttagttcaatatggccgagggcagggcgtggtaatagggaccggggaaagttcacagtttggggaagtgttcaagatgatgcaggctgaggagacccccaaaacccctctccagaagagcatggaccgcctgggtaaacaactcacgttgtttagctttggcattatcgggctaataatgctcatcgggtggtcacagggtaaacagctcctgtctatgtttaccatcggggtatccctggccgtcgccgctatcccagaaggactgcctatcgtggttatggtcaccctggtactgggggtgcttaggatggccaaaaaacgcgtgatcgtgaagaagttaccgattgtggaaacacttggatgttgcagcgtgctgtgctccgacaagacaggaactctgacagccaatgaaatgaccgtgacccagctggtcacatcagatggacttagagcagaagttagtggcgtcgggtacgatgggcaggggacggtttgtcttctgccctccaaggaggtgattaaagagttttctaacgttagtgtgggaaagctggtagaggcgggttgtgtggcaaacaatgccgtgattagaaagaatgctgtgatgggacagcctacggagggtgctcttatggccctggccatgaaaatggacctgagcgatatcaagaactcttatatccggaagaaagagatcccattcagcagcgagcaaaaatggatggcagtaaaatgcagtctgaagacggaagatcaagaggatatctatttcatgaagggagctctcgaagaagtgattagatactgcacaatgtacaataacggcggtatacctctacctctgacccctcaacagcgcagcttttgtctccaggaagagaaaagaatggggtccttgggattaagggtgctggcattggcctcagggcctgaactgggacgcttaacttttcttggactggtaggcatcatagatcctccaagggtgggcgtcaaagaagccgtgcaagtcctgtccgagtcaggagtttcggtcaaaatgattacaggcgacgccctggagaccgcgctggctataggccgaaatatcgggctctgcaatggtaaactgcaggcgatgtcaggcgaggaggttgactctgttgagaaaggagagctggccgaccgcgtgggcaaggtctccgtgttttttcgcacctcaccaaagcataagctaaaaattatcaaggcactccaggaatctggcgcaatcgtggctatgacaggagacggcgtaaacgacgctgtggcgctaaagagcgccgatattgggattgccatgggacagacaggaaccgatgtgtctaaggaggcagccaatatgattctcgtcgatgatgacttcagtgcaattatgaacgcagtggaggagggtaaaggcattttttacaatattaaaaatttcgttaggtttcagctatccactagtatctctgctctttccctcatcacgctgtccactgtttttaatctcccctccccactgaatgcgatgcagatcctgtggattaacataatcatggacggccctccggctcagtcgcttggggtggaaccggtcgataaggacgcctttagacaaccccctcggtcagttcgcgatactatcttgtcccgcgcactgattcttaaaatcttgatgtccgctgctatcatcatcagtggaaccttgtttatcttttggaaagagatgccagaggatcgagcttcaactccccgtacaaccactatgaccttcacatgcttcgtcttcttcgatctgtttaacgcactcacctgtcggagccagaccaagcttattttcgagatcggctttctgagaaaccacatgtttttgtattccgtcctaggcagcattcttgggcagctcgctgtcatttacatcccccctctgcaacgtgttttccagaccgagaatctgggcgcactggacctcctgtttctgacgggcctcgctagctctgtgttcattctcagcgaactgctgaaactgtgtgagaagtactgctgttcacccaagcgcgtccagatgcaccccgaggatgtgtag

SEQ ID NO: 109609 - DNA, 2782 bp, Artificial Sequence
  derived and/or modified sequence
agttctcagtgttctgggaatgttattcatcgatgcgttttggcagcaaaataggcttctggtttaagaaccccctgatcctgctgctgctgggctctgccctggtgagtgtcctcaccaaggagtatgaggacgccgtcagcatcgccacggcagtgcttgtcgtggtcactgtcgccttcatccagcctaagagaaggaaaactccagcacctgcttgctcgagaactggttcctggtgatgtcgtatctctctcgatcggagaccggatccctgcagacatccgactcactgaggtcacggacctcttggtggatgaatccagtttcaccggggaagccgagccatgtagtaaaacagacagccccttgacaggcggtggggacctcaccaccctcagcaacatcgtcttcatggggaccctggtgcagtatgggaggggccagggggtcgtgattggaacaggggaaagctctcagttcggagaagtgtttaagatgatgcaggctgaagagacacctaaaactcctttgcagaaaagcatggacaggctaggaaagcaactgacactcttctcctttggcataatcggtctcatcatgctcattggctggtcgcaagggaaacaactcctgagtatgttcacgatcggggtcagcctggctgtggcggccattccagagggtctgcccatcgtcgtcatggtgacgctggtcctgggagtgctgcggatggccaagaagcgggtcatcgtgaagaagttacccatcgtggagactttaggttgctgcagcgttctctgttctgacaagacggggactctgactgccaatgaaatgacagtgacccagcttgtaacgtcagatgggcttcgtgccgaggtcagcggagttgggtatgacggtcaagggactgtgtgtcttctaccatccaaggaagtcattaaggaattttccaatgtctcagtgggaaagttagtggaggcgggctgtgttgccaacaatgcggtcatcagaaagaacgccgtgatggggcagcccaccgagggtgcattgatggccctggcgatgaagatggacttaagtgatattaaaaattcatatataagaaaaaaagagattccattcagttcagagcagaagtggatggcggtgaaatgcagtctgaagactgaggatcaggaagacatttacttcatgaaaggggccttggaagaggtgatccgctactgcaccatgtacaacaacgggggcatccccctgccgctgacgccccagcagaggtcattctgcctgcaggaagagaagaggatggggtcgctcggtttgcgggtgctggccctggcttctgggcccgagctggggcggctgacgtttctcggtcttgtgggcatcattgaccccccgagagttggcgtgaaggaagcagtccaggttctctccgagtctggtgtgtctgtgaagatgataacgggggatgccctggagacggccttggccataggaagaaacatcggcctgtgcaacgggaagctgcaagccatgtccggggaggaggtggacagcgtggagaagggcgagctggccgaccgcgtggggaaggtgtccgtgttcttcaggaccagcccaaagcacaagctcaaaatcatcaaggctctgcaggagtcaggggcgatcgtggccatgactggggatggggtgaacgacgcagtggccctgaagtctgcagacattgggatcgccatggggcagacagggacggacgtcagcaaagaggccgccaacatgatcctggtggatgatgacttctcagccatcatgaatgcagtggaggaaggcaagggtattttttacaacatcaaaaactttgtccgattccagctgagcacgagcatctccgccctgagtctcatcactctgtccaccgtgttcaacctgcccagccccctcaacgccatgcagatcctatggatcaacatcatcatggatgggccaccggcgcagagcttgggggtagagcccgttgacaaagacgccttcaggcagccaccacggagtgtgcgggacaccatcctcagcagagccctcatcctgaagatcctcatgtccgcggccatcatcatcagcgggaccctctttatcttctggaaggagatgcctgaagacagagcaagcactccccgcaccacgacgatgacgttcacttgttttgtgtttttcgatctcttcaacgccttgacctgccgctctcagaccaagctgatatttgagatcggctttctcaggaaccacatgttcctctactccgtcctggggtccatcctggggcagctggcggtcatttacatccccccgctgcagagggtcttccagacggagaacctgggagcgcttgatttgctgtttttaactggattggcctcatccgtcttcattttgtcagagctcctcaaactatgtgaaaaatactgttgcagccccaagagagtccagatgcaccctgaagatgtgtagtggaccgcactccgcggcaccttccctaatcatctcgatctggttgtgactgtggcccctgccgtgtctcctcgtcaggggagacttttaggaggccgcagccttccatcaccggatcagtttttcctcttaggaaagctgcaggaacctcgtgggctccagggacccaggcccacatccatccagcgttcccgctggctgtgggacagacagggaggggcctgtacagaaacaccacactgtttattaaatcacaatgatttttatt

SEQ ID NO: 109610 - DNA, 2388 bp, Artificial Sequence
  derived and/or modified sequence
atgagaacccccagcgccagccccagacagtgcctgagctggagcctgagccccagcagcagcctgagagagggcaagctgcagcacctgctggccagagagctggtgcccggcgacgtggtgagcctgagcatcggcgacagaatccccgccgacatcagactgaccgaggtgaccgacctgctggtggacgagagcagcttcaccggcgaggccgagccctgcagcaagaccgacagccccctgaccggcggcggcgacctgaccaccctgagcaacatcgtgttcatgggcaccctggtgcagtacggcagaggccagggcgtggtgatcggcaccggcgagagcagccagttcggcgaggtgttcaagatgatgcaggccgaggagacccccaagacccccctgcagaagagcatggacagactgggcaagcagctgaccctgttcagcttcggcatcatcggcctgatcatgctgatcggctggagccagggcaagcagctgctgagcatgttcaccatcggcgtgagcctggccgtggccgccatccccgagggcctgcccatcgtggtgatggtgaccctggtgctgggcgtgctgagaatggccaagaagagagtgatcgtgaagaagctgcccatcgtggagaccctgggctgctgcagcgtgctgtgcagcgacaagaccggcaccctgaccgccaacgagatgaccgtgacccagctggtgaccagcgacggcctgagagccgaggtgagcggcgtgggctacgacggccagggcaccgtgtgcctgctgcccagcaaggaggtgatcaaggagttcagcaacgtgagcgtgggcaagctggtggaggccggctgcgtggccaacaacgccgtgatcagaaagaacgccgtgatgggccagcccaccgagggcgccctgatggccctggccatgaagatggacctgagcgacatcaagaacagctacatcagaaagaaggagatccccttcagcagcgagcagaagtggatggccgtgaagtgcagcctgaagaccgaggaccaggaggacatctacttcatgaagggcgccctggaggaggtgatcagatactgcaccatgtacaacaacggcggcatccccctgcccctgaccccccagcagagaagcttctgcctgcaggaggagaagagaatgggcagcctgggcctgagagtgctggccctggccagcggccccgagctgggcagactgaccttcctgggcctggtgggcatcatcgacccccccagagtgggcgtgaaggaggccgtgcaggtgctgagcgagagcggcgtgagcgtgaagatgatcaccggcgacgccctggagaccgccctggccatcggcagaaacatcggcctgtgcaacggcaagctgcaggccatgagcggcgaggaggtggacagcgtggagaagggcgagctggccgacagagtgggcaaggtgagcgtgttcttcagaaccagccccaagcacaagctgaagatcatcaaggccctgcaggagagcggcgccatcgtggccatgaccggcgacggcgtgaacgacgccgtggccctgaagagcgccgacatcggcatcgccatgggccagaccggcaccgacgtgagcaaggaggccgccaacatgatcctggtggacgacgacttcagcgccatcatgaacgccgtggaggagggcaagggcatcttctacaacatcaagaacttcgtgagattccagctgagcaccagcatcagcgccctgagcctgatcaccctgagcaccgtgttcaacctgcccagccccctgaacgccatgcagatcctgtggatcaacatcatcatggacggcccccccgcccagagcctgggcgtggagcccgtggacaaggacgccttcagacagccccccagaagcgtgagagacaccatcctgagcagagccctgatcctgaagatcctgatgagcgccgccatcatcatcagcggcaccctgttcatcttctggaaggagatgcccgaggacagagccagcacccccagaaccaccaccatgaccttcacctgcttcgtgttcttcgacctgttcaacgccctgacctgcagaagccagaccaagctgatcttcgagatcggcttcctgagaaaccacatgttcctgtacagcgtgctgggcagcatcctgggccagctggccgtgatctacatcccccccctgcagagagtgttccagaccgagaacctgggcgccctggacctgctgttcctgaccggcctggccagcagcgtgttcatcctgagcgagctgctgaagctgtgcgagaagtactgctgcagccccaagagagtgcagatgcaccccgaggacgtgtag

SEQ ID NO: 109611 - protein, 549 aa, Artificial Sequence
  derived and/or modified sequence
MDVVEVAGSWWAQEREDIIMKYEKGHRAGLPEDKGPKPFRSYNNNVDHLGIVHETELPPLTAREAKQIRREISRKSKWVDMLGDWEKYKSSRKLIDRAYKGMPMNIRGPMWSVLLNIEEMKLKNPGRYQIMKEKGKRSSEHIQRIDRDISGTLRKHMFFRDRYGTKQRELLHILLAYEEYNPEVGYCRDLSHIAALFLLYFPEEDAFWALVQLLASERHSLQGFHSPNGGTVQGLQDQQEHVVATSQSKTMGHQDKKDLCGQCSPLGCLIRILIDGISLGLTLRLWDVYLVEGEQALMPITRIAFKVQQKRLTKTSRCGPWARFCNRFVDTWARDEDTVLKHLRASMKKLTRKQGDLPPPAKPEQGSSASRPVPASRGGKTLCKGDRQAPPGPPARFPRPIWSASPPRAPRSSTPCPGGAVREDTYPVGTQGVPSPALAQGGPQGSWRFLQWNSMPRLPTDLDVEGPWFRHYDFRQSCWVRAISQEDQLAPCWQAEHPAERVRSAFAAPSTDSDQGTPFRARDEQQYAPTSGPCLCGLHLESSQFPPGF

SEQ ID NO: 109612 - protein, 549 aa, Artificial Sequence
  derived and/or modified sequence
MDVVEVAGSWWAQEREDIIMKYEKGHRAGLPEDKGPKPFRSYNNNVDHLGIVHETELPPLTAREAKQIRREISRKSKWVDMLGDWEKYKSSRKLIDRAYKGMPMNIRGPMWSVLLNIEEMKLKNPGRYQIMKEKGKRSSEHIQRIDRDISGTLRKHMFFRDRYGTKQRELLHILLAYEEYNPEVGYCRDLSHIAALFLLYLPEEDAFWALVQLLASERHSLQGFHSPNGGTVQGLQDQQEHVVATSQSKTMGHQDKKDLCGQCSPLGCLIRILIDGISLGLTLRLWDVYLVEGEQALMPITRIAFKVQQKRLTKTSRCGPWARFCNRFVDTWARDEDTVLKHLRASMKKLTRKQGDLPPPAKPEQGSSASRPVPASRGGKTLCKGDRQAPPGPPAWFPRPIWSASPPRAPRSSTPCPGGAVREDTYPVGTQGVPSPALAQGGPQGSWRFLQWNSMPRLPTDLDVEGPWFRHYDFRQSCWVRAISQEDQLAPCWQAEHPAERVRSAFAAPSTDSDQGTPFRARDEQQCAPTSGPCLCGLHLESSQFPPGF

SEQ ID NO: 109613 - protein, 549 aa, Artificial Sequence
  derived and/or modified sequence
MDVVEVAGSWWAQEREDIIMKYEKGHRAGLPEDKGPKPFRSYNNNVDHLGIVHETELPPLTAREAKQIRREISRKSKWVDMLGDWEKYKSSRKLIDRAYKGMPMNIRGPMWSVLLNIEEMKLKNPGRYQIMKEKGKRSSEHIQRIDRDISGTLRKHMFFRDRYGTKQRELLHILLAYEEYNPEVGYCRDLSHIAALFLLYLPEEDAFWALVQLLASERHSLQGFHSPNGGTVQGLQDQQEHVVATSQPKTMGHQDKKDLCGQCSPLGCLIRILIDGISLGLTLRLWDVYLVEGEQALMPITRIAFKVQQKRLTKTSRCGPWARFCNRFVDTWARDEDTVLKHLRASMKKLTRKQGDLPPPAKPEQGSSASRPVPASRGGKTLCKGDRQAPPGPPARFPRPIWSASPPRAPRSSTPCPGGAVREDTYPVGTQGVPSPALAQGGPQGSWRFLQWNSMPRLPTDLDVEGPWFRHYDFRQSCWVRAISQEDQLAPCWQAEHPAERVRSAFAAPSTDSDQGTPFRARDEQQCAPTSGPCLCGLHLESSQFPPGF

SEQ ID NO: 109614 - protein, 469 aa, Artificial Sequence
  derived and/or modified sequence
MLGDWEKYKSSRKLIDRAYKGMPMNIRGPMWSVLLNIEEMKLKNPGRYQIMKEKGKRSSEHIQRIDRDISGTLRKHMFFRDRYGTKQRELLHILLAYEEYNPEVGYCRDLSHIAALFLLYLPEEDAFWALVQLLASERHSLQGFHSPNGGTVQGLQDQQEHVVATSQPKTMGHQDKKDLCGQCSPLGCLIRILIDGISLGLTLRLWDVYLVEGEQALMPITRIAFKVQQKRLTKTSRCGPWARFCNRFVDTWARDEDTVLKHLRASMKKLTRKQGDLPPPAKPEQGSSASRPVPASRGGKTLCKGDRQAPPGPPARFPRPIWSASPPRAPRSSTPCPGGAVREDTYPVGTQGVPSPALAQGGPQGSWRFLQWNSMPRLPTDLDVEGPWFRHYDFRQSCWVRAISQEDQLAPCWQAEHPAERVRSAFAAPSTDSDQGTPFRARDEQQCAPTSGPCLCGLHLESSQFPPGF

SEQ ID NO: 109615 - protein, 469 aa, Artificial Sequence
  derived and/or modified sequence
MLGDWEKYKSSRKLIDRAYKGMPMNIRGPMWSVLLNIEEMKLKNPGRYQIMKEKGKRSSEHIQRIDRDISGTLRKHMFFRDRYGTKQRELLHILLAYEEYNPEVGYCRDLSHIAALFLLYLPEEDAFWALVQLLASERHSLQGFHSPNGGTVQGLQDQQEHVVATSQPKTMGHQDKKDLCGQCSPLGCLIRILIDGISLGLTLRLWDVYLVEGEQALMPITRIAFKVQQKRLTKTSRCGPWARFCNRFVDTWARDEDTVLKHLRASMKKLTRKQGDLPPPAKPEQGSSASRPVPASRGGKTLCKGDRQAPPGPPAWFPRPIWSASPPRAPRSSTPCPGGAVREDTYPVGTQGVPSPALAQGGPQGSWRFLQWNSMPRLPTDLDVEGPWFRHYDFRQSCWVRAISQEDQLAPCWQAEHPAERVRSAFAAPSTDSDQGTPFRARDEQQCAPTSGPCLCGLHLESSQFPPGF

SEQ ID NO: 109616 - protein, 549 aa, Artificial Sequence
  derived and/or modified sequence
MDVVEVAGSWWAQEREDIIMKYEKGHQAGLPEDKGPKPFRSYNNNVDHLGIVHETELPPLTAREAKQIRREISRKSKWVDMLGDWEKYKSSRKLIDRAYKGMPMNIRGPMWSVLLNIEEMKLKNPGRYQIMKEKGKRSSEHIQRIDRDISGTLRKHMFFRDRYGTKQRELLHILLAYEEYNPEVGYCRDLSHIAALFLLYLPEEDAFWALVQLLASERHSLQGFHSPNGGTVQGLQDQQEHVVATSQPKTMGHQDKKDLCGQCSPLGCLIRILIDGISLGLTLRLWDVYLVEGEQALMPITRIAFKVQQKRLTKTSRCGPWARFCNRFVDTWARDEDTVLKHLRASMKKLTRKQGDLPPPAKPEQGSSASRPVPASRGGKTLCKGDRQAPPGPPARFPRPIWSASPPRAPRSSTPCPGGAVREDTYPVGTQGVPSPALAQGGPQGSWRFLQWNSMPRLPTDLDVEGPWFRHYDFRQSCWVRAISQEDQLAPCWQAEHPAERVRSAFAAPSTDSDQGTPFRARDEQQCAPTSGPCLCGLHLESSQFPPGF

SEQ ID NO: 109617 - DNA, 1650 bp, Artificial Sequence
  derived and/or modified sequence
atggacgtggtggaggtggccggcagctggtgggcccaggagagagaggacatcatcatgaagtacgagaagggccacagagccggcctgcccgaggacaagggccccaagcccttcagaagctacaacaacaacgtggaccacctgggcatcgtgcacgagaccgagctgccccccctgaccgccagagaggccaagcagatcagaagagagatcagcagaaagagcaagtgggtggacatgctgggcgactgggagaagtacaagagcagcagaaagctgatcgacagagcctacaagggcatgcccatgaacatcagaggccccatgtggagcgtgctgctgaacatcgaggagatgaagctgaagaaccccggcagataccagatcatgaaggagaagggcaagagaagcagcgagcacatccagagaatcgacagagacatcagcggcaccctgagaaagcacatgttcttcagagacagatacggcaccaagcagagagagctgctgcacatcctgctggcctacgaggagtacaaccccgaggtgggctactgcagagacctgagccacatcgccgccctgttcctgctgtacttccccgaggaggacgccttctgggccctggtgcagctgctggccagcgagagacacagcctgcagggcttccacagccccaacggcggcaccgtgcagggcctgcaggaccagcaggagcacgtggtggccaccagccagagcaagaccatgggccaccaggacaagaaggacctgtgcggccagtgcagccccctgggctgcctgatcagaatcctgatcgacggcatcagcctgggcctgaccctgagactgtgggacgtgtacctggtggagggcgagcaggccctgatgcccatcaccagaatcgccttcaaggtgcagcagaagagactgaccaagaccagcagatgcggcccctgggccagattctgcaacagattcgtggacacctgggccagagacgaggacaccgtgctgaagcacctgagagccagcatgaagaagctgaccagaaagcagggcgacctgcccccccccgccaagcccgagcagggcagcagcgccagcagacccgtgcccgccagcagaggcggcaagaccctgtgcaagggcgacagacaggccccccccggcccccccgccagattccccagacccatctggagcgccagcccccccagagcccccagaagcagcaccccctgccccggcggcgccgtgagagaggacacctaccccgtgggcacccagggcgtgcccagccccgccctggcccagggcggcccccagggcagctggagattcctgcagtggaacagcatgcccagactgcccaccgacctggacgtggagggcccctggttcagacactacgacttcagacagagctgctgggtgagagccatcagccaggaggaccagctggccccctgctggcaggccgagcaccccgccgagagagtgagaagcgccttcgccgcccccagcaccgacagcgaccagggcacccccttcagagccagagacgagcagcagtacgcccccaccagcggcccctgcctgtgcggcctgcacctggagagcagccagttcccccccggcttctag

SEQ ID NO: 109618 - DNA, 1650 bp, Artificial Sequence
  derived and/or modified sequence
atggacgtggtggaggtggccggcagctggtgggcccaggagagagaggacatcatcatgaagtacgagaagggccacagagccggcctgcccgaggacaagggccccaagcccttcagaagctacaacaacaacgtggaccacctgggcatcgtgcacgagaccgagctgccccccctgaccgccagagaggccaagcagatcagaagagagatcagcagaaagagcaagtgggtggacatgctgggcgactgggagaagtacaagagcagcagaaagctgatcgacagagcctacaagggcatgcccatgaacatcagaggccccatgtggagcgtgctgctgaacatcgaggagatgaagctgaagaaccccggcagataccagatcatgaaggagaagggcaagagaagcagcgagcacatccagagaatcgacagagacatcagcggcaccctgagaaagcacatgttcttcagagacagatacggcaccaagcagagagagctgctgcacatcctgctggcctacgaggagtacaaccccgaggtgggctactgcagagacctgagccacatcgccgccctgttcctgctgtacctgcccgaggaggacgccttctgggccctggtgcagctgctggccagcgagagacacagcctgcagggcttccacagccccaacggcggcaccgtgcagggcctgcaggaccagcaggagcacgtggtggccaccagccagagcaagaccatgggccaccaggacaagaaggacctgtgcggccagtgcagccccctgggctgcctgatcagaatcctgatcgacggcatcagcctgggcctgaccctgagactgtgggacgtgtacctggtggagggcgagcaggccctgatgcccatcaccagaatcgccttcaaggtgcagcagaagagactgaccaagaccagcagatgcggcccctgggccagattctgcaacagattcgtggacacctgggccagagacgaggacaccgtgctgaagcacctgagagccagcatgaagaagctgaccagaaagcagggcgacctgcccccccccgccaagcccgagcagggcagcagcgccagcagacccgtgcccgccagcagaggcggcaagaccctgtgcaagggcgacagacaggccccccccggcccccccgcctggttccccagacccatctggagcgccagcccccccagagcccccagaagcagcaccccctgccccggcggcgccgtgagagaggacacctaccccgtgggcacccagggcgtgcccagccccgccctggcccagggcggcccccagggcagctggagattcctgcagtggaacagcatgcccagactgcccaccgacctggacgtggagggcccctggttcagacactacgacttcagacagagctgctgggtgagagccatcagccaggaggaccagctggccccctgctggcaggccgagcaccccgccgagagagtgagaagcgccttcgccgcccccagcaccgacagcgaccagggcacccccttcagagccagagacgagcagcagtgcgcccccaccagcggcccctgcctgtgcggcctgcacctggagagcagccagttcccccccggcttctag

SEQ ID NO: 109619 - DNA, 1650 bp, Artificial Sequence
  derived and/or modified sequence
atggacgtggtggaggtggccggcagctggtgggcccaggagagagaggacatcatcatgaagtacgagaagggccacagagccggcctgcccgaggacaagggccccaagcccttcagaagctacaacaacaacgtggaccacctgggcatcgtgcacgagaccgagctgccccccctgaccgccagagaggccaagcagatcagaagagagatcagcagaaagagcaagtgggtggacatgctgggcgactgggagaagtacaagagcagcagaaagctgatcgacagagcctacaagggcatgcccatgaacatcagaggccccatgtggagcgtgctgctgaacatcgaggagatgaagctgaagaaccccggcagataccagatcatgaaggagaagggcaagagaagcagcgagcacatccagagaatcgacagagacatcagcggcaccctgagaaagcacatgttcttcagagacagatacggcaccaagcagagagagctgctgcacatcctgctggcctacgaggagtacaaccccgaggtgggctactgcagagacctgagccacatcgccgccctgttcctgctgtacctgcccgaggaggacgccttctgggccctggtgcagctgctggccagcgagagacacagcctgcagggcttccacagccccaacggcggcaccgtgcagggcctgcaggaccagcaggagcacgtggtggccaccagccagcccaagaccatgggccaccaggacaagaaggacctgtgcggccagtgcagccccctgggctgcctgatcagaatcctgatcgacggcatcagcctgggcctgaccctgagactgtgggacgtgtacctggtggagggcgagcaggccctgatgcccatcaccagaatcgccttcaaggtgcagcagaagagactgaccaagaccagcagatgcggcccctgggccagattctgcaacagattcgtggacacctgggccagagacgaggacaccgtgctgaagcacctgagagccagcatgaagaagctgaccagaaagcagggcgacctgcccccccccgccaagcccgagcagggcagcagcgccagcagacccgtgcccgccagcagaggcggcaagaccctgtgcaagggcgacagacaggccccccccggcccccccgccagattccccagacccatctggagcgccagcccccccagagcccccagaagcagcaccccctgccccggcggcgccgtgagagaggacacctaccccgtgggcacccagggcgtgcccagccccgccctggcccagggcggcccccagggcagctggagattcctgcagtggaacagcatgcccagactgcccaccgacctggacgtggagggcccctggttcagacactacgacttcagacagagctgctgggtgagagccatcagccaggaggaccagctggccccctgctggcaggccgagcaccccgccgagagagtgagaagcgccttcgccgcccccagcaccgacagcgaccagggcacccccttcagagccagagacgagcagcagtgcgcccccaccagcggcccctgcctgtgcggcctgcacctggagagcagccagttcccccccggcttctag

SEQ ID NO: 109620 - DNA, 1410 bp, Artificial Sequence
  derived and/or modified sequence
atgctgggcgactgggagaagtacaagagcagcagaaagctgatcgacagagcctacaagggcatgcccatgaacatcagaggccccatgtggagcgtgctgctgaacatcgaggagatgaagctgaagaaccccggcagataccagatcatgaaggagaagggcaagagaagcagcgagcacatccagagaatcgacagagacatcagcggcaccctgagaaagcacatgttcttcagagacagatacggcaccaagcagagagagctgctgcacatcctgctggcctacgaggagtacaaccccgaggtgggctactgcagagacctgagccacatcgccgccctgttcctgctgtacctgcccgaggaggacgccttctgggccctggtgcagctgctggccagcgagagacacagcctgcagggcttccacagccccaacggcggcaccgtgcagggcctgcaggaccagcaggagcacgtggtggccaccagccagcccaagaccatgggccaccaggacaagaaggacctgtgcggccagtgcagccccctgggctgcctgatcagaatcctgatcgacggcatcagcctgggcctgaccctgagactgtgggacgtgtacctggtggagggcgagcaggccctgatgcccatcaccagaatcgccttcaaggtgcagcagaagagactgaccaagaccagcagatgcggcccctgggccagattctgcaacagattcgtggacacctgggccagagacgaggacaccgtgctgaagcacctgagagccagcatgaagaagctgaccagaaagcagggcgacctgcccccccccgccaagcccgagcagggcagcagcgccagcagacccgtgcccgccagcagaggcggcaagaccctgtgcaagggcgacagacaggccccccccggcccccccgccagattccccagacccatctggagcgccagcccccccagagcccccagaagcagcaccccctgccccggcggcgccgtgagagaggacacctaccccgtgggcacccagggcgtgcccagccccgccctggcccagggcggcccccagggcagctggagattcctgcagtggaacagcatgcccagactgcccaccgacctggacgtggagggcccctggttcagacactacgacttcagacagagctgctgggtgagagccatcagccaggaggaccagctggccccctgctggcaggccgagcaccccgccgagagagtgagaagcgccttcgccgcccccagcaccgacagcgaccagggcacccccttcagagccagagacgagcagcagtgcgcccccaccagcggcccctgcctgtgcggcctgcacctggagagcagccagttcccccccggcttctag

SEQ ID NO: 109621 - DNA, 1410 bp, Artificial Sequence
  derived and/or modified sequence
atgctgggcgactgggagaagtacaagagcagcagaaagctgatcgacagagcctacaagggcatgcccatgaacatcagaggccccatgtggagcgtgctgctgaacatcgaggagatgaagctgaagaaccccggcagataccagatcatgaaggagaagggcaagagaagcagcgagcacatccagagaatcgacagagacatcagcggcaccctgagaaagcacatgttcttcagagacagatacggcaccaagcagagagagctgctgcacatcctgctggcctacgaggagtacaaccccgaggtgggctactgcagagacctgagccacatcgccgccctgttcctgctgtacctgcccgaggaggacgccttctgggccctggtgcagctgctggccagcgagagacacagcctgcagggcttccacagccccaacggcggcaccgtgcagggcctgcaggaccagcaggagcacgtggtggccaccagccagcccaagaccatgggccaccaggacaagaaggacctgtgcggccagtgcagccccctgggctgcctgatcagaatcctgatcgacggcatcagcctgggcctgaccctgagactgtgggacgtgtacctggtggagggcgagcaggccctgatgcccatcaccagaatcgccttcaaggtgcagcagaagagactgaccaagaccagcagatgcggcccctgggccagattctgcaacagattcgtggacacctgggccagagacgaggacaccgtgctgaagcacctgagagccagcatgaagaagctgaccagaaagcagggcgacctgcccccccccgccaagcccgagcagggcagcagcgccagcagacccgtgcccgccagcagaggcggcaagaccctgtgcaagggcgacagacaggccccccccggcccccccgcctggttccccagacccatctggagcgccagcccccccagagcccccagaagcagcaccccctgccccggcggcgccgtgagagaggacacctaccccgtgggcacccagggcgtgcccagccccgccctggcccagggcggcccccagggcagctggagattcctgcagtggaacagcatgcccagactgcccaccgacctggacgtggagggcccctggttcagacactacgacttcagacagagctgctgggtgagagccatcagccaggaggaccagctggccccctgctggcaggccgagcaccccgccgagagagtgagaagcgccttcgccgcccccagcaccgacagcgaccagggcacccccttcagagccagagacgagcagcagtgcgcccccaccagcggcccctgcctgtgcggcctgcacctggagagcagccagttcccccccggcttctag

SEQ ID NO: 109622 - DNA, 1650 bp, Artificial Sequence
  derived and/or modified sequence
atggacgtggtggaggtggccggcagctggtgggcccaggagagagaggacatcatcatgaagtacgagaagggccaccaggccggcctgcccgaggacaagggccccaagcccttcagaagctacaacaacaacgtggaccacctgggcatcgtgcacgagaccgagctgccccccctgaccgccagagaggccaagcagatcagaagagagatcagcagaaagagcaagtgggtggacatgctgggcgactgggagaagtacaagagcagcagaaagctgatcgacagagcctacaagggcatgcccatgaacatcagaggccccatgtggagcgtgctgctgaacatcgaggagatgaagctgaagaaccccggcagataccagatcatgaaggagaagggcaagagaagcagcgagcacatccagagaatcgacagagacatcagcggcaccctgagaaagcacatgttcttcagagacagatacggcaccaagcagagagagctgctgcacatcctgctggcctacgaggagtacaaccccgaggtgggctactgcagagacctgagccacatcgccgccctgttcctgctgtacctgcccgaggaggacgccttctgggccctggtgcagctgctggccagcgagagacacagcctgcagggcttccacagccccaacggcggcaccgtgcagggcctgcaggaccagcaggagcacgtggtggccaccagccagcccaagaccatgggccaccaggacaagaaggacctgtgcggccagtgcagccccctgggctgcctgatcagaatcctgatcgacggcatcagcctgggcctgaccctgagactgtgggacgtgtacctggtggagggcgagcaggccctgatgcccatcaccagaatcgccttcaaggtgcagcagaagagactgaccaagaccagcagatgcggcccctgggccagattctgcaacagattcgtggacacctgggccagagacgaggacaccgtgctgaagcacctgagagccagcatgaagaagctgaccagaaagcagggcgacctgcccccccccgccaagcccgagcagggcagcagcgccagcagacccgtgcccgccagcagaggcggcaagaccctgtgcaagggcgacagacaggccccccccggcccccccgccagattccccagacccatctggagcgccagcccccccagagcccccagaagcagcaccccctgccccggcggcgccgtgagagaggacacctaccccgtgggcacccagggcgtgcccagccccgccctggcccagggcggcccccagggcagctggagattcctgcagtggaacagcatgcccagactgcccaccgacctggacgtggagggcccctggttcagacactacgacttcagacagagctgctgggtgagagccatcagccaggaggaccagctggccccctgctggcaggccgagcaccccgccgagagagtgagaagcgccttcgccgcccccagcaccgacagcgaccagggcacccccttcagagccagagacgagcagcagtgcgcccccaccagcggcccctgcctgtgcggcctgcacctggagagcagccagttcccccccggcttctag

SEQ ID NO: 109623 - DNA, 1650 bp, Artificial Sequence
  derived and/or modified sequence
atggacgtggttgaggtcgccggatcctggtgggcacaggagagagaagacataattatgaaatatgagaaagggcatagagcaggcctcccagaagacaagggccctaagccgtttagatcgtataacaataatgtggaccatctgggaatagttcatgaaactgaactccctccacttacagcccgggaggccaagcagatcaggcgggagatttcgagaaagtctaaatgggttgacatgctcggggactgggaaaaatataaatcctcgagaaaattaattgatcgggcctataaaggcatgcctatgaacataagggggcctatgtggtccgtcctgctgaacatcgaggagatgaaacttaaaaatccaggcaggtaccagataatgaaggaaaaagggaagcgtagctccgaacatatacagcgcatcgatagggacatcagtggaacgctaagaaagcacatgtttttccgagatcggtacggaacaaagcagcgagaactcctgcatattctccttgcctacgaagaatataaccctgaggtcgggtattgtcgggacctgtctcacatagctgccctgttcttgctgtactttcccgaggaggatgcattctgggccctcgtccagctgctggctagcgagaggcattctctccaaggcttccattcccctaacggggggacagttcagggcctgcaagaccagcaagaacatgtggttgccacatcccagtccaagaccatgggacaccaggataaaaaggatttatgtggtcagtgctccccactagggtgccttatcaggatcttaatcgatggcatttccctgggactgaccctgcgtttgtgggacgtttacttggtcgagggcgaacaagccctgatgccgattactaggattgcttttaaagtgcagcagaaaaggctcaccaagacctcccgatgtggcccatgggccaggttttgcaatcggtttgtggatacctgggcgcgggacgaggatacagtactgaagcacctcagagcttctatgaaaaaattgacaagaaagcagggcgatttaccccctccagctaagcccgagcagggatcgtccgccagtcggccagtccctgcaagccggggtggtaagaccctgtgcaagggtgacagacaggctcctcctggccctccagcgcgctttcccaggccaatctggtctgcatctcctccccgagctcccagatcttccaccccatgtcctgggggcgctgtgcgcgaagatacttaccccgtcggaactcaaggtgtgccgagccccgcactggcgcaaggcggccctcagggatcatggcggtttctgcagtggaattccatgcctcggctcccaaccgacttggacgttgaaggcccgtggttccggcattatgattttagacaatcatgttgggtgagagcgatttcacaggaagaccagctggctccttgttggcaagccgagcatcccgcagaacgggttaggtctgccttcgcagctccttcgactgatagcgatcaagggactcctttccgcgccagggatgagcagcagtacgctccaacgtcagggccttgcctgtgtgggctgcatctcgagagctctcaatttccccctggcttttag

SEQ ID NO: 109624 - DNA, 1650 bp, Artificial Sequence
  derived and/or modified sequence
atggacgtagtggaagtggcaggctcatggtgggcccaagaacgggaagacattatcatgaaatatgagaagggccatagagcaggcctgcccgaggacaagggtccgaaaccttttcgatcgtacaataacaatgtcgatcatctgggtatcgtgcacgaaaccgagctgcctccccttactgccagagaagctaagcaaataagaagagagatatcaagaaagtcaaaatgggtcgacatgcttggagactgggaaaaatataaaagcagtcgcaaactgatcgacagggcctacaaaggaatgccaatgaacatccgggggcccatgtggtccgtgctgctcaatatcgaagaaatgaaactgaagaaccctggacgttatcagatcatgaaggagaagggcaagagatcttccgaacacatccagaggattgatcgggatatttccggcacacttcgtaaacacatgttcttcagggacaggtatgggactaaacagcgcgagctcctgcatattctgctggcatacgaggaatataaccccgaggtggggtattgtcgtgatctctcgcatatcgccgctttgttcttactttacttccccgaggaggatgctttttgggctttggtccagctgctggcctcagaaaggcactcacttcagggctttcattcccccaatggcgggaccgtccagggtctgcaagaccagcaggagcacgtcgtagccacctcccagagcaaaacaatggggcaccaagataagaaagatctctgtgggcagtgctctcctttgggttgtttgatacggatcttaatcgacggcatttcgcttgggctgactctgaggttatgggatgtatacctggtcgagggagagcaggctctcatgccaataacaaggatagcctttaaggtccaacagaagaggctgacaaagacctcccggtgcgggccttgggcacggttttgcaacaggttcgtggatacttgggcgcgcgatgaagacactgtcctgaagcatctgagagcgtctatgaagaagctgactagaaaacagggtgatctgccaccacctgccaagcctgagcagggctcatccgcttcccgcccagtgcccgcaagccgaggggggaaaacactgtgtaagggtgatcgccaagctcccccaggtccgcccgcacggtttccacggccaatatggtctgccagtccccccagagcaccccggtccagtactccatgcccggggggtgccgtaagagaagacacatatcctgtgggcacacagggtgtcccaagtccagctctagctcagggcggaccccagggaagctggcggttcctgcagtggaacagtatgccacgccttcctacagatctagatgtggaggggccttggtttcgccactatgactttagacagtcctgttgggtgcgcgctattagccaagaggatcagctggcaccgtgttggcaggcagaacacccagccgaacgtgtacgttctgccttcgctgcgcccagcactgattctgaccagggcaccccatttcgtgcaagggacgagcaacaatatgccccaacttctggcccatgcctgtgtgggctgcaccttgaaagtagccaattccctcctggcttctag

SEQ ID NO: 109625 - DNA, 1650 bp, Artificial Sequence
  derived and/or modified sequence
atggatgtcgttgaggtggccggttcatggtgggcccaggaaagggaggacattattatgaaatatgagaaaggacatagagctggccttcctgaagataagggtccaaagccattcagatcttacaataacaacgtcgatcacctaggcatcgtgcacgagaccgagttgccaccactcactgcaagggaggccaagcagatacggcgagagatctcaaggaagagtaagtgggtggacatgctgggcgactgggaaaaatataaatcatcacgtaaactgatcgatcgcgcatataagggtatgcccatgaatattaggggccccatgtggtccgttcttctaaacatcgaagagatgaaactgaagaatcccggacgttaccagattatgaaagagaaaggcaagcgcagctccgagcacatccagagaattgatcgggatatctctggtacgttgcgaaaacacatgttttttcgagatagatacggaacaaaacagcgggaacttctccatatcctgctggcctacgaagagtacaaccctgaggtgggctattgtcgcgacctttcgcacatcgccgccctcttcctactctatctgccggaagaagatgctttctgggcccttgtgcaactcctagcttcggaacgccactctctgcagggttttcacagcccgaatggcggtacagtgcagggcctgcaggaccaacaagagcacgtggtggcaacgtctcagtcaaaaactatgggccaccaggataagaaggatctctgtggacaatgcagcccgctgggatgcctgatcagaattctgattgacggtatatccctcgggctgacccttcggctgtgggacgtgtacctcgtagagggtgagcaggcgttgatgcctatcacgaggattgcatttaaggtccagcaaaaacggcttaccaagaccagtagatgcggaccctgggcccgcttttgtaacaggtttgtagacacatgggccagggatgaggatacagtcttgaaacatctgcgggcttcaatgaagaagctaacccgcaaacaaggtgatctaccccctcccgctaaaccagagcagggatcatcggcctccagacctgtcccggcatcacgaggagggaagacgctgtgcaagggcgacaggcaagctccaccagggcctcctgcctggtttccacgcccaatttggtctgcgtcacccccccgggcgccgagatccagcacgccatgtccggggggagcagttagggaggacacatatcccgtcggaacccagggcgttcccagcccggcactcgcccagggaggaccccaggggtcctggaggttcctgcagtggaacagtatgcccagattgccaaccgaccttgacgtggaaggtccctggttccgccactacgacttccggcagagttgttgggtccgtgctatttctcaagaggatcaactggcgccgtgttggcaggcagaacaccccgccgaacgtgtgcggagtgccttcgccgccccttccaccgactcagatcaggggacgcctttcagagccagggatgagcagcagtgtgcgccgacatctggcccatgtttatgtggcctgcacctggagtcaagccagttccccccgggcttttag

SEQ ID NO: 109626 - DNA, 1650 bp, Artificial Sequence
  derived and/or modified sequence
atggacgtggtcgaagtcgccggcagctggtgggcacaagaaagagaagatatcataatgaaatatgagaagggacacagagctgggctgcctgaggataagggacccaaaccatttcggtcatataacaacaacgtggatcacctgggaatcgtccatgagacggagctcccccctctaactgccagggaagccaaacagatacggcgggagatttctcggaagagcaaatgggtggacatgctgggcgattgggaaaaatacaagtcatccaggaaacttattgaccgggcttacaagggtatgccaatgaatattagaggcccaatgtggtccgttcttttgaacatagaggaaatgaagttgaagaaccctggcagatatcaaatcatgaaagaaaaaggcaagaggtcctctgagcatatccagcgcattgacagggatatttccgggaccttgcgcaagcatatgttttttcgggatcgttatggtacgaagcaacgcgagctgctccacattctactagcatacgaagagtacaaccccgaggtgggatactgtagggacctgagccacattgccgcgctgttccttctgtatctccccgaggaggacgcattttgggctttggtccagctgctggccagcgaaagacacagcctgcaggggttccattccccaaacggaggaacggtccagggattgcaggatcagcaagaacatgtggtggctacttcccaatctaagactatggggcaccaagataagaaagatctgtgtggccagtgtagcccactgggctgtctgatacggatcctcatcgacggcatctcattaggccttacgttaaggctatgggatgtgtacctggttgagggggagcaggccctcatgcccatcacccgcatcgctttcaaggtccagcagaaaagattaacaaagaccagccgctgcggtccatgggctagattctgtaaccgttttgtggacacatgggccagggacgaggacaccgttcttaagcatctgagagccagtatgaaaaagcttacccgaaagcagggggatctgccgcccccagccaaacccgaacagggcagtagtgcctcccgccccgttcccgcttctcgtggggggaaaaccctatgcaagggagatagacaggctcctccaggcccccctgcttggtttcctagacccatctggtctgcaagcccaccccgtgcccctcgatctagcacaccttgtccaggcggagccgtgcgcgaagatacatatcctgttgggacacagggtgtgcctagtcctgcacttgcccagggcgggccccagggatcctggcgctttctacaatggaatagtatgccgaggctgcctactgatctggacgtggaaggaccgtggtttagacactatgattttcgccaaagctgctgggtgcgagcaatctctcaggaggatcagctggcaccctgctggcaggccgagcatcccgctgaacgcgtaagaagcgcatttgctgcccccagtacagatagtgatcaaggaactccattccgggctcgggacgaacagcagtgcgcaccgacttctggaccttgcctctgtgggttacacctggagtcctcccagtttccccccgggttttag

SEQ ID NO: 109627 - DNA, 1650 bp, Artificial Sequence
  derived and/or modified sequence
atggacgtcgttgaggttgccggcagttggtgggcgcaggagcgagaggatattattatgaagtacgagaagggccatagggctggattacccgaggataaggggccaaagccttttcgaagctacaacaacaacgtggatcatctgggtattgtgcacgagaccgaattgccacccctcacagctagagaggcgaagcagatccgcagagaaatcagccgtaaaagcaagtgggtggacatgcttggagattgggagaaatataagagctctagaaagcttatcgacagagcatataaaggcatgcccatgaatatccgcggccccatgtggtccgttttgctgaatattgaggaaatgaagcttaagaaccctgggaggtaccagattatgaaagagaaaggtaagaggagttccgagcacatacaacgaatcgaccgggacatcagcggcaccctccgcaaacacatgttcttcagagatcgatatggcaccaagcagcgtgagcttctacatattttactggcctatgaggaatacaacccagaagttggctattgcagggatttatcccacattgcggctttattcctgctctacctgccagaagaggacgcattctgggccctggtccagctgctcgcctctgagagacatagcttgcagggattccactcgccgaacggggggacggtgcagggcctccaggatcaacaggagcatgtagttgctacttcccagcccaaaacaatgggtcatcaggataaaaaggatctctgcggccaatgtagcccccttggatgtctcatccggatcctgatagatggcattagtctcggattgacattgaggctctgggatgtgtacctagttgagggcgaacaagcactgatgccaatcacaagaatcgccttcaaggtgcagcagaagcgattaaccaaaactagccggtgtgggccttgggctcggttttgcaacaggtttgtggacacatgggcaagggacgaggacacagtcctgaaacaccttcgggcctctatgaaaaagcttaccagaaaacagggcgacctcccccccccagcgaaaccagagcaaggttcaagtgcgagcagacccgtgccggcaagccgtgggggtaagacattgtgtaagggcgataggcaggcacctcccgggccgcccgcgaggtttccgcgccccatctggagtgcaagcccaccccgggcgcccagatcctctaccccctgccccggcggcgcagtgcgcgaagatacttatcctgtggggacacagggagtcccctcgcccgctctagctcaaggcggcccccaaggaagctggcggtttctgcagtggaatagcatgccgagactgccgaccgacttggacgttgaaggaccctggtttagacactatgacttccgccagagctgttgggtgcgcgctatatcccaagaggatcaattggcgccatgctggcaggcggagcaccccgctgaaagagttaggagcgcatttgccgcacctagcacggactccgatcagggcacgcccttcagagcacgggatgaacagcagtgtgctcctacctccggcccttgcctgtgcggcttacacctagagagttcccaatttccgccgggattctag

SEQ ID NO: 109628 - DNA, 1650 bp, Artificial Sequence
  derived and/or modified sequence
atggatgttgtggaagtggcaggttcctggtgggcccaggagagagaagacataattatgaagtatgagaagggacatcgcgcaggcctgcccgaagacaagggccctaaacctttccgcagttacaataataatgtcgaccatttgggaattgtgcatgaaaccgaacttccccccctcacggcccgggaggctaaacagatccggcgggaaattagtaggaagagcaagtgggtggatatgctcggcgactgggagaaatataaatctagtagaaagctaatagaccgtgcttacaagggtatgccaatgaatattcgtggaccaatgtggagtgtgctgttgaatattgaggagatgaaactgaagaatcccggacggtaccagattatgaaagagaaggggaagagaagttcagaacatatccagagaattgacagagacattagtggtacgctgcggaaacacatgttcttccgggataggtatgggacaaagcagagggagttgctgcacatactcctggcctacgaagagtataatcccgaggttggctactgccgcgacttatcccatatcgctgctctcttcctgctgtacttgccggaagaagatgccttctgggcccttgtgcagcttcttgcgtcagaaaggcattcactgcagggcttccattcccctaacggtgggacagtgcagggattgcaagaccagcaggaacacgtggtagccacttcacaaccgaagaccatgggccaccaggataagaaggacctgtgtggacagtgttctcctttgggctgcctaatccgaattctcattgacggtatctccctgggcttaacgctgaggttatgggacgtctacttagttgagggcgagcaggctctcatgcctatcaccagaattgcctttaaagtgcaacaaaagcgcttgacaaagacttcccgatgcggcccttgggccagattctgcaatcgtttcgtggatacttgggcacgggacgaggatactgtactgaagcacctgagagcatcaatgaaaaaattgacaagaaaacaaggtgacctgcccccaccagccaagcccgagcaaggatcttccgcctcgaggcccgtgcccgcatctaggggcggtaagacactatgtaagggtgatagacaagcgccccctggcccacccgctaggtttccccgaccgatatggagtgcaagcccacctagagccccccggtcctcaacaccttgcccgggtggagcagtgcgggaggacacctatcctgttggcacacagggggtcccatccccagctctggcgcagggcggcccacaggggagctggcgtttcctccagtggaacagcatgccacgattacctactgacttggatgtggaaggcccatggtttcggcattatgactttcgacaatcctgctgggtgcgggccattagccaggaagatcagcttgcgccgtgttggcaggcggaacatcctgccgaaagggtgaggtctgcttttgctgcccccagtaccgactctgaccagggtacaccctttcgggccagggatgagcaacagtgcgcacctacgtccggaccatgtctctgcggccttcatcttgagagttcccaatttccccctgggttttag

SEQ ID NO: 109629 - DNA, 1410 bp, Artificial Sequence
  derived and/or modified sequence
atgcttggcgattgggaaaagtacaaatcttcccggaagctgattgatcgtgcctacaaggggatgccaatgaatattcgtggcccgatgtggagtgtcttactaaatatcgaggaaatgaagttgaagaaccccggacgctatcagatcatgaaggagaaagggaagcgcagctcagagcacatccaaagaatagatagggacatttctggcaccctgcgtaagcacatgttctttagggataggtacgggacaaaacagcgcgagcttctgcacatcctgcttgcctacgaagagtataatcctgaagtgggctactgtagagacctgtctcacattgccgcgttgttcctgctgtacttgccagaggaggatgccttctgggccttggtacagctcctcgcatccgagcggcatagcctacagggctttcattccccaaacgggggaacagtccaggggttgcaagatcagcaggagcatgtagtggctacatctcagccaaagaccatgggtcaccaggacaaaaaagatttgtgtggacaatgctctccccttgggtgcctcatccgaatcctgatcgacggaattagtttgggcttaacactgagactctgggatgtgtatctggtggagggcgaacaggcactaatgcccattacccgaattgcttttaaagtccagcagaaacggctgaccaaaacatccaggtgtgggccatgggcaaggttttgtaatagattcgtggacacatgggccagagatgaggacactgtgctgaaacacttgcgcgcctccatgaagaaactgactcggaaacagggggatcttccaccgcccgcaaaacctgagcaaggaagctcagcgagccgaccagtgcccgccagccgcggtggcaagacgctctgcaaaggagatcggcaggccccacccggccctcctgctagattcccccggcccatatggtctgctagtcccccacgtgcccctaggtctagcactccttgcccagggggtgctgtgagagaagacacctaccccgtcggcacccaaggtgtccctagccccgctctggcccagggaggcccgcaagggtcctggcgctttctgcagtggaattccatgccgagattgcctacagatttagatgtggaaggaccctggttcagacattacgattttcgacagagctgctgggtgagagctataagccaggaagaccagttggcaccctgttggcaggccgaacaccccgcggagagggtccgcagtgccttcgctgcccctagcaccgatagcgaccagggcacccccttcagggcgagagatgagcaacagtgcgctcccacaagcggaccgtgtctttgtggccttcacctggaatcctctcagtttccacctggcttctag

SEQ ID NO: 109630 - DNA, 1410 bp, Artificial Sequence
  derived and/or modified sequence
atgcttggggattgggagaagtataaaagcagcaggaagttaatcgacagggcttacaaaggaatgccgatgaatattagggggcctatgtggagtgtgctactcaacatcgaggaaatgaaactgaagaacccaggccggtaccaaatcatgaaggaaaagggcaagcgcagttccgagcacattcagcggattgatcgagacattagcgggacactgaggaaacatatgttcttcagagaccgttacgggaccaagcaaagagagctgttacatattctgctggcttacgaggaatacaacccagaagtggggtactgtagagatctgtcgcacattgccgccctattcctgctttatctgcctgaggaagacgcgttctgggcgctagttcaactgctggccagtgagagacatagtctccagggctttcacagccctaacggcggcaccgtccagggactgcaggatcagcaagagcacgtggtggctacatcccagcccaagacaatgggccatcaagacaagaaagatctgtgtgggcaatgctcaccgctcggttgcctgatcagaattctgattgatggtatctcactgggccttacgttacgtctttgggacgtatatctggtggagggtgagcaggccttgatgcccatcactaggattgctttcaaagtgcaacagaagcgtcttaccaagacatcacgatgtggcccctgggccagattctgcaataggtttgtggatacctgggcacgagatgaggatactgtccttaagcacctccgcgcaagtatgaagaagctgaccagaaagcagggcgacctacccccgcccgctaaaccggaacagggcagctctgcaagccgacctgtccccgccagtcggggcggaaagacactctgcaagggggaccgacaggcacctcctggaccccctgcctggttccctaggccaatctggtctgcatcacctccaagggctcccagatcatcaacgccttgccctggaggtgctgtgcgcgaggacacataccccgtgggtacccaaggtgttccgtcgcccgctttggcccagggcggtccccagggctcctggcgctttctccagtggaacagtatgcctcgactccccacggacctcgacgttgaaggcccttggtttaggcattacgatttccggcaatcatgttgggtgcgcgcaattagccaggaagatcagttggctccttgttggcaggccgagcaccctgcagaaagggtgcgcagtgccttcgctgcccccagtactgactcagaccaggggacacccttcagagctcgcgacgaacagcaatgtgcacctaccagtggtccctgcctgtgtgggctccacctggagtcatcccagttccccccaggcttctag

SEQ ID NO: 109631 - DNA, 1650 bp, Artificial Sequence
  derived and/or modified sequence
atggacgttgtggaggttgccggctcctggtgggctcaagaacgggaagatatcatcatgaaatacgagaagggtcaccaggctgggctcccggaggacaagggcccaaaacctttcagaagttacaacaacaacgttgaccatctcggcatagtgcacgaaactgaactcccacccttgactgccagagaggccaagcagattaggagagagattagccggaaatcaaagtgggtcgacatgctgggagactgggagaagtacaagagcagtcgcaagctgatcgaccgggcttataaagggatgccaatgaatattagaggcccgatgtggtccgtgttgctgaatatcgaggaaatgaaactgaagaaccccggccgataccagatcatgaaagagaagggtaagcgtagctcagagcatatccagcggatagatagggacatctctggcaccctgagaaaacacatgttcttcagagataggtatggtacgaaacagcgcgaactgctgcatatacttctcgcatatgaggagtataatcccgaggtggggtactgccgtgatctctctcatattgccgcgctcttcctgctgtatctgcctgaggaagatgctttctgggccctcgtccaactcctggcatccgagagacacagccttcagggttttcactctcccaatggcgggacagtgcagggcctccaggaccaacaagagcatgtcgtggcaactagccagcctaagacaatgggacaccaggacaagaaagatctgtgtgggcagtgctctcccctggggtgtctgatcagaatcctaattgatggaatctctttgggattaactctgaggctgtgggacgtctacctcgttgagggagagcaggccctgatgccaattacccgaattgcattcaaagtgcagcagaaacgccttactaagacaagcaggtgtggcccatgggcacggttctgtaatcgattcgtggatacctgggcaagagacgaggacactgtgcttaagcacctgcgagcctcaatgaaaaaactcacacggaagcagggcgacctgcctccaccagctaagccagagcagggctcttcagcctcgcggccagtaccagctagtcggggtggcaaaactttgtgcaaaggcgaccggcaggcaccccctggtcccccagcccggttcccaaggcccatttggtccgcctcaccaccacgcgctcccaggtcgtctacaccttgtcccggaggggccgtcagggaggacacataccccgttggcacccaaggcgtcccctccccagccttggcccaaggaggtccacagggttcatggaggttcctacagtggaactccatgccacgcctaccgaccgacctggatgtagaaggtccgtggttccgccactacgacttcagacagtcctgctgggtgagagccattagccaggaggatcagctggccccctgctggcaagccgagcatcctgctgaacgcgtgcggtcggcttttgcagccccgagcacggactccgaccagggcaccccgttcagggctagggatgaacagcagtgtgcaccgacctcagggccctgcttgtgtggcctccacttagaaagcagtcagttcccccccggcttttag

SEQ ID NO: 109632 - DNA, 1410 bp, Artificial Sequence
  derived and/or modified sequence
atgctcggtgactgggaaaaatacaagtcttcgagaaagctcatcgacagggcctataagggaatgcccatgaatatccggggaccaatgtggtccgtgcttctgaatattgaagagatgaaattgaagaaccctggacgatatcagatcatgaaagaaaaagggaagcgctcaagtgaacacattcaacgtatcgatcgggacataagtggtacactacgtaagcacatgttctttcgggaccgctatgggaccaagcagagagagctcctgcacatcttactggcctacgaggaatacaatcctgaagtaggctactgccgcgacctgtcccatattgccgccctgtttctgctgtatctcccagaagaagatgccttttgggcactggtgcagctactggcctccgagagacactctttacaggggttccactcgccaaatggcggcacagtccagggccttcaggaccagcaagaacatgtggtggccacctcccagcctaagaccatggggcaccaggacaagaaagatctgtgcgggcaatgctctccgctaggctgtttaattcgcattctgattgacggtattagtttggggttaactctgcggctgtgggacgtctatctggtagagggggaacaggccttgatgccaatcaccaggatcgcctttaaagtgcagcagaaacgcctcaccaaaacaagcagatgtggcccctgggcgcggttctgcaatagattcgtggatacatgggccagggacgaagatacggtgctaaagcacctcagagcctccatgaagaagcttacaaggaaacaaggggatctaccccctcctgccaagcctgagcaggggagttctgctagcaggcccgtacctgcttcgcgaggcgggaagaccctgtgcaaaggagatcgccaagcccctcccggcccccctgcctggttccctcgacccatttggtcggcaagcccacccagagctccccgatcctcaactccctgccctggcggcgccgtacgtgaggacacttaccccgtggggacccagggcgtccctagcccggctctcgctcagggagggccgcagggatcctggcgattcctgcaatggaatagcatgccaaggctcccgaccgacctagacgtggaggggccctggtttcgtcactacgattttcgccagtcatgctgggtgcgggctatctcacaggaggatcaactggccccttgctggcaagcggagcaccctgccgagagggtgagaagcgcctttgccgccccaagtacagactcagatcagggtaccccatttagggcacgtgatgaacagcagtgcgctcccacaagtggcccttgcctgtgcggcctgcatctcgaatcctcccagtttcccccggggttttag

SEQ ID NO: 109633 - DNA, 1650 bp, Artificial Sequence
  derived and/or modified sequence
atggatgtggtggaggtggccggctcctggtgggcccaggagcgggaggacatcatcatgaagtatgagaagggccaccgggccggcctgcctgaggacaagggccccaagcccttccgcagctacaacaacaacgtggaccacctgggcatcgtgcatgaaacagagctgccccccctgacagcccgggaggccaagcagatcagaagagagatcagcaggaagagcaagtgggtggacatgctgggggactgggagaagtacaagagcagcaggaagctgattgaccgggcctacaagggcatgcccatgaacatccggggccccatgtggagcgtgctgctgaacatcgaggagatgaagctgaagaaccctggccgctaccagatcatgaaggagaagggcaagaggagcagcgagcacatccagagaattgaccgggacatcagcggcaccctgaggaagcacatgttcttccgggacagatatggcaccaagcagcgggagctgctgcacatcctgctggcctatgaggagtacaaccctgaggtgggctactgccgggacctgagccacatcgccgccctcttcctgctgtacttccctgaggaggatgccttctgggccctggtgcagctgctggccagcgagcggcacagcctgcagggcttccacagccccaacggcggcaccgtgcagggcctgcaggaccagcaggagcacgtggtggccaccagccagagcaagaccatgggccaccaggacaagaaggacctgtgtggccagtgcagccccctgggctgcctgatccgcatcctgattgatggcatcagcctgggcctgaccctgcggctgtgggatgtgtacctggtggagggggagcaggccctgatgcccatcaccagaattgccttcaaggtgcagcagaagaggctgaccaagaccagccgctgtggcccctgggcccgcttctgcaacagatttgtggacacctgggccagagatgaggacacagtgctgaagcacctgcgggcctccatgaagaagctgaccaggaagcagggcgacctgcccccaccagccaagccagagcagggcagcagcgccagcaggcctgtgcctgccagccggggcggcaagaccctgtgcaagggggaccggcaggcccctcctggccccccagcccgcttcccccggcccatctggagcgccagccccccccgggcccccaggagcagcaccccctgccctggaggagctgtgcgggaggacacctaccctgtgggcacccagggcgtgcccagccctgccctggcccagggcggcccccagggctcctggaggttcctgcagtggaacagcatgccccggctgcccacagacctggatgtggagggcccctggttccgccactatgacttccggcagagctgctgggtgcgggccatcagccaggaggaccagctggccccctgctggcaggccgagcaccctgctgagcgggtgcgcagcgcctttgctgcccccagcacagacagcgaccagggcacccccttccgggccagagatgagcagcagtatgcccccaccagcggcccctgcctgtgtggcctgcacctggagagcagccagttccccccaggcttctag

SEQ ID NO: 109634 - DNA, 1650 bp, Artificial Sequence
  derived and/or modified sequence
atggatgtggtggaggtggccggctcctggtgggcccaggagcgggaggacatcatcatgaagtatgagaagggccaccgggccggcctgcctgaggacaagggccccaagcccttccgcagctacaacaacaacgtggaccacctgggcatcgtgcatgaaacagagctgccccccctgacagcccgggaggccaagcagatcagaagagagatcagcaggaagagcaagtgggtggacatgctgggggactgggagaagtacaagagcagcaggaagctgattgaccgggcctacaagggcatgcccatgaacatccggggccccatgtggagcgtgctgctgaacatcgaggagatgaagctgaagaaccctggccgctaccagatcatgaaggagaagggcaagaggagcagcgagcacatccagagaattgaccgggacatcagcggcaccctgaggaagcacatgttcttccgggacagatatggcaccaagcagcgggagctgctgcacatcctgctggcctatgaggagtacaaccctgaggtgggctactgccgggacctgagccacatcgccgccctcttcctgctgtacctgcctgaggaggatgccttctgggccctggtgcagctgctggccagcgagcggcacagcctgcagggcttccacagccccaacggcggcaccgtgcagggcctgcaggaccagcaggagcacgtggtggccaccagccagagcaagaccatgggccaccaggacaagaaggacctgtgtggccagtgcagccccctgggctgcctgatccgcatcctgattgatggcatcagcctgggcctgaccctgcggctgtgggatgtgtacctggtggagggggagcaggccctgatgcccatcaccagaattgccttcaaggtgcagcagaagaggctgaccaagaccagccgctgtggcccctgggcccgcttctgcaacagatttgtggacacctgggccagagatgaggacacagtgctgaagcacctgcgggcctccatgaagaagctgaccaggaagcagggcgacctgcccccaccagccaagccagagcagggcagcagcgccagcaggcctgtgcctgccagccggggcggcaagaccctgtgcaagggggaccggcaggcccctcctggccccccagcctggttcccccggcccatctggagcgccagccccccccgggcccccaggagcagcaccccctgccctggaggagctgtgcgggaggacacctaccctgtgggcacccagggcgtgcccagccctgccctggcccagggcggcccccagggctcctggaggttcctgcagtggaacagcatgccccggctgcccacagacctggatgtggagggcccctggttccgccactatgacttccggcagagctgctgggtgcgggccatcagccaggaggaccagctggccccctgctggcaggccgagcaccctgctgagcgggtgcgcagcgcctttgctgcccccagcacagacagcgaccagggcacccccttccgggccagagatgagcagcagtgtgcccccaccagcggcccctgcctgtgtggcctgcacctggagagcagccagttccccccaggcttctag

SEQ ID NO: 109635 - DNA, 1650 bp, Artificial Sequence
  derived and/or modified sequence
atggatgtggtggaggtggccggctcctggtgggcccaggagcgggaggacatcatcatgaagtatgagaagggccaccgggccggcctgcctgaggacaagggccccaagcccttccgcagctacaacaacaacgtggaccacctgggcatcgtgcatgaaacagagctgccccccctgacagcccgggaggccaagcagatcagaagagagatcagcaggaagagcaagtgggtggacatgctgggggactgggagaagtacaagagcagcaggaagctgattgaccgggcctacaagggcatgcccatgaacatccggggccccatgtggagcgtgctgctgaacatcgaggagatgaagctgaagaaccctggccgctaccagatcatgaaggagaagggcaagaggagcagcgagcacatccagagaattgaccgggacatcagcggcaccctgaggaagcacatgttcttccgggacagatatggcaccaagcagcgggagctgctgcacatcctgctggcctatgaggagtacaaccctgaggtgggctactgccgggacctgagccacatcgccgccctcttcctgctgtacctgcctgaggaggatgccttctgggccctggtgcagctgctggccagcgagcggcacagcctgcagggcttccacagccccaacggcggcaccgtgcagggcctgcaggaccagcaggagcacgtggtggccaccagccagcccaagaccatgggccaccaggacaagaaggacctgtgtggccagtgcagccccctgggctgcctgatccgcatcctgattgatggcatcagcctgggcctgaccctgcggctgtgggatgtgtacctggtggagggggagcaggccctgatgcccatcaccagaattgccttcaaggtgcagcagaagaggctgaccaagaccagccgctgtggcccctgggcccgcttctgcaacagatttgtggacacctgggccagagatgaggacacagtgctgaagcacctgcgggcctccatgaagaagctgaccaggaagcagggcgacctgcccccaccagccaagccagagcagggcagcagcgccagcaggcctgtgcctgccagccggggcggcaagaccctgtgcaagggggaccggcaggcccctcctggccccccagcccgcttcccccggcccatctggagcgccagccccccccgggcccccaggagcagcaccccctgccctggaggagctgtgcgggaggacacctaccctgtgggcacccagggcgtgcccagccctgccctggcccagggcggcccccagggctcctggaggttcctgcagtggaacagcatgccccggctgcccacagacctggatgtggagggcccctggttccgccactatgacttccggcagagctgctgggtgcgggccatcagccaggaggaccagctggccccctgctggcaggccgagcaccctgctgagcgggtgcgcagcgcctttgctgcccccagcacagacagcgaccagggcacccccttccgggccagagatgagcagcagtgtgcccccaccagcggcccctgcctgtgtggcctgcacctggagagcagccagttccccccaggcttctag

SEQ ID NO: 109636 - DNA, 1410 bp, Artificial Sequence
  derived and/or modified sequence
atgctgggggactgggagaagtacaagagcagcaggaagctgattgaccgggcctacaagggcatgcccatgaacatccggggccccatgtggagcgtgctgctgaacatcgaggagatgaagctgaagaaccctggccgctaccagatcatgaaggagaagggcaagaggagcagcgagcacatccagagaattgaccgggacatcagcggcaccctgaggaagcacatgttcttccgggacagatatggcaccaagcagcgggagctgctgcacatcctgctggcctatgaggagtacaaccctgaggtgggctactgccgggacctgagccacatcgccgccctcttcctgctgtacctgcctgaggaggatgccttctgggccctggtgcagctgctggccagcgagcggcacagcctgcagggcttccacagccccaacggcggcaccgtgcagggcctgcaggaccagcaggagcacgtggtggccaccagccagcccaagaccatgggccaccaggacaagaaggacctgtgtggccagtgcagccccctgggctgcctgatccgcatcctgattgatggcatcagcctgggcctgaccctgcggctgtgggatgtgtacctggtggagggggagcaggccctgatgcccatcaccagaattgccttcaaggtgcagcagaagaggctgaccaagaccagccgctgtggcccctgggcccgcttctgcaacagatttgtggacacctgggccagagatgaggacacagtgctgaagcacctgcgggcctccatgaagaagctgaccaggaagcagggcgacctgcccccaccagccaagccagagcagggcagcagcgccagcaggcctgtgcctgccagccggggcggcaagaccctgtgcaagggggaccggcaggcccctcctggccccccagcccgcttcccccggcccatctggagcgccagccccccccgggcccccaggagcagcaccccctgccctggaggagctgtgcgggaggacacctaccctgtgggcacccagggcgtgcccagccctgccctggcccagggcggcccccagggctcctggaggttcctgcagtggaacagcatgccccggctgcccacagacctggatgtggagggcccctggttccgccactatgacttccggcagagctgctgggtgcgggccatcagccaggaggaccagctggccccctgctggcaggccgagcaccctgctgagcgggtgcgcagcgcctttgctgcccccagcacagacagcgaccagggcacccccttccgggccagagatgagcagcagtgtgcccccaccagcggcccctgcctgtgtggcctgcacctggagagcagccagttccccccaggcttctag

SEQ ID NO: 109637 - DNA, 1410 bp, Artificial Sequence
  derived and/or modified sequence
atgctgggggactgggagaagtacaagagcagcaggaagctgattgaccgggcctacaagggcatgcccatgaacatccggggccccatgtggagcgtgctgctgaacatcgaggagatgaagctgaagaaccctggccgctaccagatcatgaaggagaagggcaagaggagcagcgagcacatccagagaattgaccgggacatcagcggcaccctgaggaagcacatgttcttccgggacagatatggcaccaagcagcgggagctgctgcacatcctgctggcctatgaggagtacaaccctgaggtgggctactgccgggacctgagccacatcgccgccctcttcctgctgtacctgcctgaggaggatgccttctgggccctggtgcagctgctggccagcgagcggcacagcctgcagggcttccacagccccaacggcggcaccgtgcagggcctgcaggaccagcaggagcacgtggtggccaccagccagcccaagaccatgggccaccaggacaagaaggacctgtgtggccagtgcagccccctgggctgcctgatccgcatcctgattgatggcatcagcctgggcctgaccctgcggctgtgggatgtgtacctggtggagggggagcaggccctgatgcccatcaccagaattgccttcaaggtgcagcagaagaggctgaccaagaccagccgctgtggcccctgggcccgcttctgcaacagatttgtggacacctgggccagagatgaggacacagtgctgaagcacctgcgggcctccatgaagaagctgaccaggaagcagggcgacctgcccccaccagccaagccagagcagggcagcagcgccagcaggcctgtgcctgccagccggggcggcaagaccctgtgcaagggggaccggcaggcccctcctggccccccagcctggttcccccggcccatctggagcgccagccccccccgggcccccaggagcagcaccccctgccctggaggagctgtgcgggaggacacctaccctgtgggcacccagggcgtgcccagccctgccctggcccagggcggcccccagggctcctggaggttcctgcagtggaacagcatgccccggctgcccacagacctggatgtggagggcccctggttccgccactatgacttccggcagagctgctgggtgcgggccatcagccaggaggaccagctggccccctgctggcaggccgagcaccctgctgagcgggtgcgcagcgcctttgctgcccccagcacagacagcgaccagggcacccccttccgggccagagatgagcagcagtgtgcccccaccagcggcccctgcctgtgtggcctgcacctggagagcagccagttccccccaggcttctag

SEQ ID NO: 109638 - DNA, 1650 bp, Artificial Sequence
  derived and/or modified sequence
atggatgtggtggaggtggccggctcctggtgggcccaggagcgggaggacatcatcatgaagtatgagaagggccaccaggccggcctgcctgaggacaagggccccaagcccttccgcagctacaacaacaacgtggaccacctgggcatcgtgcatgaaacagagctgccccccctgacagcccgggaggccaagcagatcagaagagagatcagcaggaagagcaagtgggtggacatgctgggggactgggagaagtacaagagcagcaggaagctgattgaccgggcctacaagggcatgcccatgaacatccggggccccatgtggagcgtgctgctgaacatcgaggagatgaagctgaagaaccctggccgctaccagatcatgaaggagaagggcaagaggagcagcgagcacatccagagaattgaccgggacatcagcggcaccctgaggaagcacatgttcttccgggacagatatggcaccaagcagcgggagctgctgcacatcctgctggcctatgaggagtacaaccctgaggtgggctactgccgggacctgagccacatcgccgccctcttcctgctgtacctgcctgaggaggatgccttctgggccctggtgcagctgctggccagcgagcggcacagcctgcagggcttccacagccccaacggcggcaccgtgcagggcctgcaggaccagcaggagcacgtggtggccaccagccagcccaagaccatgggccaccaggacaagaaggacctgtgtggccagtgcagccccctgggctgcctgatccgcatcctgattgatggcatcagcctgggcctgaccctgcggctgtgggatgtgtacctggtggagggggagcaggccctgatgcccatcaccagaattgccttcaaggtgcagcagaagaggctgaccaagaccagccgctgtggcccctgggcccgcttctgcaacagatttgtggacacctgggccagagatgaggacacagtgctgaagcacctgcgggcctccatgaagaagctgaccaggaagcagggcgacctgcccccaccagccaagccagagcagggcagcagcgccagcaggcctgtgcctgccagccggggcggcaagaccctgtgcaagggggaccggcaggcccctcctggccccccagcccgcttcccccggcccatctggagcgccagccccccccgggcccccaggagcagcaccccctgccctggaggagctgtgcgggaggacacctaccctgtgggcacccagggcgtgcccagccctgccctggcccagggcggcccccagggctcctggaggttcctgcagtggaacagcatgccccggctgcccacagacctggatgtggagggcccctggttccgccactatgacttccggcagagctgctgggtgcgggccatcagccaggaggaccagctggccccctgctggcaggccgagcaccctgctgagcgggtgcgcagcgcctttgctgcccccagcacagacagcgaccagggcacccccttccgggccagagatgagcagcagtgtgcccccaccagcggcccctgcctgtgtggcctgcacctggagagcagccagttccccccaggcttctag

SEQ ID NO: 109639 - DNA, 1650 bp, Artificial Sequence
  derived and/or modified sequence
atggacgtggtggaggtggccggcagctggtgggcccaggagcgggaggacattatcatgaagtacgagaagggacacagggctggccttcccgaggacaagggccctaaacccttcagatcttataacaacaacgtggaccacttgggtattgtacacgaaacggaactgccaccgctgacagcccgcgaggctaaacaaattcgccgggagatatccaggaagtccaagtgggttgatatgctcggagactgggagaagtataagagttctaggaagctgattgatagagcatacaaaggaatgcctatgaatattaggggccccatgtggagcgtgcttctgaacatcgaggagatgaagctcaagaaccccggtagataccagataatgaaggagaagggcaaaaggagcagtgagcacatccagcggattgaccgcgatatttcggggacattgcgcaaacacatgttcttcagagatcgttacgggacaaagcagcgagaattattgcatatcctcctcgcctacgaggagtacaaccccgaagtgggttactgccgggatctctcacatatagcagcacttttcctcttgtattttccagaagaggacgccttctgggccttggtgcagttattggccagcgagagacatagcctgcagggcttccactcgcctaacggcggaacagttcagggattgcaagatcaacaggagcacgtggtcgcaacttcacagagcaagacgatggggcatcaggataagaaagatctgtgcgggcaatgttccccactcgggtgcctgatcaggattctcatcgacggaataagcctgggcttaaccctgagactgtgggatgtctatttggtggaaggagagcaagcccttatgcctatcactaggattgcatttaaggttcaacagaagaggctgaccaaaacgtctcgctgcggcccatgggcgcggttctgcaaccgcttcgtcgatacctgggctagagatgaggataccgtattgaaacacctgcgggcttctatgaaaaagttgaccagaaaacagggcgatctgcctccccccgcaaaaccagagcaaggaagtagcgcatcccgtccggtccctgcaagcagaggtggcaagactttgtgtaaaggagatcgccaggccccgcccggcccgcccgcgcgctttcctcgtcctatttggtctgccagtccacctagggcccccagatcttccactccatgtcctgggggtgccgtccgggaggatacatatcccgtggggacccagggtgttccttctcccgcactcgcccaaggtgggccccagggctcttggcgcttcctgcagtggaactctatgcccagactgccaaccgacctggatgtcgagggaccctggtttaggcactatgatttccggcaaagctgttgggtccgcgccatctcacaggaggaccagctggctccatgctggcaggccgaacaccctgcagaacgcgttcgcagcgcttttgcagccccgtccactgactctgaccagggaactcctttccgcgccagggacgagcaacagtacgcacctaccagcggaccatgtctgtgtggacttcacttggagagcagtcaattccctcccggattctag

SEQ ID NO: 109640 - DNA, 1650 bp, Artificial Sequence
  derived and/or modified sequence
atggacgtggtggaggtggccggcagctggtgggcccaggagcgggaggatatcatcatgaagtacgaaaaaggtcaccgggctggcttgcccgaagacaaaggaccaaaaccatttagaagttacaataacaacgtagaccatcttgggatcgttcacgaaacagagctgccaccactgacagcaagggaagcgaagcaaatccggcgtgaaatctcaaggaagtcaaagtgggtcgacatgctgggcgactgggagaagtacaaatctagccgtaagctgatcgacagagcctataagggcatgcctatgaacattagggggcctatgtggtcagtgctcttgaacatcgaagaaatgaagctcaaaaacccagggcgctatcagattatgaaggagaagggaaaaaggtcttcagagcacattcaacggatcgatagagacatctcaggcacgctgcgtaaacacatgttctttcgagatcgttatggcaccaaacagagggagttgctgcatatattacttgcgtatgaagagtataaccccgaggtaggctattgtcgggacctaagccatatcgcagccctgtttctgctatatttccccgaggaagatgccttttgggctcttgtgcagctgctggcttccgaaaggcactctctccagggctttcactcgcctaatggtggaactgtacagggcctccaggaccagcaggaacacgtggtggctaccagccagtcaaagactatggggcatcaagataagaaggatctgtgcgggcagtgctctccattggggtgtcttattcggattctcattgatggcatatccctaggacttacgctgcgactctgggacgtgtacctcgtggagggtgagcaggcactgatgcccatcacacggatcgcctttaaagtccaacagaagcggcttactaaaacctccagatgcggaccgtgggcgaggttctgtaatcgattcgtagacacttgggctcgggacgaagatacagtccttaaacatctcagagcttctatgaaaaagctcaccaggaagcaaggcgacttgcctccacccgctaagcccgagcaggggtctagtgcgtctagaccagtcccagctagcagaggaggcaagaccctttgcaagggcgaccgccaggccccgcccggaccacccgccaggtttcctcggcctatttggtctgcctcccctccacgcgctcctcggtcaagcacaccttgtcctggtggagccgtccgagaagatacctatcctgtcggcacccagggagtgcccagccctgcactggctcagggaggccctcagggctcctggcgctttctgcagtggaattccatgcccagactgccaacagacttggatgttgaaggtccttggtttcgccactatgacttccgccagtcatgttgggtcagggccatctcccaggaggaccagctcgctccttgttggcaggcagaacatccagcagagagggtccgttccgctttcgctgccccgagtacagatagcgaccagggaacgcctttccgggcccgagacgaacaacagtatgctcctacctccggaccatgtttatgcggtctgcatctggagtcctcacagttcccccctgggttttag

SEQ ID NO: 109641 - DNA, 1650 bp, Artificial Sequence
  derived and/or modified sequence
atggacgtggtggaggtggccggcagctggtgggcccaggagcgggaggacataattatgaagtatgagaaaggacatcgagccggactgccagaagataaaggtcccaaaccatttaggtcttataataacaacgtcgatcatttgggtatcgtccacgaaacggagctcccgcccctgacggcccgcgaagctaaacagataagacgagagatatcgcgcaagagtaaatgggtggacatgttgggagactgggagaagtacaaatcgagtcgcaagctgatcgaccgagcctacaagggaatgcccatgaacattcggggccctatgtggagtgttctgcttaatatagaagaaatgaaactgaaaaacccaggccgttaccagatcatgaaggagaaagggaaacgaagctccgaacatatccagcgcattgatagggacatctccggaactttacgtaaacacatgttctttcgcgacagatacggaacgaagcaaagagaactactgcacatcctgctagcatatgaggaatataatcctgaagtggggtactgtagggacctctcacacattgcggcactcttcctcctatacctgcccgaagaggatgcattttgggcactggtccaactgctcgcatctgaacggcactcactccagggtttccactcaccaaacggagggactgtccagggcctccaggaccaacaggaacacgtggtggctacaagccagagcaaaacaatgggtcatcaagacaaaaaagacctctgtggccagtgttctccactcgggtgtcttatccgcatcctgattgacggtataagcctgggcctgactctcagattgtgggacgtctacttggtcgaaggagaacaggcactgatgccaatcacacggatcgcctttaaagtccagcagaaacggctgacaaagacctccagatgtggcccctgggccaggttttgcaatagattcgtagatacatgggcccgagacgaagacacggttctgaaacacctgcgtgccagcatgaagaagcttaccagaaaacaaggcgacctccctccgcctgcaaaaccagagcagggctcctccgcctcgcgtccagtgccagcatcacgaggggggaaaaccctgtgcaagggcgacagacaggctccacccggacccccagcctggttcccccggcctatctggtccgcttccccgcccagggccccaagatcctccactccttgccctgggggcgcagttcgagaagacacctacccggtgggtactcagggagttcctagtcccgcattggcccaaggaggcccacaaggcagctggcgatttctgcaatggaactccatgccaaggttgcctaccgatctggatgtggagggtccctggttcaggcactacgatttccggcagagctgttgggtccgcgccatttcccaagaagatcaactggctccctgctggcaggccgagcatcctgctgagcgagtacggtctgctttcgccgccccatctaccgactcagatcaaggcaccccttttagagccagggatgaacagcaatgcgcacccacctccgggccctgtttgtgtggtctgcaccttgagtcgtctcaatttccaccaggcttttag

SEQ ID NO: 109642 - DNA, 1650 bp, Artificial Sequence
  derived and/or modified sequence
atggacgtggtggaggtggccggcagctggtgggcccaggagcgggaggacatcattatgaagtacgagaagggccaccgagccggcctgcctgaggacaaaggccccaaaccattcaggagctacaacaacaacgttgaccacctgggcatagtgcatgagacggaactgccccccctgacagcgcgggaggctaagcagatccgcagagagatatcacgtaaaagcaagtgggtggacatgctcggggattgggagaagtacaagagcagtcgaaagctgatcgatagagcctacaagggcatgcctatgaatatcaggggccctatgtggtctgttctcctgaatatcgaggagatgaagctgaaaaacccgggccgatatcagatcatgaaagagaaggggaaaaggtcaagcgagcacattcagcgaattgaccgcgacatctctggtacactgcgaaaacacatgttcttcagagatcgctatggcaccaagcagcgggagctgttgcacattctgcttgcctacgaggagtataatccagaggttggctactgcagggatttgtcccacatagcagccttgttcttattgtaccttcccgaggaggacgccttttgggctctggtgcagctgctggcctcggaacggcatagcctgcagggattccattccccaaacggcggaacagtgcagggtctccaggatcaacaggagcacgtcgttgcaaccagccaatctaagaccatgggtcatcaggacaaaaaggatctgtgtggccaatgcagccccctgggttgcctgataaggatcctcattgatggcatttctttaggccttaccctcagattatgggacgtgtatctggtcgagggtgagcaggccttgatgcctattacccgcatcgcctttaaggtgcagcagaaacggctcaccaaaactagcagatgtgggccctgggctagattctgtaatcgattcgtggatacttgggcaagggacgaggataccgttctgaagcacttgcgcgcctccatgaagaagctgactcggaagcagggtgatcttccccctcccgccaagcccgagcagggtagctctgcctcgcgcccagttccagcatcccgcggagggaaaaccctctgtaaaggggatcggcaagccccgcctgggccacccgcgtggtttcctagaccgatttggagcgcctccccgccacgagctcctcggtcctctaccccatgcccggggggagctgtgcgagaggacacctaccctgttggtacacagggggttccctcaccggctctggcccaaggcggtcctcagggatcatggagattcctgcaatggaatagtatgccccggctgccaactgacctggatgtggaggggccatggtttaggcactacgacttccgccagtcatgctgggtgagggcgatctcgcaagaggatcagctggccccctgctggcaggctgagcaccccgccgagagggtgcgcagcgccttcgctgcaccgtccaccgattctgaccaagggacacctttccgggctcgtgatgagcagcaatgcgcacctaccagtggaccctgcctgtgtgggctgcatctggaaagttcgcagttcccccccggattttag

SEQ ID NO: 109643 - DNA, 1650 bp, Artificial Sequence
  derived and/or modified sequence
atggacgtggtggaggtggccggcagctggtgggcccaggagcgggaagacatcattatgaaatacgaaaaaggccacagagccggattgcctgaggacaaaggaccgaagccctttagaagctataataacaatgtcgatcacctcggaatcgttcacgaaaccgagctcccaccattaaccgcgcgtgaagcaaagcagataaggcgggagatttctcgcaagagcaagtgggtagacatgctgggggactgggagaaatataaaagttcccgtaaattgattgaccgggcgtacaagggaatgcctatgaacatccgaggacccatgtggtccgtattgctgaacatagaggagatgaaattgaagaaccctggaagataccaaatcatgaaagagaaaggcaagaggtcttcagaacacatccagagaatagacagggacatctctgggacattgagaaagcacatgttctttagagatcgatacggtaccaagcagagagagctcctacatattctccttgcctatgaagagtacaatcctgaggtgggatattgcagagacctgtcacacattgcagctttattcctgctgtacttgccagaagaggatgcgttttgggccttagtgcagcttttggcctccgagcgtcacagcctccaaggattccattctccaaacgggggaactgtgcagggcttacaggatcagcaagagcatgttgtggccaccagccagcccaaaacgatgggacaccaagataagaaggatctctgcggccagtgtagccctctgggctgcctgattcgaatactcatcgatggcatttccctgggtctcacccttagactatgggatgtttacttggtcgagggagaacaggccttaatgcccatcacacgaatcgcattcaaagtccaacagaaacgactgactaagactagccggtgtggaccttgggccagattctgtaatcgattcgtagacacctgggcccgggacgaggacacggttctcaagcatctgcgcgcctccatgaagaaacttacacggaaacagggtgacctgccaccaccggcgaaacctgaacaggggagttctgctagccgcccggtgcccgcaagtcgagggggcaagacactgtgtaaaggggaccgacaggcacctcctggcccgccggcccggttccccaggcccatctggtctgcctcccctcctcgcgcacctcgtagttctaccccgtgcccaggcggcgctgttagggaagacacgtatcccgtgggcacccagggggtccccagccccgctttggcgcagggcggccctcagggaagctggagattcctgcagtggaattctatgcctcgcctgccaacagacctcgacgtggagggtccctggtttagacactacgactttaggcaatcttgttgggtgagagcaatctctcaggaggaccaactcgctccatgctggcaggccgagcacccggccgagagagtacgcagcgcttttgctgctcccagcaccgactcggaccagggtacgccattcagggccagagatgagcagcagtgcgctcctaccagtggcccatgtctgtgcggcctgcacttggaatcgtcccagttcccaccaggtttctag

SEQ ID NO: 109644 - DNA, 1650 bp, Artificial Sequence
  derived and/or modified sequence
atggacgtggtggaggtggccggcagctggtgggcccaggagcgggaggatatcatcatgaaatatgaaaagggacacagagccggactgccggaggataaggggcctaaacccttccgttcttacaacaataacgtggaccacttaggcattgtgcacgagacggagctgccccctctcacagccagggaagctaaacagataaggagggaaattagccgcaaatccaagtgggttgacatgctgggggactgggaaaagtataaaagctctcgaaagctgattgatcgggcatataaggggatgccaatgaacatacgcggccccatgtggagcgtgttgcttaacatcgaggagatgaagctcaaaaacccagggagatatcagataatgaaagagaagggaaagcggtcatctgaacatattcagcggatcgacagggacattagcggcacccttaggaagcacatgtttttcagggatcggtatggtactaaacagcgggagctcctgcacatcttactcgcctatgaggaatataaccctgaggtggggtattgccgtgacctcagtcacatcgctgctctgtttcttctgtatcttcccgaagaagacgccttctgggcactcgtgcaactgctcgcttcagaacgacacagccttcagggatttcattcccctaatggcggcacagtacagggcctgcaggatcagcaagagcacgtcgttgctactagtcagcctaagaccatgggtcaccaggacaagaaggatctgtgcgggcaatgttcacctctcggatgcctgattcgtatcttgattgacggaatatcgctgggtttgaccctgagactgtgggacgtttacctggttgagggtgagcaagctctcatgcctatcactcgtatcgctttcaaggtgcaacaaaaacgtctgacgaaaacatctcgatgtggcccttgggctagattctgtaatcgattcgtagatacatgggcgcgggatgaagacactgttctgaagcacttgagggcctcaatgaagaagctgacccgcaaacagggcgatttacctcctcctgccaagcctgaacagggctcctccgccagtagaccggtccccgcttcccggggcgggaagacgctgtgcaagggcgatcgccaagcacccccaggccctccagccagattcccgcgccccatctggagtgcatcacctccccgggcacccagatcctcaaccccatgccccgggggagccgtgagagaggacacctaccccgtggggacgcagggagtaccttctccagcattagcccagggaggaccacagggtagctggcggttcttgcagtggaattctatgccgcggcttccaacagacttggatgttgaaggtccttggttcagacactacgacttccgccaatcctgttgggtgcgcgctatctcacaggaggaccaactcgccccatgctggcaggctgaacatcctgcggagcgcgtgagaagtgcctttgccgccccatctactgattccgaccagggtacaccgtttagggctagagatgagcagcaatgcgcgcccactagcggtccttgcctctgcgggctgcatctggagagtagtcaatttcccccgggattttag

SEQ ID NO: 109645 - DNA, 1410 bp, Artificial Sequence
  derived and/or modified sequence
atgctgggcgactgggagaagtacaagagcagccggaagctgatcgaccgggcctataaagggatgccaatgaacatcagggggcccatgtggtcggtgctgttgaatatcgaagagatgaagctcaagaacccagggcggtaccagattatgaaggagaagggaaagagatctagtgagcatatccagcgtatcgatagagatatctctggcacattgcggaagcatatgttctttcgggaccgatatggcaccaagcagcgcgaactgctgcacatcttgctcgcctacgaggaatataaccctgaagtggggtattgtcgagacctctcccacatcgcggcactgttcttattgtatctgcctgaggaagacgccttctgggccctggtgcagctgctcgcatctgaacgccacagtctacagggatttcattctcctaatggagggacggtgcaagggctacaggatcaacaggaacacgtggtggccaccagtcaaccgaagaccatgggacaccaggataagaaggatctgtgcggccagtgctcccccttgggatgtctaataaggattcttatcgatgggatatctctgggtttgaccctgcgactatgggacgtgtatttggtggagggtgagcaggctctgatgcccattaccagaatcgcattcaaggtccagcagaagaggctgacaaaaaccagcaggtgtggaccctgggctagattctgcaatcgcttcgtcgatacctgggcccgcgatgaggatacggtgctaaagcacctgcgagcatccatgaaaaaactgacaagaaagcaaggtgatctgccgcctcccgctaagcccgagcagggctcctcagcatcacggcctgtgccagcctcgcgcggtggcaagacgctctgtaagggggataggcaggccccacctggccccccagcccgcttccctcgacccatatggagcgcctctccaccaagagcacctcgctcgtctaccccatgccctggtggcgcggtgcgcgaagatacatatcccgtgggaactcaaggtgtgccctcccctgccctagcacaggggggtccccaaggctcatggcggttcctgcagtggaatagcatgccccggctgccgacagacctcgatgtcgaggggccctggttccgccactatgattttaggcagtcttgttgggtgagggccatttcacaggaagatcagctggccccctgttggcaggcagagcacccagctgagagggtgaggtccgcattcgctgccccctccacagactccgaccagggaacaccttttcgcgcgcgagatgaacaacagtgcgcccctacaagcgggccgtgtctgtgtgggctgcaccttgaaagctctcaattcccccctgggttttag

SEQ ID NO: 109646 - DNA, 1410 bp, Artificial Sequence
  derived and/or modified sequence
atgctgggcgactgggagaagtacaagagcagccggaagctgatcgatcgggcctataagggaatgccgatgaatattcgcggacccatgtggagtgtgttgctgaacattgaggaaatgaaactcaagaaccccgggaggtaccagatcatgaaagagaaaggaaaacggagctcagagcacatacaaagaatcgaccgagacattagtggcactctgaggaagcatatgttctttagagataggtacggcaccaaacagcgcgaacttctccatatccttctagcatacgaggagtataaccccgaggtcggttactgccgagatctcagccacattgcggctttgtttctgctgtatctgcccgaagaggatgcgttctgggccctcgtacagctgcttgccagtgagaggcacagtctacagggattccattcccctaatggaggaactgtgcaggggcttcaggatcagcaggagcacgtggtggccacgtcccagcccaagacaatgggacatcaggacaagaaagatctgtgcggccagtgcagccccctcggctgcctaattcgaatcctcattgacggcattagcctggggctgaccctgcgcctgtgggacgtatatttagtcgagggcgagcaggctcttatgcccatcaccagaatcgcgttcaaagtgcagcagaaacggcttacaaaaacgagccgctgcggcccatgggcccggttctgcaataggtttgtcgacacatgggcgcgggatgaagatacagtcctcaagcatttgagagcaagcatgaagaaactgaccagaaaacagggagatctgccacccccggccaagccagaacagggatccagtgcgtcacggcccgttcctgccagccgcgggggcaagacactttgtaagggagatcggcaggccccaccaggacccccggcttggtttcctaggcccatttggtcggcaagtcctccgcgagccccgagatcgagtactccatgtcctggaggagcagttagagaagacacttatccagtaggcacccagggcgtcccatcaccggccctggctcaggggggaccacagggatcttggcgatttcttcagtggaattccatgccacgcttaccgaccgatctagatgtggagggaccctggtttcgtcactacgatttccggcagtcctgctgggtgcgcgctatctcacaggaagatcagctcgctccttgttggcaggctgagcatcccgcggaacgcgtccggtccgcattcgctgcccctagcactgattcagaccagggtactcctttccgcgctcgtgatgaacagcaatgcgcacctaccagcggaccatgcctgtgtggtttgcacctggagtcaagtcaattcccaccagggttctag

SEQ ID NO: 109647 - DNA, 1650 bp, Artificial Sequence
  derived and/or modified sequence
atggacgtggtggaggtggccggcagctggtgggcccaggagcgggaagatatcattatgaagtatgagaaaggacaccaggctgggctgccagaagataagggaccaaaaccattccggagctacaacaataatgtggatcatctgggcatcgtccacgagaccgagctgcccccgctgactgccagggaagccaagcaaatccggagggaaatttctcggaaatccaagtgggtggatatgttgggggattgggagaaatacaagagctccagaaaactgatagatagggcttacaaaggcatgcccatgaacattagaggcccaatgtggtcagtcctcctgaatattgaggagatgaaactgaaaaaccccggacgctatcagataatgaaggagaaagggaagagatcgagcgagcacatacaacggatcgacagagacatatccggtacgctgcgcaagcatatgttctttcgggataggtatggtacaaaacagcgcgaattgctgcacattctgttggcctacgaagagtataacccggaggttggttactgccgcgatctgtcccacattgccgctttgttcctcctctatttgccagaggaagatgctttctgggcactcgtgcaactgctggccagcgagcggcattctttacaaggctttcattcaccaaatgggggcacagttcagggcctccaagaccagcaggagcacgtggtcgccacctcccaacctaaaaccatgggacaccaagacaagaaagacctgtgtggacagtgctctccccttggctgcttaatccgcattcttatcgacggcatctctttaggcctcacactcagactgtgggacgtctaccttgtcgagggcgagcaagcactgatgcctattacacgcatcgcgtttaaagtgcagcagaagagattaacgaagacctctaggtgcggcccttgggcgaggttctgtaataggtttgtcgacacctgggcccgcgacgaggacacagtgctgaagcatctacgcgccagtatgaagaaattgaccagaaagcagggcgatttgccaccacccgcaaagcctgagcaggggtcttccgcaagccgcccagtgcccgcatctcgcggcgggaagaccctgtgcaagggcgataggcaggccccgccaggccctccggccaggtttccacgtccgatttggagtgcctccccaccaagagctcctcggtcatccacaccttgccccggaggggcggtgcgcgaggatacatatccggtagggactcaaggagtcccatctcccgcgctcgcccaaggagggccgcagggctcatggaggttccttcaatggaactccatgccaaggctccccacagatctggacgtcgagggcccctggtttaggcattacgactttaggcaaagctgctgggtgcgggctatttctcaggaggaccagctggcgccgtgttggcaggctgaacatcctgccgaaagagtacggtcagcctttgcggcccccagcaccgatagcgatcaggggacgcccttccgggcccgggacgagcagcagtgtgccccaacctccggcccgtgcttatgcgggctacacctggagtcctctcagttccctccgggattttag

SEQ ID NO: 109648 - DNA, 1410 bp, Artificial Sequence
  derived and/or modified sequence
atgctgggcgactgggagaagtacaagagcagccggaagctgatcgatagggcgtacaagggcatgcccatgaatatccgtgggccgatgtggtccgtcctgttgaatatagaagagatgaagctcaagaatccaggcaggtaccagatcatgaaggagaagggtaagagatcgtcagagcatattcagcgaattgaccgggatatcagtggcactttgcgcaaacacatgtttttccgggatagatacgggacaaagcaacgggagctgttgcatattctgctggcgtacgaggagtataatccagaggtgggatattgcagggatctcagccacatagcagctctgtttctgctgtacttgccagaagaggatgccttctgggcgctagtgcaactcctcgcatcagagcgccactcattacaggggttccatagcccgaatggaggaaccgtacaggggctgcaagatcagcaggaacatgtcgttgccacttcacagcccaaaaccatgggacatcaagacaaaaaagacctgtgcggtcagtgttctcctctcgggtgcctaatccggattctgattgacggtatatccctggggcttactctgagactctgggatgtctatctcgtggaaggggaacaggccctgatgcccatcacccgtatcgcgtttaaggtacagcagaaacgtttgacgaagacatcacgctgcgggccctgggctcggttctgcaatcggtttgtcgacacctgggcccgcgatgaggacaccgtgcttaaacatctgcgggcgtcaatgaagaaactgacacgaaagcaaggggacctcccaccccctgccaagccagagcagggatcaagtgccagccgccctgtccccgcctcgagaggcggcaagaccctgtgcaagggagataggcaggcaccgcccggcccgcccgcctggttccctaggccaatctggtccgcaagcccgcctagagcccccagatcctctaccccatgtcccggaggggctgtgcgggaagacacctacccagtgggtacccagggggtgccgtccccggcgttggctcagggcggaccacagggctcttggcggttcctgcagtggaactctatgccacggctgcccaccgatctggatgtggaaggtccctggttcagacactatgactttcggcagtcatgttgggtgcgcgccatatctcaggaggaccaactggccccttgttggcaggcggaacacccggccgaaagagtgcgcagcgcctttgccgctccctcaaccgactccgatcagggtacaccttttcgggccagggatgagcaacagtgcgcgccaacgagtggtccatgcttatgtggacttcatctcgaatcctcgcagtttcccccagggttctag

SEQ ID NO: 109649 - DNA, 1650 bp, Artificial Sequence
  derived and/or modified sequence
atggacgtcgtggaggtagctggctcatggtgggcccaggagagggaggacatcatcatgaagtatgagaaaggccaccgtgctggccttccagaagacaagggtccgaagcctttccgtagttacaataataatgtagaccacctggggatcgtacatgagactgaactcccccctctcacagcgagggaggcgaagcaaattaggcgggaaatctcgcggaaatccaagtgggttgatatgctgggagactgggagaaatacaagagtagccggaagttgattgaccgggcttacaaagggatgccaatgaacatcaggggtcctatgtggtctgtgcttttgaacatcgaggagatgaagctcaagaatcctggcagatatcagattatgaaagagaagggcaaaaggagttcagagcacatccagcgcattgatcgggacatctccggaacgctcaggaagcacatgttctttcgggatcggtatgggaccaaacagagggagctgctgcatatcctactggcctacgaggagtacaatccagaagtcggctattgtcgggacctgtcccatatcgcggctctgttcctcctctatttcccagaggaagatgctttttgggctttggtacagctgcttgcgtccgaaagacactcactccaaggcttccatagtcccaacggcggaaccgtacagggcctgcaggatcagcaagagcacgtggtcgctacaagccaaagcaaaaccatgggacaccaggataaaaaggacctgtgtgggcaatgttctcccctgggctgcctgattaggattctgatcgacggaattagcttgggtctgacactccgcctgtgggatgtatacctagttgagggcgagcaggctctcatgccgatcacccgcattgctttcaaggtccaacagaagagactgactaaaacttctaggtgcggcccatgggccaggttttgcaatcggttcgtagatacctgggcacgcgacgaagacacagtactcaaacacctgagggcgagtatgaaaaaattgactcggaaacaaggcgacctccctccgccagcaaaacccgaacagggctccagtgcttctcgacctgtccccgcttcacgcggtggcaagacactatgcaagggtgatcggcaagcacctcccggacctcccgctagattccccagaccaatttggagcgcttctccgcctcgtgccccaagatcatcgacgccgtgccccggtggcgcagtcagggaggacacttatcccgtaggaactcagggcgttccttcccccgcactcgcccagggagggccacaggggagttggagattcctgcagtggaatagcatgccccgactcccgaccgacctggatgtggagggcccatggttccgccattacgattttaggcagagctgctgggtacgcgcaatctctcaggaagatcagctggcaccatgctggcaggctgaacatcctgcagagagggtgcgctcagcttttgcggcacccagcaccgattcagaccagggcactccattcagggccagggatgagcagcagtatgcgcctacctcaggaccttgtctgtgtgggctccatctagagtcttctcaatttcccccagggttttag

SEQ ID NO: 109650 - DNA, 1650 bp, Artificial Sequence
  derived and/or modified sequence
atggatgtggtcgaggtggccggatcctggtgggcccaggaacgggaggatatcataatgaaatatgagaaaggccatagagcgggactgccggaagacaagggacctaaacccttcaggtcatataacaataacgtggatcatctgggcatcgtgcacgagacggagctccctcccctcacggcccgtgaagctaagcagatccgcagagaaataagtcgcaagtccaagtgggttgacatgctgggggactgggagaaatacaaatccagtcggaagctaattgaccgggcttacaagggaatgccgatgaatatcagaggcccaatgtggagtgtgctcctgaatatcgaggaaatgaaactgaagaatcctggcaggtatcagatcatgaaggaaaaaggtaaaagatcttctgaacacattcagcgcattgatagggatatttctggtaccctgcgtaagcatatgtttttccgggatcgttacgggacgaaacaacgtgagctcctgcatattctgttagcatacgaggaatacaaccctgaagtcggatactgcagagacctgagccatatcgccgctctctttctactctacttcccagaagaagacgcattctgggccctggttcaactgctggccagcgaacggcattccctgcaggggtttcactctcccaatggaggcactgtgcagggccttcaagatcagcaagagcatgtcgtagcaacatcccagtctaagaccatgggacaccaagacaaaaaagatctgtgtggacagtgcagcccactggggtgccttattcgaattttaattgacggtataagccttgggctgacactccggctgtgggatgtgtatctggtagagggcgagcaagcactgatgccaatcacgcggatagcctttaaagtgcaacagaagcggctaacgaagacctcccggtgtggaccatgggcacggttctgcaaccggtttgtggacacctgggcccgagatgaagatacagtgcttaagcatttgcgcgcttccatgaaaaaactgacaaggaaacagggcgacttgcctccccctgccaaacccgagcaagggagttccgcaagtcgtccagtgcccgcttcccgcggaggaaagacactttgtaagggagaccgacaggcgccaccaggtcctcctgctcgtttccccagacccatttggagtgcgtctccccctcgcgctcccagaagctctactccttgtcccggaggagctgtgcgagaggacacctaccccgttggcacccagggcgtccctagccccgctctggcccaagggggaccacaaggctcctggagatttctccaatggaattctatgcctcggctgccaaccgatctggacgtggagggtccgtggttcagacattatgattttcggcagagttgttgggttcgcgcaatttctcaagaagaccagctcgcaccatgttggcaggccgagcacccagctgagcgagtgcgcagtgcattcgccgctccatccacagatagtgaccagggcactcctttcagagcacgagacgagcagcaatatgcccctacctcaggaccttgcctgtgtgggctccatcttgaaagttcccaatttccgcctgggttttag

SEQ ID NO: 109651 - DNA, 1650 bp, Artificial Sequence
  derived and/or modified sequence
atggacgtggtcgaggtagctgggtcctggtgggcgcaggaacgcgaggacatcattatgaagtacgaaaaaggacaccgagctggcctccccgaagacaagggtcctaagcccttccgctcatacaacaacaacgtggaccaccttggtatcgtgcatgagaccgaactgcctcccctgaccgcgagggaggccaagcaaatccgcagggaaatttctcgtaagtcaaagtgggtggatatgctcggtgactgggaaaaatataagtcgtcccgaaagcttatagatagggcatacaagggaatgcctatgaatatccgaggacccatgtggtcagtgttactcaacatagaggagatgaagctgaagaatccgggacgttaccaaataatgaaggaaaaggggaagcgctccagtgagcatatccaaaggatcgacagagacatatccggtaccctgcgcaaacacatgttctttcgcgacaggtacggtactaagcagcgggaacttttgcatatactgctcgcctacgaagagtataatcccgaggtgggttattgtcgcgatctgagccatatcgcggctctgtttctgctgtaccttcccgaggaggatgctttttgggcactggtgcaactcctagcaagtgagcgccactcccttcagggatttcactcgcctaacgggggaaccgttcagggcctccaggaccagcaggaacatgttgtggcaactagccaatcgaagaccatgggccaccaagacaagaaagatctgtgcggccagtgcagcccgctcggctgtttgattagaattctgatagatgggatttcactggggttgactctgaggctttgggatgtctacctggtggaaggcgagcaggcactgatgccaattactaggatcgcgtttaaggtgcagcagaaacgactgactaaaactagccgctgtggaccatgggcccgtttctgtaaccgcttcgtggatacgtgggccagggatgaggacaccgtccttaagcatctcagggctagcatgaagaaattaacacgcaaacaaggcgacctaccccctcccgcaaaaccggagcagggttcctcggccagccgtcccgtcccagcttcacggggaggcaagacgctatgcaagggggaccgacaggctccccctggtccacccgcatggttccctcggccaatatggtctgccagcccccctagagctcccaggtccagtaccccctgtccagggggtgctgtgagggaagacacctacccagtaggaacccagggggttccaagcccagccttagcccagggcggacctcaggggagctggagatttttgcagtggaacagtatgccaagactgcctacggatctggatgtcgagggcccttggtttcggcattatgacttccgccagtcctgttgggtgcgggctatctcccaggaggatcagctcgccccttgctggcaggctgagcaccctgctgagcgcgttcgcagcgccttcgccgctccttccactgattctgaccaggggactccattcagggctcgtgacgagcagcagtgcgcgccaacgagcggaccctgcctctgtgggctccacctggagtctagccagttccctccaggcttttag

SEQ ID NO: 109652 - DNA, 1650 bp, Artificial Sequence
  derived and/or modified sequence
atggacgttgtcgaggttgctggctcctggtgggctcaggagagggaggacattataatgaaatacgagaagggtcacagggccggtttaccagaggataagggccctaagcctttcaggtcttacaataataacgtggatcaccttggcatagtgcatgagactgagttgcctcccttgactgcacgagaagccaagcagatccggagagaaataagccgcaagtccaaatgggttgatatgctgggcgactgggaaaagtataagagctcccggaagcttatcgacagggcctataaaggcatgcccatgaatatcaggggcccaatgtggagcgttctgctcaatatcgaggaaatgaagctgaagaaccctggcagatatcagatcatgaaggagaaaggtaaacgcagttctgaacacatccaacggatagatcgcgacatttctggaaccctccggaaacatatgttcttccgcgatcgatacggcacgaagcagcgtgagctgttgcacattttgctcgcctacgaggaatacaaccctgaggtggggtactgccgtgacctttcgcacatcgccgctctgtttctgctctacctgcccgaagaagacgcgttctgggccctggtccagctgctggcttcggagagacactctcttcaggggtttcactcaccgaatggcggaacggtacaagggctacaagatcagcaggagcacgttgtcgccacaagtcagtctaagaccatggggcaccaggacaagaaggatctttgtggacagtgctcaccccttggctgcttgattcgaatactgattgacgggatcagtttaggtctaaccctccgattatgggacgtgtacctggtggagggagaacaggctttaatgcctatcacccgaattgcctttaaggtgcagcagaaacgtttgacaaagacatcccgctgtgggccatgggctcggttctgtaacagattcgtggatacttgggcacgtgatgaggatactgtcctcaagcatctgcgggcttccatgaaaaagttgactaggaagcagggagacctgcccccacccgcaaaacccgaacagggttcatccgcctcccggcctgtgcccgcttctagaggaggaaaaaccctctgcaagggagaccgtcaggctcccccaggccctcccgcttggtttccacgcccaatttggtcagctagcccaccccgagcgcctcggtcctcaacgccctgtccaggcggagcggtccgggaggatacctatcctgttgggacccagggcgtacccagtccagctctggcccaaggtggacctcaagggtcctggcgtttcctccaatggaactccatgcctagactgcctaccgatctcgatgttgaaggtccctggtttaggcactacgacttcagacagtcttgttgggtaagagccattagccaggaggaccagttggcgccatgctggcaggctgaacacccagccgagcgggtccggagcgctttcgccgctccctctacagatagtgaccagggcaccccttttagagcacgggatgaacaacagtgtgcacccactagcggcccttgtctctgcggcctccacctggaaagctcccaatttccgccaggcttctag

SEQ ID NO: 109653 - DNA, 1650 bp, Artificial Sequence
  derived and/or modified sequence
atggacgtagtggaagtggccggttcctggtgggcccaggagcgcgaagatattatcatgaagtatgagaaagggcatcgtgccggtcttcccgaagataaggggcctaaaccgtttagaagctataacaacaacgtggatcaccttgggatcgtgcatgaaaccgagctaccacccctgacagctagggaggccaaacagattcggagagagatctcacgcaagtcaaaatgggtggacatgctgggggattgggaaaaatacaaaagcagtcgcaagctaatcgatcgagcatacaagggaatgcctatgaatatacgtgggcctatgtggtctgtgttgctgaacatcgaggaaatgaagcttaagaatcctgggaggtaccagattatgaaggaaaaaggcaaacgctcttcagagcatatccagagaatcgaccgtgacatcagtggtacactccgtaagcacatgtttttccgggacaggtacggaactaaacagcgcgaactgctccacatactactagcttacgaggaatacaatcccgaggtgggttattgtagagacttatcccacatcgccgctctcttcctgctgtacctgcccgaagaagacgctttctgggccctggttcagctcctggccagcgaacggcattcactgcagggatttcactccccaaatggtggaacagtgcaaggccttcaggaccagcaggagcacgtcgtcgctacttcacagcctaaaaccatgggccaccaggacaagaaagacctctgcggtcagtgtagcccccttggttgccttatccggatcctcattgacggcatctccctcggcctgaccctgcggctctgggacgtttacctcgtggagggtgagcaggcgctgatgcccatcaccagaatagcatttaaggtccaacagaagcgtttgacgaagacctctagatgcgggccatgggccagattttgcaaccgttttgtggatacttgggctcgcgacgaagacaccgtcttgaaacatttgagggctagcatgaagaagcttacaagaaagcagggcgacctgcctcctccggctaaacccgaacaaggatccagcgccagccggccagttcccgcaagtcgtggtgggaaaacactctgtaaaggcgaccgtcaagcccctccaggacccccagccaggtttcccaggccaatttggagcgcctccccgccacgggctccccgatcctcgaccccgtgtcctgggggagcggtgagggaggacacctaccctgtcggcactcagggcgtaccctcacctgctctcgcccagggtggccctcagggatcatggcgattcttgcaatggaatagtatgcccaggttacccaccgatttagatgtagaagggccttggttccggcactacgactttcgccagagctgttgggtgagggcaatttcccaggaagaccaactcgcaccctgctggcaggcagagcaccctgcggaaagagttaggagcgcattcgccgcaccttccaccgatagtgaccagggaaccccctttcgcgctagggacgaacagcagtgcgcacccacgtccggcccatgcttgtgcggattgcacctcgagtcttcccagttccccccagggttttag

SEQ ID NO: 109654 - DNA, 1650 bp, Artificial Sequence
  derived and/or modified sequence
atggatgtggttgaggttgcgggttcatggtgggcacaagaacgggaagacattataatgaagtatgagaaaggtcatagagctgggctgccagaagataaaggccctaaacctttcagaagctataataataacgtggaccacctggggatcgtccacgagacagagttaccccctctaacagctcgggaagcgaagcaaatcagacgcgaaatcagtcgcaaatctaagtgggttgacatgctgggagactgggaaaagtataagagctcccggaaactgatagacagggcctacaaaggcatgcccatgaacatccgaggccctatgtggtcagtgctgttaaacattgaggagatgaaactcaaaaacccaggccgttatcagatcatgaaggaaaagggtaagaggtctagtgaacacatccagaggattgatagagatatatccgggacattacgaaaacacatgttttttcgggatagatacggcaccaaacagagggaattgctccatatccttcttgcctatgaagaatacaatccagaggtgggctactgcagggacctcagccacattgccgctctgtttctgctctatcttcccgaggaagacgctttctgggcgctcgtccagctgttggcctctgagcgccacagccttcaggggtttcatagcccaaatggtggcaccgtacagggtctccaggatcaacaagagcatgtcgtcgcaacatcgcagcctaagactatgggacaccaagataaaaaggacctgtgcggtcagtgtagtcccctgggctgtttaatcaggattctgattgacgggatatccttaggactcactctgaggctatgggatgtatatttagtggagggcgaacaggcactgatgccgatcactcgaatcgccttcaaggtgcagcagaagcgactgacaaaaactagtcgttgtgggccttgggccaggttctgcaatagattcgtggatacatgggcaagagacgaggataccgtgctgaagcaccttcgcgcttccatgaaaaagcttacccggaagcagggagatttgccccctcctgccaaacccgagcaaggcagctccgcttcacggcctgtgcccgctagtaggggtgggaaaaccttgtgcaaaggggatcgtcaggctccaccaggcccacctgccaggttccccaggccaatatggtctgcgtcgccacccagggcgccacgcagctcaaccccgtgccccggaggtgccgtgagggaagacacctatcccgtcggaacccaaggggtaccctcccccgcacttgcacagggcggaccccagggatcctggcgatttttgcaatggaactctatgccacggctcccgaccgacctggatgtggaagggccatggtttcgccactacgatttccggcagtcatgttgggtgcgtgcgataagccaagaggaccagctggctccctgctggcaggccgagcaccccgcagaacgcgtgcggagcgcctttgcagccccaagcaccgacagcgatcagggcacaccatttagggccagagacgagcagcagtgtgccccaaccagcgggccttgtttgtgcgggttacaccttgaaagttcccagttccctcccggtttctag

SEQ ID NO: 109655 - DNA, 1410 bp, Artificial Sequence
  derived and/or modified sequence
atgctcggggattgggagaagtacaaaagcagtaggaagcttattgatagggcttacaaaggtatgccgatgaacattcgcggacctatgtggtctgtcctcctgaatatagaggagatgaagctcaaaaatccaggcaggtatcaaattatgaaggagaagggaaagaggtcatccgagcacatacagaggatcgatcgcgacatctcagggactttgcgcaaacacatgttctttagagacaggtacggtacaaaacagagagagctgctgcatatcctgttggcatacgaagagtataatcctgaggtgggatattgccgggacctgtcacatattgccgcactgttcctgttgtatctacccgaagaggacgccttctgggcactggttcaactgttagccagcgaaaggcacagcctccagggcttccattctcccaatggtgggacagtgcaggggctccaggaccagcaggagcacgtggtggcgacttctcagccaaagaccatgggtcatcaggacaagaaagacctgtgcggccagtgctcgcctctgggatgcctgattcgcattctgattgatggcattagcctgggcctgacgttgcgtctgtgggatgtgtatctggtcgagggcgaacaggccctaatgcctatcacccggatcgcctttaaagttcaacagaagaggctgacaaagactagccggtgcggaccctgggccaggttctgtaacaggttcgtcgacacatgggctcgagatgaagataccgtgctgaagcatctgagggcgagcatgaagaaactaacaagaaaacagggggacctgccccctcccgcaaagcctgagcaggggtcttccgcatcgcggcctgttccggcaagccgcggtggaaagaccctgtgcaagggcgataggcaggctccaccagggccacccgctcgatttccaaggccgatttggagcgcatcccctccccgagcgccacgatcatccacaccttgcccaggcggagccgtccgcgaggatacttacccagttgggactcaaggcgttcctagcccagctctcgctcagggtggaccacagggtagctggaggtttctgcagtggaactcaatgcccaggttgccaacagatcttgatgtggaggggccttggtttcgacattatgactttagacagagctgctgggtcagggctatttcccaggaggatcaactggcaccatgttggcaggccgagcacccggcagaaagagtaaggtctgccttcgctgctccatctacggactccgaccagggcacgccattcagagcacgtgacgagcaacagtgcgccccaacctcagggccttgcctctgcgggctgcacctggagagcagccagttccccccagggttttag

SEQ ID NO: 109656 - DNA, 1410 bp, Artificial Sequence
  derived and/or modified sequence
atgttgggagattgggaaaaatataagtcgagtcgaaaactgatagaccgggcatataagggcatgccgatgaatattcgcggacctatgtggtcagtgctgttaaatatcgaggagatgaagttgaagaatcccggacgctaccaaatcatgaaagagaaggggaagcggtcctccgagcacatccagcggatagatagagacatcagtggaaccttgcggaaacatatgttctttcgagacaggtacgggaccaagcaacgggaactgctgcacatcctgctcgcatatgaagagtataatcctgaggttgggtactgcagagatcttagtcatatcgcagcactgtttttgctgtaccttccagaggaggatgcgttctgggctctcgtacagctgctcgcatcagaaagacatagccttcaggggtttcattctcccaatgggggaaccgtgcagggcttacaagaccagcaggagcatgtggtggctaccagccaacctaaaaccatgggacatcaagataagaaggacctctgtggacagtgttcccctctgggctgtctcatccgcattcttatagatggcattagcctcggcctcaccctacgactgtgggacgtgtacctggtagaaggggagcaggcgctaatgccaatcaccagaatagcctttaaggtacaacagaaacggctgactaaaacctcacggtgtggaccctgggctagattctgcaacagatttgtggacacatgggctagagacgaggataccgttctgaaacacttgcgggcttccatgaaaaaacttactcggaagcagggcgatctccctcccccagccaaacccgagcagggctctagcgcatcacgccctgtccctgctagtcgcggtgggaagacactgtgtaagggcgaccgacaggcccctccaggcccaccagcctggtttcccaggccaatctggtctgccagccccccacgagcccctaggagcagcaccccttgcccaggtggtgctgtgcgtgaggacacttatcccgtagggacacagggagtcccctcaccggcactggcccaggggggtccccagggcagctggcgatttctccagtggaattccatgcccaggttacctaccgatctggatgtggaaggtccgtggttccgccactacgatttccgccagtcatgctgggtgcgcgcaatctcgcaggaggaccagctggctccctgctggcaagccgagcaccccgcagaaagggtgcgctctgccttcgccgcacctagcaccgatagcgatcagggaacgccattccgcgcacgggacgaacagcaatgtgccccaacatccggtccatgtctatgcgggttgcatcttgagagtagccagtttcctcctggcttttag

SEQ ID NO: 109657 - DNA, 1650 bp, Artificial Sequence
  derived and/or modified sequence
atggatgttgtagaagtggccggttcatggtgggcgcaggagcgtgaggacatcattatgaaatacgaaaagggacatcaggcagggctgcctgaagacaaggggcctaaacccttcaggtcctacaacaataacgtggaccacctgggaatcgtgcacgagacagagttacctcctttaactgccagagaggcgaagcagattcgcagggagattagccgtaagagcaagtgggtggatatgcttggggactgggagaagtacaagtcgtcgcgtaagcttatagaccgcgcttacaagggtatgcccatgaatattaggggacctatgtggtccgtgctgttgaacattgaagaaatgaagctgaagaatcccggtcgctatcagattatgaaggaaaaaggaaagagaagttccgaacacatccagcggattgatagggacattagtggcactcttcggaagcatatgttcttcagagatagatacggtacgaagcagagagaacttctgcatatattgctggcctacgaagaatacaaccctgaggtggggtattgcagagatctctcccacatcgctgctctcttcctcctgtaccttccggaggaagatgccttttgggcactggtccagcttctggcatcagagcggcactcacttcagggttttcattcccctaacggtggaacagtccaggggttacaggatcaacaggaacacgtcgttgctacaagccagcctaagactatggggcatcaggacaagaaggacctctgtgggcagtgcagtccactgggctgtctgattaggatcctcattgacggaatttcactgggtctcactctaaggctgtgggacgtgtacttggtagagggggagcaagctctcatgcccatcacccgaattgcgttcaaggtccagcagaagaggctgacaaagactagccggtgcggaccctgggcacgcttctgcaatcggtttgtggatacctgggccagagatgaagatacggtccttaagcatctgagagctagtatgaagaaacttacgcgcaagcaaggggatctgccccctcctgcgaaaccggaacaggggtcttccgccagtagacctgtgcccgcatcacgcggagggaagacattgtgtaagggagacagacaggctccaccgggaccaccggcaaggttcccgcgaccaatctggtctgcctcgccgcctagagcaccacgttctagtactccatgccctgggggtgcagttcgtgaagatacttaccccgttggtacgcagggtgtcccttcaccggctctcgcacaggggggtccacaagggtcatggagattcctgcagtggaatagcatgccacgcctgccaacagatttggacgtcgagggaccttggtttcgccactatgactttcgccaaagctgctgggtgagggccatatcccaggaagatcagttagcgccttgttggcaggcagagcatcccgctgagagagttcggtctgcttttgccgctcccagcaccgacagtgaccagggaaccccttttagagcacgggacgagcagcaatgcgcacctactagcggaccctgcctatgcggccttcacctagaatccagtcagttccctcctggattctag

SEQ ID NO: 109658 - DNA, 1410 bp, Artificial Sequence
  derived and/or modified sequence
atgcttggagactgggaaaaatataaatcctcccgtaagttgattgaccgggcttacaaggggatgccaatgaacataaggggtcctatgtggagcgtgctactcaacattgaagagatgaagctgaagaatcccggtagataccaaataatgaaggaaaagggaaagcgtagcagtgaacatatccagcgaatagatagagacataagtggaacactgcggaagcacatgttctttcgagacagatacggtacgaagcagcgggaactattgcacattttgcttgcctacgaggagtacaacccagaggtggggtactgcagggacctctctcacatcgcagcactgttcctgttgtacctgccagaagaagacgctttctgggccctggtgcagttgctggctagcgaaagacacagtcttcaaggtttccatagcccaaacgggggaactgtgcagggtttacaggatcagcaggaacacgtcgtggctacctcccagccaaaaaccatggggcaccaggataagaaagatctgtgcggccagtgttcacccctggggtgtctcatacgcatcttaattgatggtatctctttgggcctgacactgaggctgtgggatgtttacttggttgagggggagcaggccctgatgcccattactaggattgcttttaaggtacagcaaaagcgactgacaaagacaagccggtgcggaccatgggccagattttgcaaccggtttgtagacacctgggccagggatgaagatactgtgctgaaacacctccgggcttcaatgaaaaaactgactaggaagcagggggacttgccaccccctgccaaacccgaacaggggtctagcgctagtaggcccgttcctgcctcacggggaggcaagaccttatgtaagggggatcgacaagccccacccggtcccccagcatggttcccacgtccaatctggtcagcctcccccccaagagccccacgtagcagcactccctgccctggcggagctgtgagggaagatacttacccagtgggaacccagggggtgccctctccagctcttgcccagggcggacctcagggctcttggaggttcctccagtggaattcaatgccacgcctgccaaccgacttggacgtcgagggcccttggttccgccattatgatttccgccagtcctgctgggtcagagcgatcagccaggaagatcagctggccccttgctggcaagccgagcaccctgcagagcgggtgcgatcagcttttgccgcaccgtcaactgacagtgatcagggcacgccatttcgcgctcgggacgagcagcagtgcgccccaacatcaggaccttgcctgtgcggtcttcacctggagtctagccagtttccccctggcttctag

SEQ ID NO: 109659 - DNA, 1964 bp, Artificial Sequence
  derived and/or modified sequence
atggacgtggtagaggtcgcgggtagttggtgggcacaagagcgagaggacatcattatgaaatacgaaaagggacaccgagctgggctgccagaggacaaggggcctaagccttttcgaagctacaacaacaacgtcgatcatttggggattgtacatgagacggagctgcctcctctgactgcgcgggaggcgaagcaaattcggcgggagatcagccgaaagagcaagtgggtggatatgctgggagactgggagaaatacaaaagcagcagaaagctcatagatcgagcgtacaagggaatgcccatgaacatccggggcccgatgtggtcagtcctcctgaacattgaggaaatgaagttgaaaaaccccggaagataccagatcatgaaggagaagggcaagaggtcatctgagcacatccagcgcatcgaccgggacataagcgggacattaaggaagcatatgttcttcagggatcgatacggaaccaagcagcgggaactactccacatcctcctggcatatgaggagtataacccggaggtgggctactgcagggacctgagccacatcgccgccttgttcctcctctattttcctgaggaggatgcattctgggcactggtgcagctgctggccagtgagaggcactccctgcagggatttcacagcccaaatggcgggaccgtccaggggctccaagaccaacaggagcatgtggtagccacgtcacaatccaagaccatggggcatcaggacaagaaagatctatgtgggcagtgttccccgttaggctgcctcatccggatattgattgacgggatctctctcgggctcaccctgcgcctgtgggacgtgtatctggtagaaggcgaacaggcgttgatgccgataacaagaatcgcctttaaggttcagcagaagcgcctcacgaagacgtccaggtgtggcccgtgggcacgtttttgcaaccggttcgttgatacctgggccagggatgaggacactgtgctcaagcatcttagggcctctatgaagaaactaacaagaaagcagggggacctgccacccccagccaaacccgagcaagggtcgtcggcatccaggcctgtgccggcttcacgtggcgggaagaccctctgcaagggggacaggcaggcccctccaggcccaccagcccggttcccgcggcccatttggtcagcttccccgccacgggcacctcgttcttccacaccctgtcctggtggggctgtccgggaagacacctaccctgtgggcactcagggtgtgcccagcccggccctggctcagggaggacctcagggttcctggagattcctgcagtggaactccatgccccgcctcccaacggacctggacgtagagggcccttggttccgccattatgatttcagacagagctgctgggtccgtgccatatcccaggaggaccagctggccccctgctggcaggctgaacaccctgcggagcgggtgagatcggctttcgctgcacccagcactgattccgaccagggcacccccttcagagctagggacgaacagcagtatgctcccacctcagggccttgcctctgcggcctccacttggaaagttctcagttccctccaggcttctagaagcatctgggccagggctcatggctggataatttccctaggcttaacaacccaagcaagcttcgcgtcctcgttttatttttggttaaacttatgaaaatgtattaagaaagagtgcagctcgagagagattcagagatggaacacaccagaccccagatcacaaagccaaccatgcccagcccctcccagcacccccagccccacgaccatcgttctgaattctgacgacaccgtgagcctgcctttgtactttaaactcatggaaggataactaccttcacgttttgaaataaatgtttcctgttgaaatg

SEQ ID NO: 109660 - DNA, 2039 bp, Artificial Sequence
  derived and/or modified sequence
gtgcttagcacctatctgctctctggcctgcgtcagtggtctacagcagttacacacaggcagtggtatctgtgagcagctctgtggactcaaaggttttctccctgagaggcatgacccaggccagctgattcatcagaatcaggatggacgtggtagaggtcgcgggtagttggtgggcacaagagcgagaggacatcattatgaaatacgaaaagggacaccgagctgggctgccagaggacaaggggcctaagccttttcgaagctacaacaacaacgtcgatcatttggggattgtacatgagacggagctgcctcctctgactgcgcgggaggcgaagcaaattcggcgggagatcagccgaaagagcaagtgggtggatatgctgggagactgggagaaatacaaaagcagcagaaagctcatagatcgagcgtacaagggaatgcccatgaacatccggggcccgatgtggtcagtcctcctgaacattgaggaaatgaagttgaaaaaccccggaagataccagatcatgaaggagaagggcaagaggtcatctgagcacatccagcgcatcgaccgggacataagcgggacattaaggaagcatatgttcttcagggatcgatacggaaccaagcagcgggaactactccacatcctcctggcatatgaggagtataacccggaggtgggctactgcagggacctgagccacatcgccgccttgttcctcctctattttcctgaggaggatgcattctgggcactggtgcagctgctggccagtgagaggcactccctgcagggatttcacagcccaaatggcgggaccgtccaggggctccaagaccaacaggagcatgtggtagccacgtcacaatccaagaccatggggcatcaggacaagaaagatctatgtgggcagtgttccccgttaggctgcctcatccggatattgattgacgggatctctctcgggctcaccctgcgcctgtgggacgtgtatctggtagaaggcgaacaggcgttgatgccgataacaagaatcgcctttaaggttcagcagaagcgcctcacgaagacgtccaggtgtggcccgtgggcacgtttttgcaaccggttcgttgatacctgggccagggatgaggacactgtgctcaagcatcttagggcctctatgaagaaactaacaagaaagcagggggacctgccacccccagccaaacccgagcaagggtcgtcggcatccaggcctgtgccggcttcacgtggcgggaagaccctctgcaagggggacaggcaggcccctccaggcccaccagcccggttcccgcggcccatttggtcagcttccccgccacgggcacctcgttcttccacaccctgtcctggtggggctgtccgggaagacacctaccctgtgggcactcagggtgtgcccagcccggccctggctcagggaggacctcagggttcctggagattcctgcagtggaactccatgccccgcctcccaacggacctggacgtagagggcccttggttccgccattatgatttcagacagagctgctgggtccgtgccatatcccaggaggaccagctggccccctgctggcaggctgaacaccctgcggagcgggtgagatcggctttcgctgcacccagcactgattccgaccagggcacccccttcagagctagggacgaacagcagtatgctcccacctcagggccttgcctctgcggcctccacttggaaagttctcagttccctccaggcttctagaagcatctgggccagggctcatggctggataatttccctaggcttaacaacccaagcaagcttcgcgtcctcgttttatttttggttaaacttatgaaaatgtattaagaaagagtgcagctcgagagagattcagagatggaacacaccagaccccagatcacaaagccaaccatgcccagcccctcccagcacccccagccccacgaccatcgttctgaattctgacgacaccgtgagcct

SEQ ID NO: 109661 - DNA, 2305 bp, Artificial Sequence
  derived and/or modified sequence
gaatgtcactggtgcttagcacctgtctgctctctggcctgcctcagtggtctacagcagttacacacaggcagtggtatctgtgagcagctctgtggactcaaaggttttctccctgagaggcatgacccaggccagctgattcatcagaatcaggatggacgtggtagaggtcgcgggcagttggtgggcacaagagcgagaggacatcattatgaaatacgaaaagggacaccgagctgggctgccagaggacaaggggcctaagccttttcgaagctacaacaacaacgtcgatcatttggggattgtacatgagacggagctgcctcctctgactgcgcgggaggcgaagcaaattcggcgggagatcagccgaaagagcaagtgggtggatatgctgggagactgggagaaatacaaaagcagcagaaagctcatagatcgagcgtacaagggaatgcccatgaacatccggggcccgatgtggtcagtcctcctgaacattgaggaaatgaagttgaaaaaccccggaagataccagatcatgaaggagaagggcaagaggtcatctgagcacatccagcgcatcgaccgggacataagcgggacattaaggaagcatatgttcttcagggatcgatacggaaccaagcagcgggaactactccacatcctcctggcatatgaggagtataacccggaggtgggctactgcagggacctgagccacatcgccgccttgttcctcctctatcttcctgaggaggatgcattctgggcactggtgcagctgctggccagtgagaggcactccctgcagggatttcacagcccaaatggcgggaccgtccaggggctccaagaccaacaggagcatgtggtagccacgtcacaatccaagaccatggggcatcaggacaagaaagatctatgtgggcagtgttccccgttaggctgcctcatccggatattgattgacgggatctctctcgggctcaccctgcgcctgtgggacgtgtatctggtagaaggcgaacaggcgttgatgccgataacaagaatcgcctttaaggttcagcagaagcgcctcacgaagacgtccaggtgtggcccgtgggcacgtttttgcaaccggttcgttgatacctgggccagggatgaggacactgtgctcaagcatcttagggcctctatgaagaaactaacaagaaagcagggggacctgccacccccagccaaacccgagcaagggtcgtcggcatccaggcctgtgccggcttcacgtggcgggaagaccctctgcaagggggacaggcaggcccctccaggcccaccagcctggttcccgcggcccatttggtcagcttccccgccacgggcacctcgttcttccacaccctgtcctggtggggctgtccgggaagacacctaccctgtgggcactcagggtgtgcccagcccggccctggctcagggaggacctcagggttcctggagattcctgcagtggaactccatgccccgcctcccaacggacctggacgtagagggcccttggttccgccattatgatttcagacagagctgctgggtccgtgccatatcccaggaggaccagctggccccctgctggcaggctgaacaccctgcggagcgggtgagatcggctttcgctgcacccagcactgattccgaccagggcacccccttcagagctagggacgaacagcagtgtgctcccacctcagggccttgcctctgcggcctccacttggaaagttctcagttccctccaggcttctagaagcatctgggccagggctcatggctggataatttccctaggcttaacaacccaagcaagcttcgcatcctcgttttatttttggttaaacttatgaaaatgtattaagaaagagtgcagctcgagagagattcagagatggaacacaccagaccccagatcacaaagccaaccatgcccagcccctcccagcacccccagccccacgaccatcgttctgaattctgacgacaccgtgagcctgcctttgtacttcaaactcatggaaggataaccaccttcatgttttgaaataaatgtttcctgttgaaatgattttagattttagacagaaatattgaaaaggcactatagtatcctcctataccttccatccagctgcccctaataatgatgttttgcagtcccatggcacataagaaatttaggccgggtgtggtggctcacacctgtaatcccagcaatttgagaggtcgaggcgggaggttcaggttcact

SEQ ID NO: 109662 - DNA, 2042 bp, Artificial Sequence
  derived and/or modified sequence
ctgtgagcagctctgtggactcaaaggttttctccctgagaggcatgacccaggccagctgattcatcagaatcaggatggacgtggtagaggtcgcgggtagttggtgggcacaagagcgagaggacatcattatgaaatacgaaaagggacaccgagctgggctgccagaggacaaggggcctaagccttttcgaagctacaacaacaacgtcgatcatttggggattgtacatgagacggagctgcctcctctgactgcgcgggaggcgaagcaaattcggcgggagatcagccgaaagagcaagtgggtggatatgctgggagactgggagaaatacaaaagcagcagaaagctcatagatcgagcgtacaagggaatgcccatgaacatccggggcccgatgtggtcagtcctcctgaacattgaggaaatgaagttgaaaaaccccggaagataccagatcatgaaggagaagggcaagaggtcatctgagcacatccagcgcatcgaccgggacataagcgggacattaaggaagcatatgttcttcagggatcgatacggaaccaagcagcgggaactactccacatcctcctggcatatgaggagtataacccggaggtgggctactgcagggacctgagccacatcgccgccttgttcctcctctatcttcctgaggaggatgcattctgggcactggtgcagctgctggccagtgagaggcactccctgcagggatttcacagcccaaatggcgggaccgtccaggggctccaagaccaacaggagcatgtggtagccacgtcacaatccaagaccatggggcatcaggacaagaaagatctatgtgggcagtgttccccgttaggctgcctcatccggatattgattgacgggatctctctcgggctcaccctgcgcctgtgggacgtgtatctggtagaaggcgaacaggcgttgatgccgataacaagaatcgcctttaaggttcagcagaagcgcctcacgaagacgtccaggtgtggcccgtgggcacgtttttgcaaccggttcgttgatacctgggccagggatgaggacactgtgctcaagcatcttagggcctctatgaagaaactaacaagaaagcagggggacctgccacccccagccaaacccgagcaagggtcgtcggcatccaggcctgtgccggcttcacgtggcgggaagaccctctgcaagggggacaggcaggcccctccaggcccaccagcctggttcccgcggcccatttggtcagcttccccgccacgggcacctcgttcttccacaccctgtcctggtggggctgtccgggaagacacctaccctgtgggcactcagggtgtgcccagcccggccctggctcagggaggacctcagggttcctggagattcctgcagtggaactccatgccccgcctcccaacggacctggacgtagagggcccttggttccgccattatgatttcagacagagctgctgggtccgtgccatatcccaggaggaccagctggccccctgctggcaggctgaacaccctgcggagcgggtgagatcggctttcgctgcacccagcactgattccgaccagggcacccccttcagagctagggacgaacagcagtgtgctcccacctcagggccttgcctctgcggcctccacttggaaagttctcagttccctccaggcttctagaagcatctgggccagggctcatggctggataatttccctaggcttaacaacccaagcaagcttcgcatcctcgttttatttttggttaaacttatgaaaatgtattaagaaagagtgcagctcgagagagattcagagatggaacacaccagaccccagatcacaaagccaaccatgcccagcccctcccagcacccccagccccacgaccatcgttctgaattctgacgacaccgtgagcctgcctttgtacttcaaactcatggaaggataaccaccttcatgttttgaaataaatgtttcctgttgaaatga

SEQ ID NO: 109663 - DNA, 2305 bp, Artificial Sequence
  derived and/or modified sequence
gaatgtcactggtgcttagcacctatctgctctctggcctgcgtcagtggtctacagcagttacacacaggcagtggtatctgtgagcagctctgtggactcaaaggttttctccctgagaggcatgacccaggccagctgattcatcagaatcaggatggacgtggtagaggtcgcgggtagttggtgggcacaagagcgagaggacatcattatgaaatacgaaaagggacaccgagctgggctgccagaggacaaggggcctaagccttttcgaagctacaacaacaacgtcgatcatttggggattgtacatgagacggagctgcctcctctgactgcgcgggaggcgaagcaaattcggcgggagatcagccgaaagagcaagtgggtggatatgctgggagactgggagaaatacaaaagcagcagaaagctcatagatcgagcgtacaagggaatgcccatgaacatccggggcccgatgtggtcagtcctcctgaacattgaggaaatgaagttgaaaaaccccggaagataccagatcatgaaggagaagggcaagaggtcatctgagcacatccagcgcatcgaccgggacataagcgggacattaaggaagcatatgttcttcagggatcgatacggaaccaagcagcgggaactactccacatcctcctggcatatgaggagtataacccggaggtgggctactgcagggacctgagccacatcgccgccttgttcctcctctatcttcctgaggaggatgcattctgggcactggtgcagctgctggccagtgagaggcactccctgcagggatttcacagcccaaatggcgggaccgtccaggggctccaagaccaacaggagcatgtggtagccacgtcacaacccaagaccatggggcatcaggacaagaaagatctatgtgggcagtgttccccgttaggctgcctcatccggatattgattgacgggatctctctcgggctcaccctgcgcctgtgggacgtgtatctggtagaaggcgaacaggcgttgatgccgataacaagaatcgcctttaaggttcagcagaagcgcctcacgaagacgtccaggtgtggcccgtgggcacgtttttgcaaccggttcgttgatacctgggccagggatgaggacactgtgctcaagcatcttagggcctctatgaagaaactaacaagaaagcagggggacctgccacccccagccaaacccgagcaagggtcgtcggcatccaggcctgtgccagcttcacgtggcgggaagaccctctgcaagggggacaggcaggcccctccaggcccaccagcccggttcccgcggcccatttggtcagcttccccgccacgggcacctcgttcttccacaccctgtcctggtggggctgtccgggaagacacctaccctgtgggcactcagggtgtgcccagcccggccctggctcagggaggacctcagggttcctggagattcctgcagtggaactccatgccccgcctcccaacggacctggacgtagagggcccttggttccgccattatgatttcagacagagctgctgggtccgtgccatatcccaggaggaccagctggccccctgctggcaggctgaacaccctgcggagcgggtgagatcggctttcgctgcacccagcactgattccgaccagggcacccccttcagagctagggacgaacagcagtgtgctcccacctcagggccttgcctctgcggcctccacttggaaagttctcagttccctccaggcttctagaagcatctgggccagggctcatggctggataatttccctaggcttaacaacccaagcaagcttcgcatcctcgttttatttttggttaaacttatgaaaatgtattaagaaagagtgcagctcgagagagattcagagatggaacacaccagaccccagatcacaaagccaaccatgcccagcccctcccagcaccccaagccccacgaccatcgttctgaattctgacgacaccgtgagcctgcctttgtacttcaaactcatggaaggataaccaccttcatgttttgaaataaatgtttcctgttgaaatgattttagattttagacagaaatattgaaaaggcactatagtatcctcctataccttccatccagctgcccctaataatgatgttttgcagtcccatggcacataagaaatttaggccgggtgtggtggctcacacctgtaatcccagcaatttgagaggtcgaggcgggaggttcaggttcact

SEQ ID NO: 109664 - DNA, 2110 bp, Artificial Sequence
  derived and/or modified sequence
gtgcttagcacctatctgctctctggcctgcgtcagtggtctacagcagttacacacaggcagtggtatctgtgagcagctctgtggactcaaaggttttctccctgagaggcatgacccaggccagctgattcatcagaatcaggatggacgtggtagaggtcgcgggtagttggtgggcacaagagcgagaggacatcattatgaaatacgaaaagggacaccgagctgggctgccagaggacaaggggcctaagccttttcgaagctacaacaacaacgtcgatcatttggggattgtacatgagacggagctgcctcctctgactgcgcgggaggcgaagcaaattcggcgggagatcagccgaaagagcaagtgggtggatatgctgggagactgggagaaatacaaaagcagcagaaagctcatagatcgagcgtacaagggaatgcccatgaacatccggggcccgatgtggtcagtcctcctgaacattgaggaaatgaagttgaaaaaccccggaagataccagatcatgaaggagaagggcaagaggtcatctgagcacatccagcgcatcgaccgggacataagcgggacattaaggaagcatatgttcttcagggatcgatacggaaccaagcagcgggaactactccacatcctcctggcatatgaggagtataacccggaggtgggctactgcagggacctgagccacatcgccgccttgttcctcctctatcttcctgaggaggatgcattctgggcactggtgcagctgctggccagtgagaggcactccctgcagggatttcacagcccaaatggcgggaccgtccaggggctccaagaccaacaggagcatgtggtagccacgtcacaacccaagaccatggggcatcaggacaagaaagatctatgtgggcagtgttccccgttaggctgcctcatccggatattgattgacgggatctctctcgggctcaccctgcgcctgtgggacgtgtatctggtagaaggcgaacaggcgttgatgccgataacaagaatcgcctttaaggttcagcagaagcgcctcacgaagacgtccaggtgtggcccgtgggcacgtttttgcaaccggttcgttgatacctgggccagggatgaggacactgtgctcaagcatcttagggcctctatgaagaaactaacaagaaagcagggggacctgccacccccagccaaacccgagcaagggtcgtcggcatccaggcctgtgccggcttcacgtggcgggaagaccctctgcaagggggacaggcaggcccctccaggcccaccagcccggttcccgcggcccatttggtcagcttccccgccacgggcacctcgttcttccacaccctgtcctggtggggctgtccgggaagacacctaccctgtgggcactcagggtgtgcccagcccggccctggctcagggaggacctcagggttcctggagattcctgcagtggaactccatgccccgcctcccaacggacctggacgtagaggggccttggttccgccattatgatttcagacagagctgctgggtccgtgccatatcccaggaggaccagctggccccctgctggcaggctgaacaccctgcggagcgggtgagatcggctttcgctgcacccagcactgattccgaccagggcacccccttcagagctagggacgaacagcagtgtgctcccacctcagggccttgcctctgcggcctccacttggaaagttctcagttccctccaggcttctagaagcatctgggccagggctcatggctggataatttccctaggcttaacaacccaagcaagcttcgcgtcctcgttttatttttggttaaacttatgaatatgtattaagaaagagtgcagcttgagagacattcagagatggaacacaccagaccccagatcacaaagccaaccatgcccagcccctcccagcaccccaagccccacgaccatcgttctgaattctgacgacaccgtgagcctgcctttgtactttaaactcatggaaggataactaccttcacgttttgaaataaatgtttcctgttgaaatg

SEQ ID NO: 109665 - DNA, 2255 bp, Artificial Sequence
  derived and/or modified sequence
gtcagtggtctacagcagttacacacaggcagtggtatctgtgagcagctctgtggactcaaaggttttctccctgagaggcatgacccaggccagctgattcatcagaatcaggatggacgtggtagaggtcgcgggcagttggtgggcacaagagcgagaggacatcattatgaaatacgaaaagggacaccaagctgggctgccagaggacaaggggcctaagccttttcgaagctacaacaacaacgtcgatcatttggggattgtacagtcgggtcaacctcctttccagggacagaactcctccctgactcccctgcaggtccagcccgaggttgttaggccagaggtgtggggcccatctagggagccggtgggaatggagactgggctaggtcaggcccctgggcgctcagcagttctgtcggcaagtgagcacaagaggagcggggcagcctgagggtctggccctgtctacttggagacaaacccgtgagacggagctgcctcctctgactgcgcgggaggcgaagcaaattcggcgggagatcagccgaaagagcaagtgggtggatatgctgggagactgggagaaatacaaaagcagcagaaagctcatagatcgagcgtacaagggaatgcccatgaacatccggggcccgatgtggtcagtcctcctgaacattgaggaaatgaagttgaaaaaccccggaagataccagatcatgaaggagaagggcaagaggtcatctgagcacatccagcgcatcgaccgggacataagcgggacattaaggaagcatatgttcttcagggatcgatacggaaccaagcagcgggaactactccacatcctcctggcatatgaggagtataacccggaggtgggctactgcagggacctgagccacatcgccgccttgttcctcctctatcttcctgaggaggatgcattctgggcactggtgcagctgctggccagtgagaggcactccctgcagggatttcacagcccaaatggcgggaccgtccaggggctccaagaccaacaggagcatgtggtagccacgtcacaacccaagaccatggggcatcaggacaagaaagatctatgtgggcagtgttccccgttaggctgcctcatccggatattgattgacgggatctctctcgggctcaccctgcgcctgtgggacgtgtatctggtagaaggcgaacaggcgttgatgccgataacaagaatcgcctttaaggttcagcagaagcgcctcacgaagacgtccaggtgtggcccgtgggcacgtttttgcaaccggttcgttgatacctgggccagggatgaggacactgtgctcaagcatcttagggcctctatgaagaaactaacaagaaagcagggggacctgccacccccagccaaacccgagcaagggtcgtcggcatccaggcctgtgccggcttcacgtggcgggaagaccctctgcaagggggacaggcaggcccctccaggcccaccagcctggttcccgcggcccatttggtcagcttccccgccacgggcacctcgttcttccacaccctgtcctggtggggctgtccgggaagacacctaccctgtgggcactcagggtgtgcccagcccggccctggctcagggaggacctcagggttcctggagattcctgcagtggaactccatgccccgcctcccaacggacctggacgtagagggcccttggttccgccattatgatttcagacagagctgctgggtccgtgccatatcccaggaggaccagctggccccctgctggcaggctgaacaccctgcggagcgggtgagatcggctttcgctgcacccagcactgattccgaccagggcacccccttcagagctagggacgaacagcagtgtgctcccacctcagggccttgcctctgcggcctccacttggaaagttctcagttccctccaggcttctagaagcatctgggccagggctcatggctggataatttccctaggcttaacaacccaagcaagcttcgcatcctcgttttatttttggttaaacttatgaaaatgtattaagaaagagtgcagctcgagagagattcagagatggaacacaccagaccccagatcacaaagccaaccatgcccagcccctcccagcacccccagccccacgaccatcgttctgaattctgacgacaccgtgagcctgcctttgtacttcaaactcatgga

SEQ ID NO: 109666 - DNA, 2105 bp, Artificial Sequence
  derived and/or modified sequence
gtgcttagcacctgtctgctctctggcctgcctcagtggtctacagcagttacacacaggcagtggtatctgtgagcagctctgtggactcaaaggttttctccctgagaggcatgacccaggccagctgattcatcagaatcaggatggacgtggtagaggtcgcgggcagttggtgggcacaagagcgagaggacatcattatgaaatacgaaaagggacaccaagctgggctgccagaggacaaggggcctaagccttttcgaagctacaacaacaacgtcgatcatttggggattgtacatgagacggagctgcctcctctgactgcgcgggaggcgaagcaaattcggcgggagatcagccgaaagagcaagtgggtggatatgctgggagactgggagaaatacaaaagcagcagaaagctcatagatcgagcgtacaagggaatgcccatgaacatccggggcccgatgtggtcagtcctcctgaacattgaggaaatgaagttgaaaaaccccggaagataccagatcatgaaggagaagggcaagaggtcatctgagcacatccagcgcatcgaccgggacataagcgggacattaaggaagcatatgttcttcagggatcgatacggaaccaagcagcgggaactactccacatcctcctggcatatgaggagtataacccggaggtgggctactgcagggacctgagccacatcgccgccttgttcctcctctatcttcctgaggaggatgcattctgggcactggtgcagctgctggccagtgagaggcactccctgcagggatttcacagcccaaatggcgggaccgtccaggggctccaagaccaacaggagcatgtggtagccacgtcacaacccaagaccatggggcatcaggacaagaaagatctatgtgggcagtgttccccgttaggctgcctcatccggatattgattgacgggatctctctcgggctcaccctgcgcctgtgggacgtgtatctggtagaaggcgaacaggcgttgatgccgataacaagaatcgcctttaaggttcagcagaagcgcctcacgaagacgtccaggtgtggcccgtgggcacgtttttgcaaccggttcgttgatacctgggccagggatgaggacactgtgctcaagcatcttagggcctctatgaagaaactaacaagaaagcagggggacctgccacccccagccaaacccgagcaagggtcgtcggcatccaggcctgtgccagcttcacgtggcgggaagaccctctgcaagggggacaggcaggcccctccaggcccaccagcccggttcccgcggcccatttggtcagcttccccgccacgggcacctcgttcttccacaccctgtcctggtggggctgtccgggaagacacctaccctgtgggcactcagggtgtgcccagcccggccctggctcagggaggacctcagggttcctggagattcctgcagtggaactccatgccccgcctcccaacggacctggacgtagagggcccttggttccgccattatgatttcagacagagctgctgggtccgtgccatatcccaggaggaccagctggccccctgctggcaggctgaacaccctgcggagcgggtgagatcggctttcgctgcacccagcactgattccgaccagggcacccccttcagagctagggacgaacagcagtgtgctcccacctcagggccttgcctctgcggcctccacttggaaagttctcagttccctccaggcttctagaagcatctgggccagggctcatggctggataatttccctaggcttaacaacccaagcaagcttcgcatcctcgttttatttttggttaaacttatgaaaatgtattaagaaagagtgcagctcgagagagattcagagatggaacacaccagaccccagatcacaaagccaaccatgcccagcccctcccagcaccccaagccccacgaccatcgttctgaattctgacgacaccgtgagcctgcctttgtacttcaaactcatggaaggataaccaccttcatgttttgaaataaatgtttcctgttg

SEQ ID NO: 109667 - DNA, 159 bp, Artificial Sequence
  derived and/or modified sequence
atgaagctctgcgtgactgtcctgtctctcctcgtgctagtagctgccttctgctctctagcactctcagcaccaagtaacaagccccttgaggcaagcaagtctgcgctgaccccagtgagtcctgggtccaggagtacgtgtatgacctggaactga

SEQ ID NO: 109668 - protein, 103 aa, Artificial Sequence
  derived and/or modified sequence
MKLCVTVLSLLVLVAAFCSLALSAPMGSDPPTACCFSYTARKLPRNFVVDYYETSSLCSQPAVVYRESASSAAPGRIPSTRAAPHGPWSGRGRCLPQARDKAR

SEQ ID NO: 109669 - DNA, 312 bp, Artificial Sequence
  derived and/or modified sequence
atgaaactgtgtgtgactgtgctgtccttgctcgtgttggtggccgcattttgtagcttggcgctgtccgctcccatggggtcagacccgccaactgcttgctgtttcagctacacagccagaaagcttcccagaaatttcgtagtggattattacgagacgagcagtctgtgttctcaacctgccgtagtttacagggaaagtgccagttcagccgcaccaggcaggatacccagtacccgtgccgctccacacggtccatggtcaggacggggaagatgtctgccgcaggcaagggacaaagcccgttag

SEQ ID NO: 109670 - DNA, 312 bp, Artificial Sequence
  derived and/or modified sequence
atgaagctctgtgttactgtgttgtcgttactcgtgctggttgctgccttttgttcactggcactctctgcgcccatgggctctgaccccccaaccgcgtgctgtttctcttatactgctcgcaaactcccccgaaatttcgttgtggattattatgagacctcatccctgtgttcgcagcccgccgtggtgtaccgagaatccgcctcttccgctgcccccggtagaattccctccaccagggcggctccccacggaccttggtcgggccgtgggaggtgtctcccccaagctcgagataaagctagatag

SEQ ID NO: 109671 - DNA, 312 bp, Artificial Sequence
  derived and/or modified sequence
atgaagctgtgcgtgactgtcttgtcactcttagtcttggttgctgccttctgctcccttgccttatctgcccctatgggctccgacccgcctaccgcctgctgctttagctataccgctcgtaaacttcctcgcaacttcgtggtggactattacgaaacctcaagcctgtgctcccagcccgcagtggtctacagggaatcagcctcatcagcagcgccaggaagaatcccaagcacccgagcagccccccacggaccttggagtggtagaggtaggtgcctgcctcaggccagagacaaggcccggtag

SEQ ID NO: 109672 - DNA, 312 bp, Artificial Sequence
  derived and/or modified sequence
atgaagctgtgcgtgaccgtgctgagcctgctggtgctggtggccgccttctgcagcctggccctgagcgcccccatgggcagcgacccccccaccgcctgctgcttcagctacaccgccagaaagctgcccagaaacttcgtggtggactactacgagaccagcagcctgtgcagccagcccgccgtggtgtacagagagagcgccagcagcgccgcccccggcagaatccccagcaccagagccgccccccacggcccctggagcggcagaggcagatgcctgccccaggccagagacaaggccagatag

SEQ ID NO: 109673 - DNA, 312 bp, Artificial Sequence
  derived and/or modified sequence
atgaaactctgtgtgacggtcctgtccctacttgtgttggtggctgccttttgcagtctggcgttaagcgcacctatggggagcgacccgcctaccgcctgttgcttttcttatacagctagaaagctacccagaaactttgtggtggattattacgaaactagctcactgtgttctcaacctgcggttgtctacagggagtccgcatcctcggcagcacctggcaggataccgtccacgcgagctgctcctcacggaccctggtccggtcgtggtaggtgcctgccccaggcacgggataaggccagatag

SEQ ID NO: 109674 - DNA, 312 bp, Artificial Sequence
  derived and/or modified sequence
atgaagctgtgtgtgacagtgctgagcctgctggtgctggtggccgccttctgcagcctggccctgagcgcccccatgggcagtgaccccccaacagcctgctgcttctcctacacagccaggaagctgcccaggaactttgtggtggactactatgagaccagcagcctgtgcagccagcctgctgtggtgtaccgggagagcgccagcagcgctgcccctggccgcatccccagcacccgggccgcccctcatggcccctggagcggccggggccgctgcctgccccaggcccgggacaaggccaggtag

SEQ ID NO: 109675 - DNA, 546 bp, Artificial Sequence
  derived and/or modified sequence
ccctggggaagagaagctgagaggaactcctcactcagctagcttcaggagccatgacatcatctctaccatggaaattccactcactctcctgtgcccccacatttgtcctaggcctcagagtccctataaagagagattcccaactcagtatcagcacaggacacagctaggttctgaagcttctgagttctgcagcctcacctctgagaaaacctctttgccaccaataccatgaagctctgcgtgactgtcctgtctctcctcgtgctagtagctgccttctgctctctagcactctcagcaccaatgggctcagaccctcccaccgcctgctgcttttcttacaccgcgaggaagcttcctcgcaactttgtggtagattactatgagaccagcagcctctgctcccagccagctgtggtttacagggagtctgcttccagtgctgctccgggaaggatcccatccaccagagctgccccacatggaccatggtcaggcagaggaagatgcctaccacaggcaagggataaagccagatga

SEQ ID NO: 109676 - DNA, 312 bp, Artificial Sequence
  derived and/or modified sequence
atgaagctgtgcgtgaccgtgctgagcctgctggtgctggtggccgccttttgctcactggccctctcagccccaatgggctcagatcccccaactgcatgctgcttcagctacacagccaggaagctgcctcgaaatttcgttgtcgattactatgagacctcaagcctatgctctcagccggctgtagtgtatcgcgagagcgcaagttcggcagcccctgggcgcatcccttccacgagagcagccccacacggaccatggtccggcaggggcagatgccttccccaggcaagggataaggcccgatag

SEQ ID NO: 109677 - RNA, 312 nt, Artificial Sequence
  derived and/or modified sequence
augaagcucuguguuacuguguugucguuacucgugcugguugcugccuuuuguucacuggcacucucugcgcccaugggcucugaccccccaaccgcgugcuguuucucuuauacugcucgcaaacucccccgaaauuucguuguggauuauuaugagaccucaucccuguguucgcagcccgccgugguguaccgagaauccgccucuuccgcugcccccgguagaauucccuccaccagggcggcuccccacggaccuuggucgggccgugggaggugucucccccaagcucgagauaaagcuagauag

SEQ ID NO: 109678 - RNA, 312 nt, Artificial Sequence
  derived and/or modified sequence
augaagcugugcgugacugucuugucacucuuagucuugguugcugccuucugcucccuugccuuaucugccccuaugggcuccgacccgccuaccgccugcugcuuuagcuauaccgcucguaaacuuccucgcaacuucgugguggacuauuacgaaaccucaagccugugcucccagcccgcaguggucuacagggaaucagccucaucagcagcgccaggaagaaucccaagcacccgagcagccccccacggaccuuggagugguagagguaggugccugccucaggccagagacaaggcccgguag

SEQ ID NO: 109679 - protein, 86 aa, Artificial Sequence
  derived and/or modified sequence
MKLCVTVLSLLVLVAAFCSLALSAPMGSDPPTACCFSYTARKLPRNFVVDYYETSSLCSQPAVVAAPHGPWSGRGRCLPQARDKAR

SEQ ID NO: 109680 - DNA, 261 bp, Artificial Sequence
  derived and/or modified sequence
atgaagctgtgcgtaacagtgctgtcccttctggtgctggtggccgctttctgctcactggccctaagtgcccccatgggatctgatcctcctacagcatgctgcttctcgtatactgctcggaagttgcctcgcaatttcgtggtggactattatgagacaagcagcctctgctctcaaccagcagtcgttgccgcgccgcacggaccatggtcagggagaggccggtgtcttccacaggcccgggacaaggcgcgttag

SEQ ID NO: 109681 - DNA, 261 bp, Artificial Sequence
  derived and/or modified sequence
atgaagctgtgtgtgacagtgctgagcctgctggtgctggtggccgccttctgcagcctggccctgagcgcccccatgggcagtgaccccccaacagcctgctgcttctcctacacagccaggaagctgcccaggaactttgtggtggactactatgagaccagcagcctgtgcagccagcctgctgtggtggccgccccccacggcccctggagcggccggggccgctgcctgccccaggcccgggacaaggccaggtag

SEQ ID NO: 109682 - DNA, 261 bp, Artificial Sequence
  derived and/or modified sequence
atgaagctgtgcgtgaccgtgctgagcctgctggtgctggtggccgccttttgcagcctcgccctatctgcgcctatgggcagcgatccgccaaccgcctgctgcttttcttacacagcccgcaagttaccacgaaatttcgtcgttgattactacgaaacctccagtttatgttcccagcccgccgtcgtcgcggctccacacgggccatggagcggacgtggtagatgcttgcctcaagctagggataaagctaggtag

SEQ ID NO: 109683 - DNA, 261 bp, Artificial Sequence
  derived and/or modified sequence
atgaaattgtgtgtgaccgtgctctcgctccttgtgctggtagctgccttttgcagtctggcccttagcgctccaatggggagcgatccgccaactgcatgctgcttctcctacacagcgagaaagctgcccagaaacttcgtggtagactattacgagacctcctctctgtgtagtcagcccgctgtggtagccgctccacacggcccatggtctggaagggggaggtgccttccgcaggccagagataaagctagatag

SEQ ID NO: 109684 - DNA, 495 bp, Artificial Sequence
  derived and/or modified sequence
ccctggggaagagaagctgagaggaactcctcactcagctagcttcaggagccatgacatcatctctaccatggaaattccactcactctcctgtgcccccacatttgtcctaggcctcagagtccctataaagagagattcccaactcagtatcagcacaggacacagctaggttctgaagcttctgagttctgcagcctcacctctgagaaaacctctttgccaccaataccatgaagctctgcgtgactgtcctgtctctcctcgtgctagtagctgccttctgctctctagcactctcagcaccaatgggctcagaccctcccaccgcctgctgcttttcttacaccgcgaggaagcttcctcgcaactttgtggtagattactatgagaccagcagcctctgctcccagccagctgtggtagctgccccacatggaccatggtcaggcagaggaagatgcctaccacaggcaagggataaagccagatga

SEQ ID NO: 109685 - DNA, 261 bp, Artificial Sequence
  derived and/or modified sequence
atgaagctgtgcgtgaccgtgctgagcctgctggtgctggtggccgccttctgcagcctggccctgagcgcccccatgggcagcgacccccccaccgcctgctgcttcagctacaccgccagaaagctgcccagaaacttcgtggtggactactacgagaccagcagcctgtgcagccagcccgccgtggtggccgccccccacggcccctggagcggcagaggcagatgcctgccccaggccagagacaaggccagatag

SEQ ID NO: 109686 - protein, 68 aa, Artificial Sequence
  derived and/or modified sequence
MKLCVTVLSLLVLVAAFCSLALSAPTKSSEWKLQGVCFQCCSGKDPIHQSCPTWTMVRQRKMPTTGKG

SEQ ID NO: 109687 - protein, 68 aa, Artificial Sequence [sequence omitted]

SEQ ID NO: 109688 - DNA, 441 bp, Artificial Sequence
  derived and/or modified sequence
ccctggggaagagaagctgagaggaactcctcactcagctagcttcaggagccatgacatcatctctaccatggaaattccactcactctcctgtgcccccacatttgtcctaggcctcagagtccctataaagagagattcccaactcagtatcagcacaggacacagctaggttctgaagcttctgagttctgcagcctcacctctgagaaaacctctttgccaccaataccatgaagctctgcgtgactgtcctgtctctcctcgtgctagtagctgccttctgctctctagcactctcagcaccaactaaatccagtgagtggaagttacagggagtctgcttccagtgctgctccgggaaggatcccatccaccagagctgccccacatggaccatggtcaggcagaggaagatgcctaccacaggcaagggataa

SEQ ID NO: 109689 - DNA, 207 bp, Artificial Sequence
  derived and/or modified sequence
atgaagctgtgtgttactgtgctctccttgttggtcctggtcgccgctttttgtagtctggccctctcagcgccaacgaaatccagcgaatggaaactacagggggtttgtttccagtgttgtagcggcaaagacccaatccatcagtcttgccctacctggaccatggtccggcagaggaaaatgccaaccacaggcaaaggctag

SEQ ID NO: 109690 - DNA, 207 bp, Artificial Sequence
  derived and/or modified sequence
atgaaactgtgtgtgactgttttgtccctgctagtacttgtggctgccttttgttcacttgccctgtctgcacccaccaaatccagcgagtggaaattgcaaggtgtgtgtttccagtgttgcagtgggaaggatcctatccatcaaagctgtccgacctggacaatggttcgccagagaaagatgcccaccaccggaaagggttag

SEQ ID NO: 109691 - DNA, 207 bp, Artificial Sequence
  derived and/or modified sequence
atgaagctgtgcgtgaccgtgctgagcctgctggtgctggtggccgccttctgcagcctggccctgagcgcccccaccaagagcagcgagtggaagctgcagggcgtgtgcttccagtgctgcagcggcaaggaccccatccaccagagctgccccacctggaccatggtgagacagagaaagatgcccaccaccggcaagggctag

SEQ ID NO: 109692 - DNA, 207 bp, Artificial Sequence
  derived and/or modified sequence
atgaaactctgcgtaactgtcctgagcctgctcgtccttgtggccgctttctgctctctggctttgtcagctcctactaaatcatcagagtggaaactacagggggtgtgcttccagtgttgcagtggaaaagaccccatccatcaaagctgtccaacgtggacaatggtgcgccagaggaagatgcccacaaccggaaagggctag

SEQ ID NO: 109693 - DNA, 207 bp, Artificial Sequence
  derived and/or modified sequence
atgaagctgtgtgtgacagtgctgagcctgctggtgctggtggccgccttctgcagcctggccctgagcgcccccaccaagagcagcgagtggaagctgcagggcgtgtgcttccagtgctgcagcggcaaggaccccatccaccagagctgccccacctggaccatggtgcggcagaggaagatgcccaccactggaaaaggatag

SEQ ID NO: 109694 - DNA, 207 bp, Artificial Sequence
  derived and/or modified sequence
atgaagctgtgcgtgaccgtgctgagcctgctggtgctggtggccgcattttgctcacttgcactaagtgcacctacaaagtcgagcgaatggaagctccagggcgtctgtttccagtgctgcagtggaaaagaccccatacatcagtcttgtcccacgtggacgatggtgcgccaaagaaaaatgcctactacaggcaagggctag

SEQ ID NO: 109695 - DNA, 207 bp, Artificial Sequence
  derived and/or modified sequence
atgaagctctgcgtgactgtgctgagtctgctagtactagtcgcagcattctgctctctagctctgagcgcaccaaccaaatcttctgagtggaagctgcaaggggtatgcttccaatgctgctccaggaaagatccgatccatcagagctgtccaacctggacgatggtgagacagcggaagatgccgactactggcaaaggctag

SEQ ID NO: 109696 - DNA, 207 bp, Artificial Sequence
  derived and/or modified sequence
atgaagctgtgtgtgacagtgctgagcctgctggtgctggtggccgccttctgcagcctggccctgagcgcccccaccaagagcagcgagtggaagctgcagggcgtgtgcttccagtgctgcagcaggaaggaccccatccaccagagctgccccacctggaccatggtgcggcagaggaagatgcccaccactggaaaaggatag

SEQ ID NO: 109697 - DNA, 207 bp, Artificial Sequence
  derived and/or modified sequence
atgaagctgtgcgtgaccgtgctgagcctgctggtgctggtggccgccttttgctctcttgctttatcagcccccactaagtcttcagagtggaaattgcagggggtttgctttcagtgctgctcccgcaaggatccgattcaccagtcctgtcccacatggactatggttcgacagcgcaagatgccaaccactgggaagggttag

SEQ ID NO: 109698 - DNA, 207 bp, Artificial Sequence
  derived and/or modified sequence
atgaaattgtgtgttacagtgctgagcctccttgtgttggttgccgctttctgctctctagccctctcagcccctacaaagagctctgaatggaaactgcagggggtttgtttccagtgttgcagcagaaaggacccaatccaccagtcatgtcccacctggaccatggttcggcagaggaagatgcctacgaccgggaagggatag

SEQ ID NO: 109699 - DNA, 441 bp, Artificial Sequence
  derived and/or modified sequence
ccctggggaagagaagctgagaggaactcctcactcagctagcttcaggagccatgacatcatctctaccatggaaattccactcactctcctgtgcccccacatttgtcctaggcctcagagtccctataaagagagattcccaactcagtatcagcacaggacacagctaggttctgaagcttctgagttctgcagcctcacctctgagaaaacctctttgccaccaataccatgaagctctgcgtgactgtcctgtctctcctcgtgctagtagctgccttctgctctctagcactctcagcaccaactaaatccagtgagtggaagttacagggagtctgcttccagtgctgctcgaggaaggatcccatccaccagagctgccccacatggaccatggtcaggcagaggaagatgcctaccacaggcaagggataa

SEQ ID NO: 109700 - DNA, 207 bp, Artificial Sequence
  derived and/or modified sequence
atgaagctgtgcgtgaccgtgctgagcctgctggtgctggtggccgccttctgcagcctggccctgagcgcccccaccaagagcagcgagtggaagctgcagggcgtgtgcttccagtgctgcagcagaaaggaccccatccaccagagctgccccacctggaccatggtgagacagagaaagatgcccaccaccggcaagggctag

SEQ ID NO: 109701 - RNA, 207 nt, Artificial Sequence
  derived and/or modified sequence
augaaacugugugugacuguuuugucccugcuaguacuuguggcugccuuuuguucacuugcccugucugcacccaccaaauccagcgaguggaaauugcaagguguguguuuccaguguugcagugggaaggauccuauccaucaaagcuguccgaccuggacaaugguucgccagagaaagaugcccaccaccggaaaggguuag

SEQ ID NO: 109702 - protein, 702 aa, Artificial Sequence
  derived and/or modified sequence
MESPSAPPHRWCIPWQRLLLTASLLTFWNPPTTAKLTIESTPFNVAEGKEVLLLVHNLPQHLFGYSWYKGERVDGNRQIIGYVIGTQQATPGPAYSGREIIYPNASLLIQNIIQNDTGFYTLHVIKSDLVNEEATGQFRVYPELPKPSISSNNSKPVEDKDAVAFTCEPETQDATYLWWVNNQSLPVSPRLQLSNGNRTLTLFNVTRNDTASYKCETQNPVSARRSDSVILNVLYGPDAPTISPLNTSYRSGENLNLSCHAASNPPAQYSWFVNGTFQQSTQELFIPNITVNNSGSYTCQAHNSDTGLNRTTVTTITVYAEPPKPFITSNNSNPVEDEDAVALTCEPEIQNTTYLWWVNNQSLPVSPRLQLSNDNRTLTLLSVTRNDVGPYECGIQNKLSVDHSDPVILNVLYGPDDPTISPSYTYYRPGVNLSLSCHAASNPPAQYSWLIDGNIQQHTQELFISNITEKNSGLYTCQANNSASGHSRTTVKTITVSAELPKPSISSNNSKPVEDKDAVAFTCEPEAQNTTYLWWVNGQSLPVSPRLQLSNGNRTLTLFNVTRNDARAYVCGIQNSVSANRSDPVTLDVLYGPDTPIISPPDSSYLSGANLNLSCHSASNPSPQYSWRINGIPQQHTQVLFIAKITPNNNGTYACFVSNLATGRNNSIVKSITVSASGTSPGLSAGATVGIMIGVLVGVALI

SEQ ID NO: 109703 - DNA, 2109 bp, Artificial Sequence
  derived and/or modified sequence
atggaatccccaagcgcacctcctcataggtggtgcatcccctggcagagactattgctgaccgcatctcttctgacattctggaatccgcccacaacagcaaagctcactatcgagtcgaccccctttaacgtcgccgaggggaaggaagtcctgctgctcgtccacaacttaccacagcatctcttcggctacagctggtacaaaggcgaacgcgttgatggcaatcggcagatcataggatatgtcattggcacacagcaagcgacccccggccccgcctactccgggagagagataatctacccaaatgcctctctcctgatccagaacataattcagaatgacacgggattttacacgctgcacgtgataaagagtgatctcgtaaatgaggaagctactggtcagttcagggtgtaccctgaactgcctaaaccttccatttcaagcaataacagcaaaccggtcgaggacaaggatgccgtggcctttacttgcgaacctgaaacacaggacgctacctatctatggtgggtgaacaaccagagcctgcctgtctcaccacggttgcagctgtccaatggtaaccgaacacttactctgtttaacgttacgcgaaacgataccgcctcttataaatgtgagactcagaacccagtgagtgctagaagatcagacagcgtgatactcaacgtgttgtatggccccgatgcccccacaatttcccccctcaatacctcctacagatcgggtgaaaaccttaatctatcatgtcatgctgcatctaaccccccggcccagtacagctggttcgtcaatggcacctttcaacaaagtacacaggaattgttcatccctaatatcacagttaacaattcagggtcctatacctgtcaggcccacaattccgacaccggccttaatcgcaccacagtgacaaccattactgtgtatgcagagccacccaaaccattcataacctcaaacaactccaatccggtcgaagacgaggatgcggtggccttaacatgtgaaccggagattcagaataccacttatttgtggtgggtaaataatcaatctctgcctgtgagcccaagattacagctgtccaatgataaccggacactgacactgctcagcgttactcgcaatgacgtggggccgtatgaatgtggcattcagaacaagctgtccgtggatcactccgatcctgttatactgaatgtactgtacggacctgatgatccaactatcagtcctagctacacctactaccgcccaggggtgaatcttagcctttcctgtcacgccgcatccaatcctcccgcccagtactcctggttgatcgacggcaatattcaacagcacacgcaagagctgttcatctccaatataaccgaaaaaaattctgggctgtacacttgccaggccaacaatagcgccagtggccattcccgtaccactgtaaagactataaccgtgtcggcagagctgccaaagccaagcatctcatcaaacaattctaagcccgtggaagacaaggacgctgtagccttcacatgtgagccagaggcccagaataccacatacttgtggtgggtcaatgggcagagcctcccagtgtccccccgactgcagttatctaacgggaaccgcactctcaccctcttcaacgtgactcggaacgatgctagggcttatgtgtgtggaattcaaaactccgtgtccgctaaccgatcggatcccgtgactttggatgtgctgtacgggccagatactccaatcatctcaccaccagatagttcatacctttcgggcgccaacctgaacctctcttgtcacagtgcttcaaacccctccccgcagtactcttggcggataaacggaattccacagcaacacacgcaggtgctatttattgcgaagatcactcctaacaacaacggcacatatgcctgcttcgtgtctaatttggctacaggcagaaataattccatcgtcaaaagcattaccgtctctgcaagcggaacaagccccggcctgtctgcaggggccaccgtgggcataatgataggggtgcttgttggcgtggcactaatctag

SEQ ID NO: 109704 - DNA, 2109 bp, Artificial Sequence
  derived and/or modified sequence
atggagagccccagcgccccaccccaccgctggtgcatcccctggcagaggctgctgctgacagccagcctgctgaccttctggaacccccccaccacagccaagctgaccatcgagagcacccccttcaacgtggccgagggcaaggaggtgctgctgctggtgcacaacctgccccagcacctgtttggctacagctggtacaagggggagcgggtggatggcaaccggcagatcatcggctacgtgattggcacccagcaggccaccccaggccctgcctacagcggccgggagatcatctacccaaatgccagcctgctgatccagaacatcatccagaatgacaccggcttctacaccctgcacgtgatcaagagtgacctggtgaatgaggaggccaccggccagttccgggtgtacccagagctgcccaagcccagcatcagcagcaacaacagcaagcctgtggaggacaaggatgctgtggccttcacctgtgagcctgagacccaggatgccacctacctgtggtgggtgaacaaccagagcctgcctgtgagcccccggctgcagctgagcaatggaaacagaaccctgaccctcttcaacgtgaccagaaatgacacagccagctacaagtgtgagacccagaaccctgtgtctgcccggcggagtgacagcgtcatcctgaatgtgctgtatggcccagatgcccccaccatcagccccctgaacaccagctacagaagtggagagaacctgaacctgagctgccacgccgccagcaaccccccagcccagtacagctggtttgtgaatggcaccttccagcagagcacccaggagctgttcatccccaacatcaccgtgaacaacagcggcagctacacctgccaggcccacaacagcgacaccggcctgaacagaaccaccgtgaccaccatcaccgtgtatgcagagccccccaagcccttcatcaccagcaacaacagcaaccctgtggaggatgaagatgctgtggccctgacctgtgagcctgagatccagaacaccacctacctgtggtgggtgaacaaccagagcctgcctgtgagcccccggctgcagctgagcaatgacaacagaaccctgaccctgctgtctgtgaccagaaatgatgtgggcccctatgaatgtggcatccagaacaagctgtctgtggaccacagcgaccccgtcatcctgaatgtgctgtatggcccagatgaccccaccatcagccccagctacacctactacagacctggggtgaacctgagcctgagctgccacgccgccagcaaccccccagcccagtacagctggctgattgatggcaacatccagcagcacacccaggagctgttcatcagcaacatcacagagaagaacagcggcctgtacacctgccaggccaacaacagcgccagcggccacagcaggaccaccgtgaagaccatcaccgtgtctgctgagctgcccaagcccagcatcagcagcaacaacagcaagcctgtggaggacaaggatgctgtggccttcacctgtgagcctgaggcccagaacaccacctacctgtggtgggtgaatggccagagcctgcctgtgagcccccggctgcagctgagcaatggaaacagaaccctgaccctcttcaacgtgaccagaaatgatgcccgggcctacgtgtgtggcatccagaacagcgtgtctgccaacagaagtgaccctgtgaccctggatgtgctgtatggccctgacacccccatcatcagccccccagacagcagctacctgagcggggccaacctgaacctgagctgccacagcgccagcaaccccagcccccagtacagctggaggatcaatggcatcccccagcagcacacccaggtgctcttcatcgccaagatcacccccaacaacaacggcacctacgcctgctttgtgagcaacctggccaccggcaggaacaacagcatcgtgaagagcatcaccgtgtctgccagcggcaccagccctggcctgtctgctggggccaccgtgggcatcatgattggagtgctggtgggcgtggccctgatctag

SEQ ID NO: 109705 - DNA, 2109 bp, Artificial Sequence
  derived and/or modified sequence
atggagagccccagcgcccccccccaccggtggtgcatcccctggcagcgcctgctcctgaccgcaagcctgcttacattttggaatccaccaacgaccgcgaagttaacaatcgaatccactccatttaatgtagcagaaggcaaggaagtcctgctgctggtgcataacctaccccagcacctgttcggttattcctggtataaaggagagagagttgacggcaaccgtcaaatcatcggatatgtgattggtacacagcaggctacacccggaccagcatacagcggcagggaaatcatctatccaaatgcctcgctgttaatccagaacatcatccagaatgacactggcttttatacattacacgtcatcaaatcggacctcgtgaatgaagaggctaccggacagttccgagtgtaccccgaactgcccaagccaagcatctcttctaacaattcgaaacctgtagaagataaggacgccgtcgctttcacatgcgaaccggagacccaggatgctacttacctttggtgggtgaacaaccagagtctgccagttagcccaagactgcagctgagtaacggcaaccggactcttaccctttttaatgtcaccaggaatgacaccgcgagctacaaatgcgagactcagaaccctgtgtctgctaggcggagcgatagtgtcattctaaatgtgctgtatgggcctgacgcccccaccattagccccctgaacaccagttacagaagtggggagaatttgaacctatcgtgccacgcggcaagcaacccaccggcccaatactcttggttcgtaaatggaacctttcagcagtccactcaggagttatttatcccaaacataaccgtgaataacagtgggagctatacctgccaggcacacaactctgacaccgggttaaatcgcacgactgtgactacaatcacagtgtacgctgagccacccaaacccttcattaccagtaacaattcgaaccccgtggaagacgaagatgccgtagccctgacttgcgaacctgaaattcagaacactacttacctgtggtgggttaacaaccagagtcttcctgtgtcccctcgcctgcagctgagcaacgacaatagaactctgaccctcctgtctgtcactcggaatgatgtgggcccatatgagtgcgggattcagaacaaactctctgtcgaccactccgatcccgtgatcctgaatgtcctgtacggacctgatgatcctaccattagccctagttacacatactaccgtcctggggtgaacctgtctctctcttgtcacgcagcctctaatccccctgcccaatacagctggctgatcgatggtaatatccagcaacatactcaggagctgttcataagtaacattacggagaagaattccgggctttatacatgtcaggcaaataacagtgcctcaggacatagtcgtaccacggtcaaaacaataaccgttagcgcggaacttcccaaaccctctattagctccaataatagtaaacctgtcgaggacaaagatgcagtggcattcacctgcgaacctgaggcccagaatacaacttacctctggtgggtgaatggtcagagcctcccagtgtctccgcggctccaactttccaacggcaaccgaaccctcacattgttcaacgtcacaaggaacgacgcaagagcctatgtatgtggcattcagaattccgtcagcgcaaatcggtctgatccagttactctggatgttctgtatggccccgatactcctataattagccctcccgacagcagctacctgtctggcgccaatctcaatttgagttgtcatagcgcctcaaatccgtcacctcagtactcttggagaatcaatggaatcccacagcagcatacccaggtcctgttcatcgccaaaatcacacctaacaataatggcacatacgcatgcttcgtttcaaatttggccactgggcggaacaactcaatagtgaaaagtattacggtgtccgcatccggcaccagtcctggcctgagtgcgggcgctacagttggcattatgataggggtactggttggggtggccctgatttag

SEQ ID NO: 109706 - DNA, 2109 bp, Artificial Sequence
  derived and/or modified sequence
atggaatctccaagcgcccctccacatcggtggtgcattccctggcagagactgttgctgactgcctccctgctgaccttttggaacccccctaccaccgctaagctcaccatcgagtctacaccatttaacgtcgccgagggaaaagaagtgctccttctggtgcacaatctcccccaacacttgttcggctattcctggtacaaaggggaacgcgtagatgggaatcgtcagataatcgggtacgtgattgggacccagcaagcgacacccggtcctgcatattctgggcgtgagatcatataccccaacgcatctctccttattcaaaacattattcagaacgatacagggttttacacccttcatgtaatcaagtctgacctggtgaatgaagaggcaaccgggcaattcagggtataccccgaattacctaagccttcaattagcagtaataacagtaaacctgtggaagataaggacgctgttgccttcacctgcgagccagagactcaggacgcaacgtatctgtggtgggtgaacaatcagtcattgccggtgtcgccccgtctgcagttatccaatgggaaccgcacattgacccttttcaacgtcacccgaaacgacaccgcctcatataagtgtgaaactcaaaatcctgtgagcgctcgacgttcggactctgtaattttaaacgtcttatacgggccagacgcacccactatttcacccctcaatacttcttatagatcgggtgaaaacctcaacctctcatgccatgcagccagtaatccccctgctcagtactcttggtttgtcaatggaacatttcaacagagcacacaggagttatttatacccaacattaccgtaaacaactcaggcagctacacatgtcaggcccacaattcggacacagggctcaatcgaaccactgttacaaccatcactgtgtacgccgaacctcctaagccttttatcacatccaataactctaaccctgtagaggatgaggacgccgtggccctgacctgcgagcccgagatccagaataccacttacctgtggtgggttaacaatcaatctttgcctgtgtcaccaaggttgcaattgagcaacgacaaccgcacactcaccttgctttcagtgacaaggaatgatgttggcccttacgaatgtggtatccagaacaagttatccgtggaccattctgatcccgtgatcttgaacgtgctctacggccctgacgatcctactatctctccatcttacacttactacagacccggagttaacctctccctcagctgtcacgcagcttcaaacccacctgcccagtactcatggttgatcgacggcaacatccaacagcacacgcaggagctatttatatccaacatcactgagaagaatagcggcttgtacacctgtcaagccaataacagcgctagtggccactctaggactacagttaagacaatcacagtctccgccgagctgcccaagccatcaattagctctaataatagcaagccggtggaggataaggatgccgtagccttcacatgcgagcctgaagcccaaaacacgacgtatttgtggtgggttaacggccagtccttaccggtttcgccgcgtctgcagctaagtaatggaaacaggactctcacattattcaacgtgacaagaaacgatgcacgcgcatatgtgtgcggcattcagaactcggtcagcgcaaacagatcggaccccgtaaccctggacgtcctttacgggcctgacactccgatcattagccctcctgatagctcgtacctgagcggcgctaatctgaatttgagctgccatagcgcctccaatcctagcccccaatacagctggcgaattaacggcataccccagcagcacacccaggtcctgttcattgccaagatcacacccaataacaacggtacttatgcatgcttcgtcagcaatctggccacaggaagaaacaatagtatcgtgaaaagcattactgtctctgccagtggcacttcacctggtctcagcgctggtgcaaccgtgggcattatgatcggcgtgctcgttggcgttgcccttatctag

SEQ ID NO: 109707 - DNA, 2907 bp, Artificial Sequence
  derived and/or modified sequence
gatgctgagaagtactcctgccctaggaagagactcagggcagagggaggaaggacagcagaccagacagtcacagcagccttgacaaaacgttcctggaactcaagctcttctccacagaggaggacagagcagacagcagagaccatggagtctccctcggcccctccccacagatggtgcatcccctggcagaggctcctgctcacagcctcacttctaaccttctggaacccgcccaccactgccaagctcactattgaatccacgccgttcaatgtcgcagaggggaaggaggtgcttctacttgtccacaatctgccccagcatctttttggctacagctggtacaaaggtgaaagagtggatggcaaccgtcaaattataggatatgtaataggaactcaacaagctaccccagggcccgcatacagtggtcgagagataatataccccaatgcatccctgctgatccagaacatcatccagaatgacacaggattctacaccctacacgtcataaagtcagatcttgtgaatgaagaagcaactggccagttccgggtatacccggagctgcccaagccctccatctccagcaacaactccaaacccgtggaggacaaggatgctgtggccttcacctgtgaacctgagactcaggacgcaacctacctgtggtgggtaaacaatcagagcctcccggtcagtcccaggctgcagctgtccaatggcaacaggaccctcactctattcaatgtcacaagaaatgacacagcaagctacaaatgtgaaacccagaacccagtgagtgccaggcgcagtgattcagtcatcctgaatgtcctctatggcccggatgcccccaccatttcccctctaaacacatcttacagatcaggggaaaatctgaacctctcctgccacgcagcctctaacccacctgcacagtactcttggtttgtcaatgggactttccagcaatccacccaagagctctttatccccaacatcactgtgaataatagtggatcctatacgtgccaagcccataactcagacactggcctcaataggaccacagtcacgacgatcacagtctatgcagagccacccaaacccttcatcaccagcaacaactccaaccccgtggaggatgaggatgctgtagccttaacctgtgaacctgagattcagaacacaacctacctgtggtgggtaaataatcagagcctcccggtcagtcccaggctgcagctgtccaatgacaacaggaccctcactctactcagtgtcacaaggaatgatgtaggaccctatgagtgtggaatccagaacaaattaagtgttgaccacagcgacccagtcatcctgaatgtcctctatggcccagacgaccccaccatttccccctcatacacctattaccgtccaggggtgaacctcagcctctcctgccatgcagcctctaacccacctgcacagtattcttggctgattgatgggaacatccagcaacacacacaagagctctttatctccaacatcactgagaagaacagcggactctatacctgccaggccaataactcagccagtggccacagcaggactacagtcaagacaatcacagtctctgcggagctgcccaagccctccatctccagcaacaactccaaacccgtggaggacaaggatgctgtggccttcacctgtgaacctgaggctcagaacacaacctacctgtggtgggtaaatggtcagagcctcccagtcagtcccaggctgcagctgtccaatggcaacaggaccctcactctattcaatgtcacaagaaatgacgcaagagcctatgtatgtggaatccagaactcagtgagtgcaaaccgcagtgacccagtcaccctggatgtcctctatgggccggacacccccatcatttcccccccagactcgtcttacctttcgggagcgaacctcaacctctcctgccactcggcctctaacccatccccgcagtattcttggcgtatcaatgggataccgcagcaacacacacaagttctctttatcgccaaaatcacgccaaataataacgggacctatgcctgttttgtctctaacttggctactggccgcaataattccatagtcaagagcatcacagtctctgcatctggaacttctcctggtctctcagctggggccactgtcggcatcatgattggagtgctggttggggttgctctgatatagcagccctggtgtagtttcttcatttcaggaagactgacagttgttttgcttcttccttaaagcatttgcaacagctacagtctaaaattgcttctttaccaaggatatttacagaaaagactctgaccagagatcgagaccatcctagccaacatcgtgaaaccccatctctactaaaaatacaaaaatgagctgggcttggtggcgcgcacctgtagtcccagttactcgggaggctgaggcaggagaatcgcttgaacccgggaggtggagattgcagtgagcccagatcgcaccactgcactccagtctggcaacagagcaagactccatctcaaaaagaaaagaaaagaagactctgacctgtactcttgaatacaagtttctgataccactgcactgtctgagaatttccaaaactttaatgaactaactgacagcttcatgaaactgtccaccaagatcaagcagagaaaataattaatttcatgggactaaatgaactaatgaggataatattttcataattttttatttgaaattttgctgattctttaaatgtcttgtttcccagatttcaggaaactttttttcttttaagctatccacagcttacagcaatttgataaaatatacttttgtgaacaaaaa

SEQ ID NO: 109708 - DNA, 2354 bp, Artificial Sequence
  derived and/or modified sequence
agacagtcacagcagccttgacaaaacgttcctggaactcaagctcttctccacagaggaggacagagcagacagcagagaccatggagtctccctcggcccctccccacagatggtgcatcccctggcagaggctcctgctcacagcctcacttctaaccttctggaacccgcccaccactgccaagctcactattgaatccacgccgttcaatgtcgcagaggggaaggaggtgcttctacttgtccacaatctgccccagcatctttttggctacagctggtacaaaggtgaaagagtggatggcaaccgtcaaattataggatatgtaataggaactcaacaagctaccccagggcccgcatacagtggtcgagagataatataccccaatgcatccctgctgatccagaacatcatccagaatgacacaggattctacaccctacacgtcataaagtcagatcttgtgaatgaagaagcaactggccagttccgggtatacccggagctgcccaagccctccatctccagcaacaactccaaacccgtggaggacaaggatgctgtggccttcacctgtgaacctgagactcaggacgcaacctacctgtggtgggtaaacaatcagagcctcccggtcagtcccaggctgcagctgtccaatggcaacaggaccctcactctattcaatgtcacaagaaatgacacagcaagctacaaatgtgaaacccagaacccagtgagtgccaggcgcagtgattcagtcatcctgaatgtcctctatggcccggatgcccccaccatttcccctctaaacacatcttacagatcaggggaaaatctgaacctctcctgccacgcagcctctaacccacctgcacagtactcttggtttgtcaatgggactttccagcaatccacccaagagctctttatccccaacatcactgtgaataatagtggatcctatacgtgccaagcccataactcagacactggcctcaataggaccacagtcacgacgatcacagtctatgcagagccacccaaacccttcatcaccagcaacaactccaaccccgtggaggatgaggatgctgtagccttaacctgtgaacctgagattcagaacacaacctacctgtggtgggtaaataatcagagcctcccggtcagtcccaggctgcagctgtccaatgacaacaggaccctcactctactcagtgtcacaaggaatgatgtaggaccctatgagtgtggaatccagaacaaattaagtgttgaccacagcgacccagtcatcctgaatgtcctctatggcccagacgaccccaccatttccccctcatacacctattaccgtccaggggtgaacctcagcctctcctgccatgcagcctctaacccacctgcacagtattcttggctgattgatgggaacatccagcaacacacacaagagctctttatctccaacatcactgagaagaacagcggactctatacctgccaggccaataactcagccagtggccacagcaggactacagtcaagacaatcacagtctctgcggagctgcccaagccctccatctccagcaacaactccaaacccgtggaggacaaggatgctgtggccttcacctgtgaacctgaggctcagaacacaacctacctgtggtgggtaaatggtcagagcctcccagtcagtcccaggctgcagctgtccaatggcaacaggaccctcactctattcaatgtcacaagaaatgacgcaagagcctatgtatgtggaatccagaactcagtgagtgcaaaccgcagtgacccagtcaccctggatgtcctctatgggccggacacccccatcatttcccccccagactcgtcttacctttcgggagcgaacctcaacctctcctgccactcggcctctaacccatccccgcagtattcttggcgtatcaatgggataccgcagcaacacacacaagttctctttatcgccaaaatcacgccaaataataacgggacctatgcctgttttgtctctaacttggctactggccgcaataattccatagtcaagagcatcacagtctctgcatctggaacttctcctggtctctcagctggggccactgtcggcatcatgattggagtgctggttggggttgctctgatatagcagccctggtgtagtttcttcatttcaggaagactgcatttgcaacagctacagtctaaaattgcttctttaccaaggatatttacagaaaagactctgaccagagatcgagaccatcctagccaacatcgtgaaaccccatctctactaaaaatacaaaaa

SEQ ID NO: 109709 - DNA, 2109 bp, Artificial Sequence
  derived and/or modified sequence
atggagagccccagcgcccccccccacagatggtgcatcccctggcagagactgctgctgaccgccagcctgctgaccttctggaacccccccaccaccgccaagctgaccatcgagagcacccccttcaacgtggccgagggcaaggaggtgctgctgctggtgcacaacctgccccagcacctgttcggctacagctggtacaagggcgagagagtggacggcaacagacagatcatcggctacgtgatcggcacccagcaggccacccccggccccgcctacagcggcagagagatcatctaccccaacgccagcctgctgatccagaacatcatccagaacgacaccggcttctacaccctgcacgtgatcaagagcgacctggtgaacgaggaggccaccggccagttcagagtgtaccccgagctgcccaagcccagcatcagcagcaacaacagcaagcccgtggaggacaaggacgccgtggccttcacctgcgagcccgagacccaggacgccacctacctgtggtgggtgaacaaccagagcctgcccgtgagccccagactgcagctgagcaacggcaacagaaccctgaccctgttcaacgtgaccagaaacgacaccgccagctacaagtgcgagacccagaaccccgtgagcgccagaagaagcgacagcgtgatcctgaacgtgctgtacggccccgacgcccccaccatcagccccctgaacaccagctacagaagcggcgagaacctgaacctgagctgccacgccgccagcaacccccccgcccagtacagctggttcgtgaacggcaccttccagcagagcacccaggagctgttcatccccaacatcaccgtgaacaacagcggcagctacacctgccaggcccacaacagcgacaccggcctgaacagaaccaccgtgaccaccatcaccgtgtacgccgagccccccaagcccttcatcaccagcaacaacagcaaccccgtggaggacgaggacgccgtggccctgacctgcgagcccgagatccagaacaccacctacctgtggtgggtgaacaaccagagcctgcccgtgagccccagactgcagctgagcaacgacaacagaaccctgaccctgctgagcgtgaccagaaacgacgtgggcccctacgagtgcggcatccagaacaagctgagcgtggaccacagcgaccccgtgatcctgaacgtgctgtacggccccgacgaccccaccatcagccccagctacacctactacagacccggcgtgaacctgagcctgagctgccacgccgccagcaacccccccgcccagtacagctggctgatcgacggcaacatccagcagcacacccaggagctgttcatcagcaacatcaccgagaagaacagcggcctgtacacctgccaggccaacaacagcgccagcggccacagcagaaccaccgtgaagaccatcaccgtgagcgccgagctgcccaagcccagcatcagcagcaacaacagcaagcccgtggaggacaaggacgccgtggccttcacctgcgagcccgaggcccagaacaccacctacctgtggtgggtgaacggccagagcctgcccgtgagccccagactgcagctgagcaacggcaacagaaccctgaccctgttcaacgtgaccagaaacgacgccagagcctacgtgtgcggcatccagaacagcgtgagcgccaacagaagcgaccccgtgaccctggacgtgctgtacggccccgacacccccatcatcagcccccccgacagcagctacctgagcggcgccaacctgaacctgagctgccacagcgccagcaaccccagcccccagtacagctggagaatcaacggcatcccccagcagcacacccaggtgctgttcatcgccaagatcacccccaacaacaacggcacctacgcctgcttcgtgagcaacctggccaccggcagaaacaacagcatcgtgaagagcatcaccgtgagcgccagcggcaccagccccggcctgagcgccggcgccaccgtgggcatcatgatcggcgtgctggtgggcgtggccctgatctag

SEQ ID NO: 109710 - DNA, 2109 bp, Artificial Sequence
  derived and/or modified sequence
atggagagcccatccgccccccctcatcggtggtgcatcccttggcaacgtctgcttctcaccgcgtcccttctgaccttctggaatccaccgactacagctaagctcacaatcgagtctacacccttcaacgtggccgagggtaaagaagtgttattgctggttcacaatctgcctcagcatttatttggctactcttggtataaaggggagcgggtcgacgggaacaggcagattattggatacgtaatcggaactcaacaggccacacctgggcccgcgtattcaggtcgagaaattatttaccccaatgcgtctctgcttattcagaacattattcagaacgataccggattctacactctgcacgtaatcaaatctgatctggtgaacgaggaagcgacgggacaattcagagtgtacccagagctaccgaaaccatcaatctcttccaataacagtaagcctgttgaagataaggacgcggtggcatttacctgtgaacctgagacccaagacgccacctatctgtggtgggtgaataatcagagcctgccggttagtccacggctgcagctctccaacggaaaccgcactcttacactttttaacgtcacgaggaatgatactgcctcctacaagtgcgagacccagaacccagtgtccgctcgtaggtccgacagtgtgattctaaacgtactctatggccccgacgcacccacaatcagtcctttgaatacatcctatcgttccggtgagaacctgaacctctcatgtcatgctgcaagcaatcctccagctcagtactcctggttcgtcaacggcacgttccagcagtctactcaggagttgttcatcccaaatatcacggttaacaattcgggctcttatacctgtcaagcccacaattcagatacgggccttaatcgcaccactgtgactactataacagtgtatgcagagccaccaaaaccgttcataacgagcaataattccaaccccgttgaagacgaagatgccgtagctctgacctgcgagcccgagatccaaaacacaacatacctatggtgggtgaacaaccagtcactacctgtttcaccccgcctgcaactctcgaacgacaatagaacattaactttgctgtcagtgacccgaaatgacgttgggccgtacgaatgtgggatccagaacaagctatctgtggatcactcagaccccgtaattcttaatgtcctttacggtcctgatgaccccacaatcagccctagttacacttattaccggccaggggtgaatctcagtttatcttgccatgcggctagcaatcctcctgcccagtactcatggttaattgacggcaacatccagcagcacactcaagagctgttcatcagcaatattaccgagaagaactcaggcttgtatacctgccaggccaataacagtgctagcggacactctaggaccaccgtgaaaaccatcacggttagtgctgagcttccaaagccatcaatcagtagcaacaatagcaagcccgtggaggacaaagatgcggtcgcctttacctgcgaacccgaggcccagaacaccacctatctgtggtgggtcaacggacaatccctaccggtgtccccgcgattgcaactgtcaaatgggaaccgcactttaactttgtttaatgtgaccagaaatgatgccagagcttatgtgtgtggcatacaaaatagcgttagcgcaaacaggtctgatcctgtgacacttgacgtcctttacggcccagatactcccatcatctctccacctgactcgtcatatctgtccggagccaacctgaacttgagctgtcattccgcatcgaatcccagtccacaatatagctggaggattaatgggatccctcagcagcacactcaagtgctctttatcgctaagataacccctaacaataatggaacctacgcctgtttcgtgtcaaatctcgctacaggacgtaataactcaatagtcaaaagtatcactgtcagcgccagtggaacctcccccggtctgagcgctggggctacggtggggattatgatcggagttctcgtcggagtggccctgatctag

SEQ ID NO: 109711 - DNA, 2109 bp, Artificial Sequence
  derived and/or modified sequence
atggagagccccagcgcccccccccaccggtggtgcatcccctggcagaggttactgctcactgcgagcctgctaaccttctggaacccacctaccaccgcgaagttgacaatcgaatctacaccctttaacgttgcggagggcaaggaggtcctgctccttgtgcacaatctcccacaacatctattcggatactcctggtacaagggtgagagggttgatggcaaccgccagatcattggatacgtgatcggcacccagcaggccaccccgggtcctgcatacagtgggagagaaatcatctaccccaatgctagcctgcttatccaaaacatcattcagaatgataccggattctataccttgcacgtaattaagtcggacctggtaaatgaggaggcgaccggccagttccgtgtctatcctgagcttcctaagcccagtatctctagcaataacagtaagcccgtcgaagacaaagacgcagtggcttttacttgcgaaccagaaacccaagatgccacttacctgtggtgggtgaacaaccagtccctgcctgtctcccctagactgcagctaagcaacggaaataggaccctgacgcttttcaatgtcactaggaatgataccgcctcttataagtgtgagacccagaatcctgtctctgcacgtagatccgattccgtgatcctaaatgtcctgtacggaccagatgccccgacaataagcccccttaacaccagttatcgctcaggcgaaaatctcaacctgagttgtcacgccgcaagcaacccacctgctcagtattcctggtttgtcaacggcacatttcagcaaagcactcaagaactcttcattcctaatataaccgttaataactcagggtcctacacctgtcaggcgcacaattctgacacgggattgaacagaaccacggtgactactattacggtgtatgccgaaccacctaagccttttatcacgtcaaataatagcaaccccgtcgaggatgaggatgcagtggccctcacttgcgaacctgagattcaaaacacaacttacctgtggtgggtgaacaaccaatctcttccagtgtcacccaggttacagctctccaacgataatcgaactctcacccttcttagcgtcacccggaacgatgtcggtccctacgagtgcggcatccagaacaagctcagcgttgaccactcagaccctgtaatcctaaatgttttgtacggacctgacgacccaaccatctcaccctcctacacgtattacaggcccggagtaaatctgtcactaagctgtcacgccgcttccaatcccccagcccaatatagttggctgatcgatgggaacatacagcagcacacccaagaactgtttatatccaacattaccgaaaaaaattcagggctatacacatgccaggcaaataatagcgcatccggacattcacggaccaccgttaagactatcacagtgagtgccgaacttccgaaaccttcaatttcatctaacaactcaaagccggttgaggataaggacgctgtggccttcacatgtgagcctgaggctcagaacactacctatctgtggtgggttaacggccagtccctcccggtgagccctcggctgcaactcagcaacggtaatagaacactgaccttgttcaacgtgacccgcaacgatgctcgggcttacgtttgcggcatacagaattccgtgagtgcgaatcgcagcgatcccgttaccctcgatgtgctgtacgggccggacacaccaattatctcaccccccgattcgagctacctgtccggtgccaacttgaatttgtcatgtcattctgcgtccaacccttctccccagtattcctggaggattaatggcatcccccagcagcacacacaggtgctcttcatcgccaagatcacccccaataataacggcacttatgcatgctttgtgagtaacctagcgacaggcagaaataatagtattgtgaaatccataacagtttccgcttctggtacatcgcccggcctgagtgctggggcaaccgtaggtatcatgataggtgtgctggtgggagttgcattgatttag

SEQ ID NO: 109712 - DNA, 2109 bp, Artificial Sequence
  derived and/or modified sequence
atggagtccccatccgcgcctccgcatcgctggtgcatcccttggcagcgtctcttgctgactgcatctcttctgactttttggaacccaccgacaactgcaaaattgacgatcgagtccaccccgttcaatgtggcggagggtaaagaggtgttactccttgtgcacaatctgccccagcacctcttcggctacagctggtacaaaggagagagagtcgatggtaaccgccagataatcgggtacgtcattggtactcaacaagcgactcccggtccagcctatagtggcagggaaattatctaccccaacgcatccttgctcattcagaatatcatccagaacgatacaggcttctacacccttcatgtaattaaaagcgatctggtcaacgaggaggccaccgggcagtttcgagtttatcccgagctccctaagccctcgatatccagtaataactcgaagccggtcgaagataaggacgccgtagcgttcacttgtgaacccgaaacgcaagacgctacctacctttggtgggttaataatcaatctcttcctgtcagccccagactacagctctcaaacggcaacagaaccctaacgctgtttaatgtgactcggaatgacaccgcaagctacaagtgtgaaacgcagaaccccgtctcggccagacggagcgattctgtgatcctgaacgtgctgtatggcccagacgccccaacgatcagccctttgaacactagctatcgatcaggtgagaatctcaatctgagctgtcacgccgcatccaatcctcctgcacagtactcttggtttgtcaacggcactttccagcagtccacgcaggaactgtttattccgaatattaccgtgaacaacagcggcagctacacatgtcaagcccataactcggacacagggctgaaccggacaaccgtgaccactatcaccgtatatgcagagccgcctaaaccatttattacatctaataacagcaatcccgtggaggacgaggacgcagtagccctcacgtgtgaacctgaaattcaaaacaccacctacctgtggtgggtgaataatcaatcactgccagtgtcccctaggctccagctctctaatgacaatcggaccttgaccctcctgagtgtgacccggaatgacgtcggtccgtacgagtgtgggattcagaataagttgagcgttgaccattccgaccctgtaattctgaatgtgctttatggccctgacgacccgacgatctcccccagctatacatattatcgccctggcgtgaacttatctctgagttgccatgccgctagcaatcctcctgcacagtactcttggcttatagatggaaatatccagcagcatacacaggagctgttcatctctaatatcaccgaaaaaaatagtggcttatatacatgtcaggccaacaactccgcatccggccacagtcgtactaccgtgaagacgatcacagtgtccgccgagctgccgaagccctcgatttcatccaataacagtaagccggtggaagataaagacgctgtggcttttacctgcgagcccgaagcccagaacactacctatctgtggtgggtgaatggtcaaagcctcccggtgtcgccgagactgcagctgagcaatgggaatcgtacactgacactgttcaacgtgactcgtaacgatgccagggcgtacgtgtgtggcattcaaaattccgtctccgctaatcgcagcgaccccgtgacattggacgtgctgtacggcccagacacccctattatcagtcctccagattcctcctatttgtccggagccaatttgaacctctcctgtcacagtgctagcaacccgtccccgcagtattcatggcggataaacggcatccctcagcagcatacgcaggtgttgtttattgctaaaatcactcccaacaacaacgggacctatgcatgctttgtgtctaacttggctaccggcagaaataattctatcgtcaagagtattacagtgagcgcttctggcactagccctgggctgagtgcaggagccactgtgggcattatgatcggcgtgctggtgggagtagcacttatatag

SEQ ID NO: 109713 - protein, 265 aa, Artificial Sequence
  derived and/or modified sequence
MGSPSACPYRVCIPWQGLLLTASLLTFWNLPNSAQTNIDVVPFNVAEGKEVLLVVHNESQNLYGYNWYKGERVHANYRIIGYVKNISQENAPGPAHNGRETIYPNGTLLIQNVTHNDAGFYTLHVIKENLVNEEVTRQFYVFSEPPKPSITSNNFNPVENKDIVVLTCQPETQNTTYLWWVNNQSLLVSPRLLLSTDNRTLVLLSATKNDIGPYECEIQNPVGASRSDPVTLNVRYESVQASSPDLSAGTAVSIMIGVLAGMALI

SEQ ID NO: 109714 - protein, 172 aa, Artificial Sequence [sequence omitted]

SEQ ID NO: 109715 - protein, 244 aa, Artificial Sequence
  derived and/or modified sequence
MGSPSACPYRVCIPWQGLLLTASLLTFWNLPNSAQTNIDVVPFNVAEGKEVLLVVHNESQNLYGYNWYKGERVHANGRETIYPNGTLLIQNVTHNDAGFYTLHVIKENLVNEEVTRQFYVFSEPPKPSITSNNFNPVENKDIVVLTCQPETQNTTYLWWVNNQSLLVSPRLLLSTDNRTLVLLSATKNDIGPYECEIQNPVGASRSDPVTLNVRYESVQASSPDLSAGTAVSIMIGVLAGMALI

SEQ ID NO: 109716 - DNA, 798 bp, Artificial Sequence
  derived and/or modified sequence
atgggcagccccagcgcctgcccctacagagtgtgcatcccctggcagggcctgctgctgaccgccagcctgctgaccttctggaacctgcccaacagcgcccagaccaacatcgacgtggtgcccttcaacgtggccgagggcaaggaggtgctgctggtggtgcacaacgagagccagaacctgtacggctacaactggtacaagggcgagagagtgcacgccaactacagaatcatcggctacgtgaagaacatcagccaggagaacgcccccggccccgcccacaacggcagagagaccatctaccccaacggcaccctgctgatccagaacgtgacccacaacgacgccggcttctacaccctgcacgtgatcaaggagaacctggtgaacgaggaggtgaccagacagttctacgtgttcagcgagccccccaagcccagcatcaccagcaacaacttcaaccccgtggagaacaaggacatcgtggtgctgacctgccagcccgagacccagaacaccacctacctgtggtgggtgaacaaccagagcctgctggtgagccccagactgctgctgagcaccgacaacagaaccctggtgctgctgagcgccaccaagaacgacatcggcccctacgagtgcgagatccagaaccccgtgggcgccagcagaagcgaccccgtgaccctgaacgtgagatacgagagcgtgcaggccagcagccccgacctgagcgccggcaccgccgtgagcatcatgatcggcgtgctggccggcatggccctgatctag

SEQ ID NO: 109717 - DNA, 519 bp, Artificial Sequence
  derived and/or modified sequence
atgggcagccccagcgcctgcccctacagagtgtgcatcccctggcagggcctgctgctgaccgccagcctgctgaccttctggaacctgcccaacagcgcccagaccaacatcgacgtggtgcccttcaacgtggccgagggcaaggaggtgctgctggtggtgcacaacgagagccagaacctgtacggctacaactggtacaagggcgagagagtgcacgccaactacagaatcatcggctacgtgaagaacatcagccaggagaacgcccccggccccgcccacaacggcagagagaccatctaccccaacggcaccctgctgatccagaacgtgacccacaacgacgccggcttctacaccctgcacgtgatcaaggagaacctggtgaacgaggaggtgaccagacagttctacgtgttctacgagagcgtgcaggccagcagccccgacctgagcgccggcaccgccgtgagcatcatgatcggcgtgctggccggcatggccctgatctag

SEQ ID NO: 109718 - DNA, 735 bp, Artificial Sequence
  derived and/or modified sequence
atgggcagccccagcgcctgcccctacagagtgtgcatcccctggcagggcctgctgctgaccgccagcctgctgaccttctggaacctgcccaacagcgcccagaccaacatcgacgtggtgcccttcaacgtggccgagggcaaggaggtgctgctggtggtgcacaacgagagccagaacctgtacggctacaactggtacaagggcgagagagtgcacgccaacggcagagagaccatctaccccaacggcaccctgctgatccagaacgtgacccacaacgacgccggcttctacaccctgcacgtgatcaaggagaacctggtgaacgaggaggtgaccagacagttctacgtgttcagcgagccccccaagcccagcatcaccagcaacaacttcaaccccgtggagaacaaggacatcgtggtgctgacctgccagcccgagacccagaacaccacctacctgtggtgggtgaacaaccagagcctgctggtgagccccagactgctgctgagcaccgacaacagaaccctggtgctgctgagcgccaccaagaacgacatcggcccctacgagtgcgagatccagaaccccgtgggcgccagcagaagcgaccccgtgaccctgaacgtgagatacgagagcgtgcaggccagcagccccgacctgagcgccggcaccgccgtgagcatcatgatcggcgtgctggccggcatggccctgatctag

SEQ ID NO: 109719 - DNA, 798 bp, Artificial Sequence
  derived and/or modified sequence
atgggatcaccctcggcctgcccctacagagtgtgtattccctggcagggactcctgctgacagcaagcctgttaactttttggaatctcccaaattccgctcagaccaatattgacgtcgttcctttcaatgtggcagaggggaaggaggtgcttttggtagtccacaatgagagtcagaacctgtacggatataattggtataagggtgagagagtgcatgccaactatcggattatcgggtacgtcaaaaacatctcacaggaaaacgcaccggggcccgctcataacggaagagagacaatctaccctaatggtacactcctgatacagaatgttactcacaatgacgccggcttctatacgcttcatgtcattaaggagaacctagtcaacgaagaggtcacgaggcagttttacgtcttttccgagcctccgaaaccctccatcacctccaataatttcaaccccgtcgagaataaagacatcgttgtcctcacatgccagcctgagactcagaacaccacatacctttggtgggtaaataaccagtctttgctggtctcccctcggctgctgctgtctaccgataacaggaccctggtgctgctctcggccaccaagaatgatattggcccctatgaatgcgaaattcagaatcccgtgggggcttcgaggtctgatcccgtgacccttaacgtgagatacgagtctgtgcaggcctcttcgcctgacttgagcgctgggaccgctgtgagcattatgatcggagtgttggccggcatggctctgatatag

SEQ ID NO: 109720 - DNA, 519 bp, Artificial Sequence
  derived and/or modified sequence
atgggatccccttcggcctgcccttatcgtgtctgcattccatggcagggcctgctcttaactgctagtttattaacgttttggaatttaccaaattcggcacagacaaacattgatgtggtaccgtttaacgttgccgagggcaaagaggtgctgcttgtggtgcataacgagtcacagaacctgtatgggtacaactggtataaaggtgagagagtgcacgccaactaccgcatcattggttacgtaaagaacatctcacaggaaaacgctccaggtccagcccataatggacgggagaccatataccccaacggcaccttgttgattcagaatgttacccacaatgatgctggcttttatactcttcacgtgatcaaggaaaacttagttaatgaggaggttaccaggcaattctatgttttctatgaatccgtccaggcaagcagccctgacctgagcgcaggcaccgccgtcagtataatgatcggagtgctcgctggaatggctctgatatag

SEQ ID NO: 109721 - DNA, 798 bp, Artificial Sequence
  derived and/or modified sequence
atgggttcaccatcagcttgtccttacagggtctgtatcccgtggcagggattgctgctaacggcctctcttctcacattttggaacctcccaaacagtgcccagactaacattgacgttgtgcccttcaacgtcgccgaaggaaaggaggttctactcgtggtccacaatgaatcgcaaaacctgtacgggtacaactggtataagggtgagagggtgcatgccaattacaggattatcggatatgtcaaaaatatcagtcaggaaaatgcaccaggtccggcacataatggccgcgagactatttatcccaacggaacgctcctgatccaaaatgtgacacataatgacgccggattctacaccctgcatgtcatcaaggagaatctggtgaatgaggaggtcacacgtcagttttatgtattcagtgagcctccaaaacctagcattacgagtaataatttcaatccagtggagaataaagatatagtcgtgctgacatgtcagccagagacacaaaataccacttatctgtggtgggtgaacaaccagtctctgttagtcagcccacgactgttactgtctaccgacaatcgcacgctggtgttgctttcagccaccaagaacgatataggaccgtatgagtgcgagatccagaacccggtgggagccagtcgcagtgaccccgttaccctgaacgtccgttacgagtctgtgcaggcgtccagtccagacctctccgcaggcacggccgttagcatcatgatcggagtgctggccggcatggcactcatctag

SEQ ID NO: 109722 - DNA, 735 bp, Artificial Sequence
  derived and/or modified sequence
atggggtcgccatcagcatgtccttaccgcgtgtgtatcccatggcagggacttctccttacagcctccctgctgaccttttggaatctgccgaatagcgcacagaccaatatagacgtggtgcccttcaacgtggctgaaggaaaggaagtgctgttggtagtgcataacgaatcccagaacttatacgggtacaactggtacaagggcgaacgcgttcacgccaacggcagggagactatctatcctaatggaactctgctgatccagaacgtcacccacaacgatgcgggcttctatactctgcacgtgatcaaggagaatctggttaatgaagaagtgacccggcagttctacgtctttagtgaaccacctaagccttcaataaccagtaacaacttcaaccctgtggagaataaagatatcgtggtactcacatgtcaaccagaaacacagaacaccacttacttatggtgggtgaacaaccaaagtctgctggtgagcccacgcctcctgctctccacagataatcgaaccctggtcctcctttcagccaccaaaaatgatattggcccatacgaatgcgaaatacagaacccagtaggggcctctaggtcagatcccgtgactcttaacgtcaggtatgagtcggtccaggcctcaagtcctgacctcagcgcgggcaccgccgtgtccattatgatcggggtgctggcaggaatggcgctgatatag

SEQ ID NO: 109723 - DNA, 798 bp, Artificial Sequence
  derived and/or modified sequence
atgggcagccccagcgcctgcccctacagagtgtgcatcccctggcagggcctgctgctgacagccagcctgctgaccttctggaacctgcccaacagcgcccagaccaacattgatgtggtgcccttcaacgtggccgagggcaaggaggtgctgctggtggtgcacaatgaaagccagaacctgtatggctacaactggtacaagggggagcgggtgcacgccaactaccgcatcatcggctacgtgaagaacatcagccaggagaatgcccctggccctgcccacaacggccgggagaccatctacccaaatggcaccctgctgatccagaatgtgacccacaatgatgctggcttctacaccctgcacgtgatcaaggagaacctggtgaatgaggaggtgacccggcagttctacgtgttttctgagccccccaagcccagcatcaccagcaacaacttcaaccctgtggagaacaaggacatcgtggtgctgacctgccagcctgagacccagaacaccacctacctgtggtgggtgaacaaccagagcctgctggtgagcccccggctgctgctgagcacagacaacagaaccctggtgctgctgagcgccaccaagaatgacatcggcccctatgaatgtgagatccagaaccctgtgggcgccagcagaagtgaccctgtgaccctgaatgtgcgctatgagagcgtgcaggccagcagcccagacctgtctgctggaacagctgtgtccatcatgattggagtgctggccggcatggccctgatctag

SEQ ID NO: 109724 - DNA, 519 bp, Artificial Sequence
  derived and/or modified sequence
atgggcagccccagcgcctgcccctacagagtgtgcatcccctggcagggcctgctgctgacagccagcctgctgaccttctggaacctgcccaacagcgcccagaccaacattgatgtggtgcccttcaacgtggccgagggcaaggaggtgctgctggtggtgcacaatgaaagccagaacctgtatggctacaactggtacaagggggagcgggtgcacgccaactaccgcatcatcggctacgtgaagaacatcagccaggagaatgcccctggccctgcccacaacggccgggagaccatctacccaaatggcaccctgctgatccagaatgtgacccacaatgatgctggcttctacaccctgcacgtgatcaaggagaacctggtgaatgaggaggtgacccggcagttctacgtgttctatgaatctgtgcaggccagcagcccagacctgtctgctggaacagctgtgtccatcatgattggagtgctggccggcatggccctgatctag

SEQ ID NO: 109725 - DNA, 735 bp, Artificial Sequence
  derived and/or modified sequence
atgggcagccccagcgcctgcccctacagagtgtgcatcccctggcagggcctgctgctgacagccagcctgctgaccttctggaacctgcccaacagcgcccagaccaacattgatgtggtgcccttcaacgtggccgagggcaaggaggtgctgctggtggtgcacaatgaaagccagaacctgtatggctacaactggtacaagggggagcgggtgcacgccaacggccgggagaccatctaccccaacggcaccctgctgatccagaatgtgacccacaatgatgctggcttctacaccctgcacgtgatcaaggagaacctggtgaatgaggaggtgacccggcagttctacgtgttcagcgagccccccaagcccagcatcaccagcaacaacttcaaccctgtggagaacaaggacatcgtggtgctgacctgccagcctgagacccagaacaccacctacctgtggtgggtgaacaaccagagcctgctggtgagcccccggctgctgctgagcacagacaacagaaccctggtgctgctgagcgccaccaagaatgacatcggcccctatgaatgtgagatccagaaccctgtgggcgccagcagaagtgaccctgtgaccctgaatgtgcgctatgaatctgtgcaggccagcagcccagacctgtctgctggaacagctgtgtccatcatgattggagtgctggccggcatggccctgatctag

SEQ ID NO: 109726 - DNA, 798 bp, Artificial Sequence
  derived and/or modified sequence
atgggcagccccagcgcctgcccctaccgggtgtgcatcccctggcagggattgcttcttacagcttcattactcactttctggaatctccctaacagtgcccagaccaacatcgatgtggtgccgtttaatgttgctgagggtaaagaggttctcctagtggtgcacaatgagtcacaaaatttgtacggctacaactggtacaaaggtgagcgggtccacgccaattaccgaataattggatacgtgaaaaacatttcccaagagaatgcgcccgggcctgcacataacggtcgcgagacaatttatccgaatgggactctgctgattcaaaatgtcactcacaacgacgctggcttttacacactccacgtcatcaaagagaacttggtgaacgaagaggtcaccaggcaattttacgtgttcagtgagcccccaaaaccaagcattactagcaacaacttcaatccagtggagaataaggacatcgtagtacttacgtgccagcctgagactcagaataccacctacttatggtgggtcaataatcagagcctactggtgagtccacggttgctactgagcacagacaaccgcaccctcgttttgctttccgcaaccaagaatgatattggcccttatgaatgtgaaatacaaaacccggtaggcgccagcaggagtgaccctgtgactttgaacgtgcgctacgaatctgtacaagcatcctctcccgacttgtccgcaggcacagccgtgtccatcatgatcggagttctggccggcatggctctgatttag

SEQ ID NO: 109727 - DNA, 519 bp, Artificial Sequence
  derived and/or modified sequence
atgggcagccccagcgcctgcccctaccgggtgtgcatcccctggcagggactacttctgacagctagcctgctgaccttctggaatctaccgaactccgctcagaccaatattgacgtcgttccatttaacgtcgcagagggaaaggaagtgctcctcgtggtgcacaatgaatcacagaacctttacggctacaactggtacaagggagaaagggtgcatgctaactatcggataataggctacgtcaaaaatattagccaggagaatgctcccggtcccgcccacaacgggagagagaccatctaccctaatggcacattgctcatacagaacgtgacgcacaatgatgccggcttttacacactccacgtcatcaaggagaacctggtgaatgaggaagtcacccggcagttttatgtcttttatgagtctgtgcaagcttcctcccctgacttgtctgccggaacagccgtgtctattatgattggagttctggctggcatggccctgatctag

SEQ ID NO: 109728 - DNA, 798 bp, Artificial Sequence
  derived and/or modified sequence
atgggcagccccagcgcctgcccctaccgggtgtgcatcccctggcaaggcttactgctgactgctagcctactgacattttggaatctccccaactccgctcagaccaatattgacgtagtgccgtttaatgtcgccgagggcaaagaggttttactcgtcgtacataacgagagtcagaacctgtacggttataattggtacaaaggggaacgagtgcacgccaattacaggattattggctacgtgaaaaacatctcccaggagaacgcccccgggccagcccataacggcagggaaaccatataccccaacggaaccctcctcattcaaaatgtgactcacaacgacgcgggcttctatactctgcacgtcatcaaggaaaatctggttaacgaagaggtcacaagacagttttacgtgttcagcgaaccccctaagccatcaatcacatccaataattttaatccagtggaaaataaggatattgttgtccttacgtgccagccagaaacgcagaacacgacttacctgtggtgggtgaacaaccagtccctcctggttagtccaaggttgttactcagtaccgataaccgcaccttagtccttctatctgcaacaaaaaatgacattgggccctatgaatgcgagatccagaatcctgtgggggctagtcggtccgatccagtgacattgaacgtgcgctacgaatctgtgcaggctagctcccctgatctctcggcagggacagctgtcagtatcatgatcggcgtccttgccggcatggccttgatctag

SEQ ID NO: 109729 - DNA, 735 bp, Artificial Sequence
  derived and/or modified sequence
atgggcagccccagcgcctgcccctaccgggtgtgcatcccctggcagggtctcctgctcaccgcgtccctgctgacattctggaatctccctaactccgcgcagaccaacatcgacgtcgttccatttaatgttgcagaaggcaaggaggtgctgctcgtcgttcacaacgaaagtcagaacttatatggctacaactggtataagggcgagagagttcacgccaacggcagagagacaatttatcctaatgggacccttctaatccagaatgtcactcacaacgacgccggcttctatacattacatgtaatcaaagagaatttggtaaatgaggaagtcactcggcagttctacgtctttagcgagccacccaagccctccattacatctaataacttcaatcccgttgagaacaaagacatcgtggtgctcacatgtcagcccgaaacacaaaacaccacctatttgtggtgggttaacaaccagtcacttctcgtgtcccctaggctgttgctgtccaccgataacagaactctcgtgctgctctccgcaacaaagaatgacattggcccttacgaatgtgagatccagaaccctgttggagccagtcgatctgaccctgtgaccctgaatgtgaggtacgagtcagtgcaggcatcctcccctgacctttccgccggaaccgcagtgtctattatgattggcgtgctagcaggcatggcactgatctag

SEQ ID NO: 109730 - DNA, 798 bp, Artificial Sequence
  derived and/or modified sequence
atgggatcccctagcgcctgcccctatcgggtttgcatcccctggcagggactgctcttgaccgcttcactgctcactttctggaatttacctaactctgctcaaacaaatatcgatgtggttccattcaatgtggctgagggcaaggaagtcctacttgtggtccacaacgagagccagaacctctacggatacaactggtacaagggagaaagggtgcacgcaaattatagaatcattggatatgtgaagaacatctcacaggagaatgcccctggcccagcccataatgggagggagactatttaccctaacgggacacttctgattcagaacgtgacgcacaacgatgctggattctacaccctgcacgtgattaaagagaatctcgttaatgaggaagtgacacgtcagttttatgtgttttctgaacccccaaagccctcaattactagtaacaatttcaaccccgtcgaaaataaagatatcgtcgtcctcacctgccagccagagacccagaacactacctatctgtggtgggtgaacaaccagtccctactcgtgtcccccagactgttattatctaccgacaacagaactttagtgctcctgagtgccacaaagaacgatatcgggccttacgaatgcgaaatccagaacccagtgggagcttcccggagtgacccagttaccttaaatgtgaggtacgagtccgttcaagcctcttctcctgatctgtccgccggaacagcggtctcaataatgataggcgtgctcgccggaatggccctgatttag

SEQ ID NO: 109731 - DNA, 519 bp, Artificial Sequence
  derived and/or modified sequence
atgggcagccccagcgcgtgtccctatcgtgtgtgcatcccctggcagggccttctcctgaccgcctctctgctgactttctggaatttacccaacagtgcacagacaaatattgacgtcgtacccttcaacgtggctgaagggaaggaggtcctgctcgtcgtacacaacgaaagtcagaacttgtatggctacaactggtataagggagagagagtgcatgctaattatagaatcattggctatgtcaagaacataagccaagaaaatgctccaggccctgcccacaacggtcgggaaacaatctacccaaatggaactctcctgattcagaatgtgacacataatgacgcaggattttacaccctgcacgtcataaaggagaacctcgttaacgaggaagtgactcgccagttctacgtgttctacgagtccgtccaagcctcaagtccagatctctccgcaggcactgcagtgtcgatcatgatcggggtcctggcaggaatggccctcatctag

SEQ ID NO: 109732 - DNA, 798 bp, Artificial Sequence
  derived and/or modified sequence
atgggttctccctccgcatgcccctatagagtgtgcatcccatggcagggtctgttgctgaccgctagtctgctgaccttctggaaccttccaaactctgcgcagacaaacatcgacgttgttccattcaacgtcgccgaggggaaggaagtgctgttggtggtgcacaatgagagtcagaacctgtatggctataattggtacaagggtgagcgggtacatgccaattacaggatcatcggctatgtgaaaaatattagtcaggaaaatgcgccagggcctgcccacaatggacgtgaaacgatttatcccaacggaacactccttatccaaaacgtgacccacaacgatgccggattttacacgttgcatgttatcaaagagaatcttgtcaacgaagaagtgacacgccagttttatgtgtttagcgaaccccctaagccttctattacatccaacaactttaatcccgtggaaaataaagacatcgttgtgctgacatgtcaacccgagactcagaacacaacttacctgtggtgggttaataaccaatctctccttgtttcaccacgactcctgctgtccacagataacagaacacttgtgctgctgtccgctaccaaaaatgatatcggtccttacgaatgtgagatacagaatcctgtaggggcttcccggagtgaccccgtcaccctgaacgtacgctacgagagcgttcaagcctccagccccgacttgtcggctgggactgccgtgtccatcatgatcggcgttctcgccggaatggctctcatttag

SEQ ID NO: 109733 - DNA, 735 bp, Artificial Sequence
  derived and/or modified sequence
atgggaagcccttctgcatgcccataccgggtgtgcattccatggcaggggttgctgctgaccgcaagcttgctcaccttttggaaccttccaaactctgcacagacaaacatcgatgtggtgcctttcaacgtggcagagggaaaggaggtcctacttgtagttcacaacgagagccagaacctatatggatataattggtataaaggcgagagggtccatgctaacggacgggagacaatatacccgaacggtacgctgctaattcagaacgttacacacaacgacgcgggattttacactctacacgtgatcaaagaaaatcttgtgaatgaagaagttacaagacagttctacgtgtttagcgaaccgccaaaaccgtccattacctccaacaactttaaccctgtagaaaataaggacatcgtggtgttgacttgccagccggaaacacaaaatacaacatacctgtggtgggtgaataaccagtcattgctggtatcccccagactcttgcttagtactgataatcggacactcgttttgctgagcgctacgaaaaacgacatcgggccttatgagtgtgaaattcagaaccccgtcggggctagtagaagtgatcctgtgactcttaacgtaaggtatgaatctgtgcaggctagttctccagacctgtccgcaggaacagctgtgtcaattatgatcggagtgctggccggaatggccctcatatag

SEQ ID NO: 109734 - DNA, 798 bp, Artificial Sequence
  derived and/or modified sequence
atgggttccccatccgcctgcccctaccgagtatgcatcccctggcagggtcttctcttgactgcttcgcttctgacattttggaacctgcccaactcagcacagactaatattgacgtggtgccttttaatgtagctgaaggaaaggaggttttgctggtggtccacaatgaatctcagaacttatacggctacaattggtacaaaggagaacgggtgcacgccaactatcggattattgggtatgtgaagaacatctcccaggaaaatgctccagggcccgcacacaatggcagagaaaccatctatcccaatggtacactgcttatccaaaatgtaacacataacgacgctggtttctacacactccacgtaattaaagagaatctcgtcaatgaggaggtgactagacaattttacgtgttcagcgaacctccaaagccaagtattacatccaacaactttaaccccgtcgagaacaaagacattgtcgttctcacttgtcagcccgaaacccagaacaccacctacctgtggtgggtgaataaccagtcactcctcgtcagtcctaggctgctgttatccaccgacaaccgtaccctggtcctcttgtctgccactaagaatgacatcggcccttatgagtgcgaaatccaaaacccggtgggcgcatcacgctcagacccagtcacacttaatgtgcgatatgagtcagtccaagcgagttccccagacctgtcggccggcactgccgtcagcataatgattggagtcttagctggtatggctctgatctag

SEQ ID NO: 109735 - DNA, 798 bp, Artificial Sequence
  derived and/or modified sequence
atgggctcaccatccgcttgcccatacagagtttgtataccctggcaaggactgttgctaacagcctctcttttgaccttttggaacctacctaacagcgcccagactaatatagatgttgtcccctttaatgtagcggaagggaaggaggttttgctggtggtgcacaatgagagccagaacttgtacgggtataactggtataaaggggagagagtccacgcgaattacaggataataggatatgtcaagaatatctcacaagagaatgccccgggacctgctcacaatggccgcgagactatttaccccaacgggaccctccttatccagaacgtgactcataacgacgctggcttctatactttacatgtcattaaggaaaaccttgtgaatgaagaggtgaccaggcaattttatgtgttctcagaacctcctaagccaagtatcacttccaataattttaatccggtggagaataaagacattgtcgtgctaacttgccagcctgaaacgcagaacaccacatacctatggtgggtcaacaaccagagcctccttgtgagcccccgactattactgagcacagacaacaggaccttggttttactgagcgcaacaaaaaatgatataggcccatacgagtgtgaaatccagaatcccgtcggtgcctccagaagcgatccagtgacacttaacgttagatacgagtcagtgcaggcctcctccccggatctcagcgcaggtactgctgtctccatcatgattggagtcctcgctggtatggccttaatctag

SEQ ID NO: 109736 - DNA, 2489 bp, Artificial Sequence
  derived and/or modified sequence
gaatgagaggggaggggacagaggactcctgagcagagaccccacccctggaccatgtgatcttggaaagtgctcctgccctgggaggaggctcagcacagaggtaggaaggacagcagagctgacagtcacagcagccctgacaagagagttcctggagcccaagctcttctccacagaggacaagcaggcagcagagaccatggggtccccttcagcctgtccatacagagtgtgcattccctggcaggggctcctgctcacagcctcgcttttaaccttctggaacctgccaaacagtgcccagaccaatattgatgtcgtgccgttcaatgtcgcagaagggaaggaggtccttctagtagtccataatgagtcccagaatctttatggctacaactggtacaaaggggaaagggtgcatgccaactatcgaattataggatatgtaaaaaatataagtcaagaaaatgccccagggcccgcacacaacggtcgagagacaatataccccaatggaaccctgctgatccagaacgtcacccacaatgacgcaggattctataccctacacgttataaaagaaaatcttgtgaatgaagaagtaaccagacaattctacgtattctcggagccacccaagccctccatcaccagcaacaacttcaatccggtggagaacaaagatattgtggttttaacctgtcaacctgagactcagaacacaacctacctgtggtgggtaaacaatcagagcctcctggtcagtcccaggctgctgctctccactgacaacaggaccctcgttctactcagcgccacaaagaatgacataggaccctatgaatgtgaaatacagaacccagtgggtgccagccgcagtgacccagtcaccctgaatgtccgctatgagtcagtacaagcaagttcacctgacctctcagctgggaccgctgtcagcatcatgattggagtactggctgggatggctctgatatagcagccttggtgtagtttctgcatttcgggaagagtgtttttattatccacctgcagactggactggattcttctagctccttcaatcccattttctcctgtggcatcactaagtataagacctgctctcttcctgaagacctataagctggaggtggacaactcaatgtaaatttcaaggaaaaaccctcatgcctgagatgtgggccactcagagctaaccaaaatgttcaacaccataactagagacactcaaattgccaaccaggacaagaagttgatgacttcatgctgtggacagtttttcccaagatgtcccaagcctcatcgtgacgaggctcttatcccactccatttttccctgctcatgcctgcctctttaatttggtaagataatgctgtaactagaatttcacaatcagcgccttgtgcaggtaatttgacagagtgttggatgtgtcatgtcatcatgtcaaacccaaatatttgacctaagggatcctttattctgcccagtggctaactttaacaacatccctaatacaactgtttattcaaatgcacggtggtccctgttagagttagacctctagactcacctgttctcacgccctgttttaatttaacccagctatgggatgccagataacagaattgctgcctactagctgaacagggaggagtttgtgcagttgctgacacttcttgttgcacataaataaatacagtgggtactatagagactcagttgcaaaaattaacaaatatgctgcttgattaaaatgggtaggcttctcatgtggctcattctttaatctattctcttttatttggtttggttcatggggtctctgcctatggatcatacttcaaactcttggtgtgatcctcctgattgtcacaatattagttaccctggtgtgctgtattctctaaaacctttaaatgtttgcatgcagccattcgtcaaatgtcaaatattctctctttggctggaatgacaaaaactcaaataaatgtatgattaggaggacatcataacctatgaatgatggaagtccaaaatgatggtaactgacagtagtgttaatgccttatgtttagtcaaactctcatttaggtgacagcctggtgactccagaatggagccagtcatgctaaatgccatatactcacactgaaacatgaggaagcaggtagatcccagaacagacaaaattttcctaaaaacatgagagtccaggctgtctgagtcagcacagtaagaaagtcctttctgctttaactcttagaaaaaagtaatatgaagtattctgaaattaaccaatcagtttatttaaatcaatttatttatattcttctgttcctggattcccattttacaaaacccactgttctactgttgtattgcccagtaggagctatcactatattttgcagaatggaaactgccctgactcatgaatcacaaataaaagccaattgtatct

SEQ ID NO: 109737 - DNA, 957 bp, Artificial Sequence
  derived and/or modified sequence
acagaggtaggaaggacagcagagctgacagtcacagcagccctgacaagagagttcctggagcccaagctcttctccacagaggacaagcaggcagcagagaccatggggtccccttcagcctgtccatacagagtgtgcattccctggcaggggctcctgctcacagcctcgcttttaaccttctggaacctgccaaacagtgcccagaccaatattgatgtcgtgccgttcaatgtcgcagaagggaaggaggtccttctagtagtccataatgagtcccagaatctttatggctacaactggtacaaaggggaaagggtgcatgccaactatcgaattataggatatgtaaaaaatataagtcaagaaaatgccccagggcccgcacacaacggtcgagagacaatataccccaatggaaccctgctgatccagaacgtcacccacaatgacgcaggattctataccctacacgttataaaagaaaatcttgtgaatgaagaagtaaccagacaattctacgtattctatgagtcagtacaagcaagttcacctgacctctcagctgggaccgctgtcagcatcatgattggagtactggctgggatggctctgatatagcagccttggtgtagtttctgcatttcgggaagagtgactggactggattcttctagctccttcaatcccattttctcctgtggcatcactaagtataagacctgctctcttcctgaagacctataagctggaggtggacaactcaatgtaaatttcaaggaaaaaccctcatgcctgagatgtgggccactcagagctaaccaaaatgttcaacaccataactagagacactcaaattgccaaccaggacaagaagttgatgacttcatgctgtggacagtttttcccaagatgtcccaagcctcatcgtgacgaggctcttatcccactcca

SEQ ID NO: 109738 - DNA, 1236 bp, Artificial Sequence
  derived and/or modified sequence
acagaggtaggaaggacagcagagctgacagtcacagcagccctgacaagagagttcctggagcccaagctcttctccacagaggacaagcaggcagcagagaccatggggtccccttcagcctgtccatacagagtgtgcattccctggcaggggctcctgctcacagcctcgcttttaaccttctggaacctgccaaacagtgcccagaccaatattgatgtcgtgccgttcaatgtcgcagaagggaaggaggtccttctagtagtccataatgagtcccagaatctttatggctacaactggtacaaaggggaaagggtgcatgccaactatcgaattataggatatgtaaaaaatataagtcaagaaaatgccccagggcccgcacacaacggtcgagagacaatataccccaatggaaccctgctgatccagaacgtcacccacaatgacgcaggattctataccctacacgttataaaagaaaatcttgtgaatgaagaagtaaccagacaattctacgtattctcggagccacccaagccctccatcaccagcaacaacttcaatccggtggagaacaaagatattgtggttttaacctgtcaacctgagactcagaacacaacctacctgtggtgggtaaacaatcagagcctcctggtcagtcccaggctgctgctctccactgacaacaggaccctcgttctactcagcgccacaaagaatgacataggaccctatgaatgtgaaatacagaacccagtgggtgccagccgcagtgacccagtcaccctgaatgtccgctatgagtcagtacaagcaagttcacctgacctctcagctgggaccgctgtcagcatcatgattggagtactggctgggatggctctgatatagcagccttggtgtagtttctgcatttcgggaagagtgactggactggattcttctagctccttcaatcccattttctcctgtggcatcactaagtataagacctgctctcttcctgaagacctataagctggaggtggacaactcaatgtaaatttcaaggaaaaaccctcatgcctgagatgtgggccactcagagctaaccaaaatgttcaacaccataactagagacactcaaattgccaaccaggacaagaagttgatgacttcatgctgtggacagtttttcccaagatgtcccaagcctcatcgtgacgaggctcttatcccactcca

SEQ ID NO: 109739 - DNA, 1374 bp, Artificial Sequence
  derived and/or modified sequence
acagaggtaggaaggacagcagagctgacagtcacagcagccctgacaagagagttcctggagcccaagctcttctccacagaggacaagcaggcagcagagaccatggggtccccttcagcctgtccatacagagtgtgcattccctggcaggggctcctgctcacagcctcgcttttaaccttctggaacctgccaaacagtgcccagaccaatattgatgtcgtgccgttcaatgtcgcagaagggaaggaggtccttctagtagtccataatgagtcccagaatctttatggctacaactggtacaaaggggaaagggtgcatgccaacggtcgagagacaatataccccaatggaaccctgctgatccagaacgtcacccacaatgacgcaggattctataccctacacgttataaaagaaaatcttgtgaatgaagaagtaaccagacaattctacgtattctcggagccacccaagccctccatcaccagcaacaacttcaatccggtggagaacaaagatattgtggttttaacctgtcaacctgagactcagaacacaacctacctgtggtgggtaaacaatcagagcctcctggtcagtcccaggctgctgctctccactgacaacaggaccctcgttctactcagcgccacaaagaatgacataggaccctatgaatgtgaaatacagaacccagtgggtgccagccgcagtgacccagtcaccctgaatgtccgctatgagtcagtacaagcaagttcacctgacctctcagctgggaccgctgtcagcatcatgattggagtactggctgggatggctctgatatagcagccttggtgtagtttctgcatttcgggaagagtgactggactggattcttctagctccttcaatcccattttctcctgtggcatcactaagtataagacctgctctcttcctgaagacctataagctggaggtggacaactcaatgtaaatttcaaggaaaaaccctcatgcctgagatgtgggccactcagagctaaccaaaatgttcaacaccataactagagacactcaaattgccaaccaggacaagaagttgatgacttcatgctgtggacagtttttcccaagatgtcccaagcctcatcgtgacgaggctcttatcccactccatttttccctgctcatgcctgcctctttaatttggtaagataatgctgtaactagaatttcacaatcagcgccttgtgcaggtaatttgacagagtgttggatgtgtcatgtcatcatgtcaaacccaaatatttgacctaagggatcctttattctgcccagtggctaactttaacaacatccctaatacaactgtttatt

SEQ ID NO: 109740 - RNA, 798 nt, Artificial Sequence
  derived and/or modified sequence
auggguuccccauccgccugccccuaccgaguaugcauccccuggcagggucuucucuugacugcuucgcuucugacauuuuggaaccugcccaacucagcacagacuaauauugacguggugccuuuuaauguagcugaaggaaaggagguuuugcuggugguccacaaugaaucucagaacuuauacggcuacaauugguacaaaggagaacgggugcacgccaacuaucggauuauuggguaugugaagaacaucucccaggaaaaugcuccagggcccgcacacaauggcagagaaaccaucuaucccaaugguacacugcuuauccaaaauguaacacauaacgacgcugguuucuacacacuccacguaauuaaagagaaucucgucaaugaggaggugacuagacaauuuuacguguucagcgaaccuccaaagccaaguauuacauccaacaacuuuaaccccgucgagaacaaagacauugucguucucacuugucagcccgaaacccagaacaccaccuaccuguggugggugaauaaccagucacuccucgucaguccuaggcugcuguuauccaccgacaaccguacccugguccucuugucugccacuaagaaugacaucggcccuuaugagugcgaaauccaaaacccggugggcgcaucacgcucagacccagucacacuuaaugugcgauaugagucaguccaagcgaguuccccagaccugucggccggcacugccgucagcauaaugauuggagucuuagcugguauggcucugaucuag

SEQ ID NO: 109741 - RNA, 798 nt, Artificial Sequence
  derived and/or modified sequence
augggcucaccauccgcuugcccauacagaguuuguauacccuggcaaggacuguugcuaacagccucucuuuugaccuuuuggaaccuaccuaacagcgcccagacuaauauagauguuguccccuuuaauguagcggaagggaaggagguuuugcugguggugcacaaugagagccagaacuuguacggguauaacugguauaaaggggagagaguccacgcgaauuacaggauaauaggauaugucaagaauaucucacaagagaaugccccgggaccugcucacaauggccgcgagacuauuuaccccaacgggacccuccuuauccagaacgugacucauaacgacgcuggcuucuauacuuuacaugucauuaaggaaaaccuugugaaugaagaggugaccaggcaauuuuauguguucucagaaccuccuaagccaaguaucacuuccaauaauuuuaauccgguggagaauaaagacauugucgugcuaacuugccagccugaaacgcagaacaccacauaccuauggugggucaacaaccagagccuccuugugagcccccgacuauuacugagcacagacaacaggaccuugguuuuacugagcgcaacaaaaaaugauauaggcccauacgagugugaaauccagaaucccgucggugccuccagaagcgauccagugacacuuaacguuagauacgagucagugcaggccuccuccccggaucucagcgcagguacugcugucuccaucaugauuggaguccucgcugguauggccuuaaucuag

SEQ ID NO: 109742 - protein, 1048 aa, Artificial Sequence
  derived and/or modified sequence
MSPGASRGPRGSQAPLIAPLCCAAAALGMLLWSPACQAFNLDVEKLTVYSGPKGSYFGYAVDFHIPDARTASVLVGAPKANTSQPDIVEGGAVYYCPWPAEGSAQCRQIPFDTTNNRKIRVNGTKEPIEFKSNQWFGATVKAHKGKVVACAPLYHWRTLKPTPEKDPVGTCYVAIQNFSAYAEFSPCRNSNADPEGQGYCQAGFSLDFYKNGDLIVGGPGSFYWQGQVITASVADIIANYSFKDILRKLAGEKQTEVAPASYDDSYLELVAGIPRGAQNFGYVSIINSTDMTFIQNFTGEQMASYFGYTVVVSDVNSDGLDDVLVGAPLFMEREFESNPREVGQIYLYLQVSSLLFRDPQILTGTETFGRFGSAMAHLGDLNQDGYNDIAIGVPFAGKDQRGKVLIYNGNKDGLNTKPSQVLQGVWASHAVPSGFGFTLRGDSDIDKNDYPDLIVGAFGTGKVAVYRARPVVTVDAQLLLHPMIINLENKTCQVPDSMTSAACFSLRVCASVTGQSIANTIVLMAEVQLDSLKQKGAIKRTLFLDNHQAHRVFPLVIKRQKSHQCQDFIVYLRDETEFRDKLSPINISLNYSLDESTFKEGLEVKPILNYYRENIVSEQAHILVDCGEDNLCVPDLKLSARPDKHQVIIGDENHLMLIINARNEGEGAYEAELFVMIPEEADYVGIERNNKGFRPLSCEYKMENVTRMVVCDLGNPMVSGTNYSLGLRFAVPRLEKTNMSINFDLQIRSSNKDNPDSNFVSLQINITAVAQVEIRGVSHPPQIVLPIHNWEPEEEPHKEEEVGPLVEHIYELHNIGPSTISDTILEVGWPFSARDEFLLYIFHIQTLGPLQCQPNPNINPQDIKPAASPEDTPELSAFLRNSTIPHLVRKRDVHVVEFHRQSPAKILNCTNIECLQISCAVGRLEGGESAVLKVRSRLWAHTFLQRKNDPYALASLVSFEVKKMPYTDQPAKLPEGSIVIKTSVIWATPNVSFSIPLWVIILAILLGLLVLAILTLALWKCGFFDRARPPQEDMTDREQLTNDKTPEA

SEQ ID NO: 109743 - DNA, 3147 bp, Artificial Sequence
  derived and/or modified sequence
atgagccccggcgccagcagaggccccagaggcagccaggcccccctgatcgcccccctgtgctgcgccgccgccgccctgggcatgctgctgtggagccccgcctgccaggccttcaacctggacgtggagaagctgaccgtgtacagcggccccaagggcagctacttcggctacgccgtggacttccacatccccgacgccagaaccgccagcgtgctggtgggcgcccccaaggccaacaccagccagcccgacatcgtggagggcggcgccgtgtactactgcccctggcccgccgagggcagcgcccagtgcagacagatccccttcgacaccaccaacaacagaaagatcagagtgaacggcaccaaggagcccatcgagttcaagagcaaccagtggttcggcgccaccgtgaaggcccacaagggcaaggtggtggcctgcgcccccctgtaccactggagaaccctgaagcccacccccgagaaggaccccgtgggcacctgctacgtggccatccagaacttcagcgcctacgccgagttcagcccctgcagaaacagcaacgccgaccccgagggccagggctactgccaggccggcttcagcctggacttctacaagaacggcgacctgatcgtgggcggccccggcagcttctactggcagggccaggtgatcaccgccagcgtggccgacatcatcgccaactacagcttcaaggacatcctgagaaagctggccggcgagaagcagaccgaggtggcccccgccagctacgacgacagctacctggagctggtggccggcatccccagaggcgcccagaacttcggctacgtgagcatcatcaacagcaccgacatgaccttcatccagaacttcaccggcgagcagatggccagctacttcggctacaccgtggtggtgagcgacgtgaacagcgacggcctggacgacgtgctggtgggcgcccccctgttcatggagagagagttcgagagcaaccccagagaggtgggccagatctacctgtacctgcaggtgagcagcctgctgttcagagacccccagatcctgaccggcaccgagaccttcggcagattcggcagcgccatggcccacctgggcgacctgaaccaggacggctacaacgacatcgccatcggcgtgcccttcgccggcaaggaccagagaggcaaggtgctgatctacaacggcaacaaggacggcctgaacaccaagcccagccaggtgctgcagggcgtgtgggccagccacgccgtgcccagcggcttcggcttcaccctgagaggcgacagcgacatcgacaagaacgactaccccgacctgatcgtgggcgccttcggcaccggcaaggtggccgtgtacagagccagacccgtggtgaccgtggacgcccagctgctgctgcaccccatgatcatcaacctggagaacaagacctgccaggtgcccgacagcatgaccagcgccgcctgcttcagcctgagagtgtgcgccagcgtgaccggccagagcatcgccaacaccatcgtgctgatggccgaggtgcagctggacagcctgaagcagaagggcgccatcaagagaaccctgttcctggacaaccaccaggcccacagagtgttccccctggtgatcaagagacagaagagccaccagtgccaggacttcatcgtgtacctgagagacgagaccgagttcagagacaagctgagccccatcaacatcagcctgaactacagcctggacgagagcaccttcaaggagggcctggaggtgaagcccatcctgaactactacagagagaacatcgtgagcgagcaggcccacatcctggtggactgcggcgaggacaacctgtgcgtgcccgacctgaagctgagcgccagacccgacaagcaccaggtgatcatcggcgacgagaaccacctgatgctgatcatcaacgccagaaacgagggcgagggcgcctacgaggccgagctgttcgtgatgatccccgaggaggccgactacgtgggcatcgagagaaacaacaagggcttcagacccctgagctgcgagtacaagatggagaacgtgaccagaatggtggtgtgcgacctgggcaaccccatggtgagcggcaccaactacagcctgggcctgagattcgccgtgcccagactggagaagaccaacatgagcatcaacttcgacctgcagatcagaagcagcaacaaggacaaccccgacagcaacttcgtgagcctgcagatcaacatcaccgccgtggcccaggtggagatcagaggcgtgagccaccccccccagatcgtgctgcccatccacaactgggagcccgaggaggagccccacaaggaggaggaggtgggccccctggtggagcacatctacgagctgcacaacatcggccccagcaccatcagcgacaccatcctggaggtgggctggcccttcagcgccagagacgagttcctgctgtacatcttccacatccagaccctgggccccctgcagtgccagcccaaccccaacatcaacccccaggacatcaagcccgccgccagccccgaggacacccccgagctgagcgccttcctgagaaacagcaccatcccccacctggtgagaaagagagacgtgcacgtggtggagttccacagacagagccccgccaagatcctgaactgcaccaacatcgagtgcctgcagatcagctgcgccgtgggcagactggagggcggcgagagcgccgtgctgaaggtgagaagcagactgtgggcccacaccttcctgcagagaaagaacgacccctacgccctggccagcctggtgagcttcgaggtgaagaagatgccctacaccgaccagcccgccaagctgcccgagggcagcatcgtgatcaagaccagcgtgatctgggccacccccaacgtgagcttcagcatccccctgtgggtgatcatcctggccatcctgctgggcctgctggtgctggccatcctgaccctggccctgtggaagtgcggcttcttcgacagagccagacccccccaggaggacatgaccgacagagagcagctgaccaacgacaagacccccgaggcctag

SEQ ID NO: 109744 - DNA, 3147 bp, Artificial Sequence
  derived and/or modified sequence
atgtcgcctggggctagtcgggggcctcgcggatcccaggccccactgatcgcccccctttgctgcgccgctgcagctctgggcatgcttttgtggagtcccgcatgccaggcatttaaccttgatgttgagaagctcaccgtgtactcgggcccaaaaggctcatacttcggttacgcagtggattttcatattccagatgcaagaacggctagtgtcctggtgggcgcgcccaaggcaaatactagtcagcctgacatcgtggagggtggagccgtgtactactgcccctggcctgctgagggttccgcccaatgccgtcagataccattcgacaccacgaataacagaaagatcagagtgaacggtaccaaagagcccatcgagttcaaaagcaaccagtggtttggggcaaccgtgaaggctcataagggtaaagtcgtggcatgcgcccctctgtatcattggcggaccctgaagccgactccagagaaggaccccgtgggaacttgctatgtggcaattcaaaacttttccgcatacgccgaattcagcccatgcaggaacagcaatgctgatccagagggtcagggctattgtcaggccgggttcagccttgacttctataaaaacggagacctgatcgtgggcggacctggtagcttttattggcaaggtcaggtaattactgcgagtgtggcagacattatcgcaaactatagcttcaaagatatattgcgcaagctggccggtgagaagcagaccgaagttgccccagccagttacgacgattcatacttggagttggtagccggtattcctagaggagcccagaacttcggttacgtgtccatcattaattcaacagatatgacctttatccagaactttacaggcgaacagatggctagctactttggctatacagttgtggtttccgatgtaaactccgacggcctagacgacgtgctcgtgggagcccctctctttatggagcgggaattcgagtccaacccgcgcgaggtggggcagatatatctgtacctgcaggtgagttcactccttttccgggacccgcagattttgaccggcaccgagactttcgggcggttcggatcagctatggctcacttaggagacctgaaccaagacggctataatgatattgccatcggagtgcccttcgcgggtaaggatcaacggggcaaggtgctcatctacaacggaaacaaagacgggctcaacacaaagcctagtcaggttttgcagggagtgtgggcatctcacgcagtgcccagcggctttggttttactttgcggggcgattctgatatcgacaaaaacgactatcctgacttgatagtcggggcattcggcacgggcaaggttgctgtgtatagagcccggcccgtagttacagtggacgcccagcttctgctgcatcccatgattatcaacctagagaacaaaacctgtcaagttcctgactccatgacaagcgctgcttgcttctccctgcgagtttgcgcaagtgtgactgggcaatcaatcgccaatactattgtgcttatggctgaggtccagcttgattccttgaagcagaaaggcgccattaagagaaccttgttcctggataatcatcaggcccatagggtgttccctttggtgatcaaacggcaaaagtcacatcagtgtcaagattttatcgtctatctgagagacgagaccgagttcagggacaaactcagtcctataaacatcagccttaattatagcctcgacgagtctacctttaaggagggactggaggtgaaacccattctcaattactaccgagaaaatatcgttagcgagcaagcgcacatcctggtagattgcggagaggataacctgtgcgtgcctgacctaaagttatcggccaggccagacaaacatcaggttattattggagatgagaaccacctgatgctgatcattaacgcacgtaatgagggagagggagcctacgaggccgaactttttgtcatgatcccggaagaggcagactacgtcggcatcgagcgcaataacaaagggttccgcccgctgagctgtgaatacaagatggagaatgtgactcgtatggttgtctgtgatctgggaaatccaatggtgagcggaaccaactactctctcggtctcagattcgcagttcctcgcttggagaagacgaatatgtctataaacttcgatctgcagattcgatcctcgaataaagacaacccagacagcaatttcgtgagcctccaaatcaacatcaccgcggttgcccaagtcgagattagaggggtttctcacccccctcagatcgtcctgcctatacataattgggagccagaagaagagccccataaagaagaagaggtgggacccttggtggagcatatatacgagttgcataacatcgggccttccaccattagcgacacgattcttgaagttggatggcccttttcagcacgagatgagttcttgctatatatctttcatatccagaccctgggtcccctgcagtgtcaaccgaacccgaacatcaatcctcaagacataaaaccagcggctagccccgaagacacaccagaactttcagcctttcttcgtaactcaaccattcctcatctggtccgcaagcgtgatgtccacgtcgttgagtttcatcgacagagccctgctaaaatcctgaactgcaccaacatcgaatgtctgcaaatttcatgtgccgtgggacgcttggaaggaggagagagcgcagtgctgaaagtccgttcccggctgtgggctcacactttcctacagaggaagaatgacccatacgctctagctagcctcgtgtctttcgaggtcaaaaaaatgccttacacggatcaacctgctaaactgccagagggatcaatcgtcatcaaaacatccgttatatgggcaacacccaacgtctccttcagtatccccctctgggtgattattctggccatcttgctgggcctccttgttctggccattctgaccctcgctttgtggaagtgcggatttttcgacagggctagaccacctcaggaggacatgacagacagggagcaactcaccaatgacaaaacgcctgaagcctag

SEQ ID NO: 109745 - DNA, 3216 bp, Artificial Sequence
  derived and/or modified sequence
atgtcgcccggggccagccgcggtccccggggaagccaggcgccgctgatcgcgcccctctgctgcgccgcggccgcgctggggatgttgctgtggtcccccgcctgtcaggcgttcaacctggacgtggaaaagctcacagtgtacagcggccccaagggcagctacttcggctacgccgtggacttccacatacccgacgcccgcacagcgagtgtcttggtgggggcgcccaaagccaacaccagccagcccgatatcgtggaagggggagccgtctattactgtccttggcccgcggaggggtctgcgcagtgcaggcagataccgtttgacaccaccaacaacagaaagatcagagttaatggaaccaaagaacctatcgagttcaaatccaatcagtggtttggagcaacagtgaaagctcacaaaggaaaagttgtggcctgtgctcctttatatcactggagaactcttaaaccgacaccagaaaaggacccagttggcacctgctatgtagcaattcagaacttcagcgcctatgccgagttctctccttgccggaacagcaatgctgatccggaaggccagggttactgccaagcaggatttagtctggatttttataagaatggagaccttattgtgggaggacctgggagtttctactggcaaggacaagtgatcactgccagtgttgcagatatcattgcaaattactcattcaaggatatcctcaggaaactggcaggagaaaagcagacggaagtggctccagcttcctatgatgacagttaccttgaattggttgctggaattccaagaggagcacagaattttggatatgtttccatcattaactctacggatatgacgtttattcagaatttcacgggagaacagatggcatcttattttggatataccgttgtcgtatcagatgttaacagtgatggactggatgatgtcctggttggggcacctctctttatggaacgtgaatttgagagcaaccccagagaagtagggcaaatctacctgtatttgcaagtgagctctctcctcttcagagacccccagatcctcactggcaccgagacgtttgggagattcggtagtgctatggcacacttaggagacctgaaccaagatggatacaatgacattgccatcggagtgccttttgcaggcaaggatcaaagaggcaaagtgctcatttataatgggaacaaagatggcttaaacaccaagccttcccaagttctgcaaggagtgtgggcctcacatgctgtcccttccggatttggctttactttaagaggagattcagacatagacaagaatgattacccagatttgattgtgggtgcatttggaacaggaaaagtcgctgtttacagagcaagaccggttgtgactgtagatgcccagcttctgctgcacccaatgattatcaatcttgaaaataaaacttgccaggttccagactctatgacatctgctgcctgcttttctttaagagtatgtgcatctgtcacaggccagagcattgcaaacacaatagtcttgatggcagaggtgcaattagattccctgaaacagaaaggagctattaaacggacgctcttccttgataaccatcaggctcatcgcgtcttccctcttgtgataaaaaggcagaaatcccaccagtgccaggatttcatcgtttaccttcgagatgaaactgaattccgagataaattatctccaatcaacattagtttgaattacagtttggacgaatccacctttaaagaaggcctggaagtgaaaccaatattgaactactacagagaaaacattgttagtgaacaggctcacattctggtggactgtggagaagacaatctgtgtgttcctgacttgaagctgtcggctagaccagataagcatcaggtaatcattggagatgaaaatcaccttatgctcataataaatgcaagaaatgaaggggaaggagcatatgaagctgaactctttgtaatgataccagaagaggcagattatgttggaatcgaacgcaacaacaagggatttcgaccactgagctgtgagtacaagatggaaaatgtaaccaggatggtggtgtgtgaccttgggaaccctatggtgtctggaacaaattattccctgggcctccgatttgcagttccacgtcttgagaaaacaaacatgagcattaacttcgatctccaaatcagaagttccaacaaggacaatccagacagcaattttgtgagcctgcaaatcaacatcactgctgtagcgcaggtggaaataagaggagtgtcacaccctccgcagattgttctgcccattcataactgggaaccagaagaggagccccacaaagaggaggaggttggaccattggtggaacatatttatgagctgcacaatattggaccaagtaccatcagtgacaccatcctggaggtgggctggcctttctctgcccgggatgaatttcttctctatattttccatattcaaactctgggacctctgcagtgccaaccaaatcctaatatcaatccacaggatataaagcctgctgcctccccagaggacacccctgagctcagcgcctttttgcgaaactctactattcctcatcttgtcaggaagagggatgtacatgtggtcgaattccacagacagagccctgcaaaaatactgaattgtacaaatatcgagtgtttacaaatctcctgtgcagtgggacgactcgaaggaggagaaagcgcagtcctgaaagtcaggtcacgattatgggcccacaccttcctccagagaaaaaatgatccctatgctcttgcatccctggtgtcctttgaagttaagaagatgccttatacagatcagccagcaaaactcccagaaggaagcatagtaattaagacatcagttatttgggcaactccgaatgtttccttctcaatcccattatgggtaataatactagcaatacttcttggattgttggttctcgccattttaaccttagctttatggaagtgtggattctttgacagagccagacctcctcaggaggacatgaccgacagggaacagctgacaaatgacaagacccctgaggcatgacaagaaaaaaaaagaagaccaaagacctcaaacactggtcctgttcaaagaaaaagaaagaacatgagg

SEQ ID NO: 109746 - DNA, 3147 bp, Artificial Sequence
  derived and/or modified sequence
atgagccctggggccagccggggcccccggggcagccaggcccccctgattgcccccctgtgctgtgccgctgctgccctgggcatgctgctgtggagccctgcctgccaggccttcaacctggatgtggagaagctgactgtgtacagcggccccaagggcagctacttcggctatgctgtggacttccacatcccagatgccaggacagcctctgtgctggtgggcgcccccaaggccaacaccagccagcctgacatcgtggagggcggcgctgtgtactactgcccctggccagctgagggcagcgcccagtgccggcagatcccctttgacaccaccaacaacaggaagatccgggtgaatggcaccaaggagcccatcgagttcaagagcaaccagtggtttggagccaccgtgaaggcccacaagggcaaggtggtggcctgtgcccccctgtaccactggaggaccctgaagcccaccccagagaaggaccctgtgggcacctgctacgtggccatccagaacttcagcgcctatgcagagttcagcccctgcaggaacagcaatgctgaccctgagggccagggctactgccaggccggcttcagcctggacttctacaagaatggagacctgattgtgggcggccctggcagcttctactggcagggccaggtgatcacagcctctgtggccgacatcatcgccaactacagcttcaaggacatcctgaggaagctggccggggagaagcagacagaggtggccccagccagctatgatgacagctacctggagctggtggccggcatccccaggggggcccagaactttggctacgtgtccatcatcaacagcacagacatgaccttcatccagaacttcaccggggagcagatggccagctacttcggctacacagtggtggtgtctgatgtgaacagtgatggcctggatgatgtgctggtgggcgcccccctcttcatggagcgggagtttgagagcaacccccgggaggtgggccagatctacctgtacctgcaggtgagcagcctgctcttccgggacccccagatcctgactggaacagagaccttcggccgctttggaagtgccatggcccacctgggggacctgaaccaggacggctacaatgacatcgccatcggcgtgccctttgctgggaaggaccagaggggcaaggtgctgatctacaacggcaacaaggatggcctgaacaccaagcccagccaggtgctgcagggcgtgtgggccagccatgctgtgcccagcggcttcggcttcaccctgcggggggacagcgacatcgacaagaatgactacccagacctgattgtgggcgccttcggcaccgggaaggtggccgtgtaccgggcccggcctgtggtgacagtggatgcccagctgctgctgcaccccatgatcatcaacctggagaacaagacctgccaggtgcctgacagcatgaccagcgctgcctgcttcagcctgcgggtgtgtgcctctgtgacaggccagagcatcgccaacaccatcgtgctgatggccgaggtgcagctggacagcctgaagcagaagggggccatcaagaggaccctcttcctggacaaccaccaggcccacagggtcttccccctggtgatcaagaggcagaagagccaccagtgccaggacttcatcgtgtacctgagagatgaaacagagttccgggacaagctgagccccatcaacatcagcctgaactacagcctggatgagagcaccttcaaggagggcctggaggtgaagcccatcctgaactactacagagaaaatattgtgtctgagcaggcccacatcctggtggactgtggggaggacaacctgtgtgtgcctgacctgaagctgagcgcccggccagacaagcaccaggtgatcattggagatgagaaccacctgatgctgatcatcaatgccagaaatgaaggagagggcgcctatgaagctgagctgtttgtgatgatccctgaggaggccgactatgtgggcatcgagaggaacaacaagggcttccggcccctgagctgtgagtacaagatggagaatgtgaccaggatggtggtgtgtgacctgggcaaccccatggtgtctggcaccaactacagcctgggcctgcgctttgctgtgccccggctggagaagaccaacatgagcatcaactttgacctgcagatccgcagcagcaacaaggacaacccagacagcaactttgtgtccctgcagatcaacatcacagctgtggcccaggtggagatccggggcgtgagccaccccccccagatcgtgctgcccatccacaactgggagcctgaggaggagccccacaaggaggaggaggtgggccccctggtggagcacatctatgagctgcacaacatcggccccagcaccatcagtgacaccatcctggaggtgggctggcccttcagcgccagagatgagttcctgctgtacatcttccacatccagaccctgggccccctgcagtgccagcccaaccccaacatcaacccccaggacatcaagccagctgccagccctgaggacaccccagagctgagcgccttcctgaggaacagcaccatcccccacctggtgaggaagagagatgtgcacgtggtggagttccaccggcagagccctgccaagatcctgaactgcaccaacattgaatgtctgcagatcagctgtgctgtgggccgcctggagggcggggagagcgctgtgctgaaggtgcgcagccggctgtgggcccacaccttcctgcagaggaagaatgacccctatgccctggccagcctggtgtcctttgaggtgaagaagatgccctacacagaccagcctgccaagctgcctgagggcagcatcgtcatcaagaccagcgtcatctgggccacccccaacgtgtccttcagcatccccctgtgggtgatcatcctggccatcctgctgggcctgctggtgctggccatcctgaccctggccctgtggaagtgtggcttctttgaccgggcccggcccccccaggaggacatgacagaccgggagcagctgaccaatgacaagaccccagaggcctag

SEQ ID NO: 109747 - DNA, 3147 bp, Artificial Sequence
  derived and/or modified sequence
atgagccccggcgccagccggggcccccggggcagccaggcccccctgatcgcccccctgtgctgtgccgctgctgcccttgggatgctgctatggtcacccgcctgccaggcctttaacctggacgtggagaagctcacggtgtactcaggtcccaaggggtcctacttcgggtatgccgttgatttccatattcctgacgccaggactgcctcggtgcttgtaggcgctccaaaagccaataccagtcagccagacatagtcgaagggggtgctgtctactactgcccgtggcctgcggaagggagtgctcaatgccgtcaaatccctttcgacaccactaacaataggaaaatccgagtaaacggcaccaaagagcctatcgagtttaagtcgaaccagtggttcggggctaccgttaaagctcacaaaggtaaagtggtagcttgtgccccactatatcactggaggactctcaagccaacacctgagaaggaccccgttgggacatgctatgtagctattcagaacttctccgcgtacgctgaatttagcccttgtagaaactcaaatgcagatccggagggtcagggctactgccaggccgggttttctctcgacttctacaagaacggcgatctgattgtggggggtccggggtccttctattggcaaggacaggtaatcaccgctagcgtagcagacataatcgccaactatagctttaaggatatacttcgcaaactggccggggagaaacagacagaggttgcacctgcctcttatgacgactcctatctcgaactggtcgcagggattccccggggagcgcagaatttcggctatgtaagtattatcaattctactgacatgacgtttatccagaatttcacaggcgagcaaatggcctcatactttggctataccgtagtggtcagcgacgtaaactcggatgggctcgacgacgtgctggtcggcgcccccttgttcatggaaagagaatttgaaagcaaccctcgcgaagtgggccagatttacctctatctacaggtgtcatccctcttgtttcgggacccgcagatcctcactggaacggagactttcggacggttcgggagtgccatggctcacctgggagacttgaatcaggacggctacaacgatattgctataggggtgccgtttgccggtaaggaccaacgaggtaaggttctcatctataacggcaataaagatggcctcaacactaaaccatcacaagtcctgcagggagtttgggctagtcatgctgtacctagtgggttcgggttcactctgaggggcgactctgatatcgataagaatgactaccctgacctgattgtaggggcctttggcacaggaaaagtggccgtgtaccgggctagaccagtggtgactgttgacgctcagcttctgcttcatcctatgataatcaacctagaaaacaagacatgtcaggtccctgatagtatgacgtccgcagcgtgcttctcactgcgcgtgtgcgcaagcgtcacaggtcagtcaatcgccaatactatagtcttgatggccgaggtccaactggattctttgaagcagaagggcgccatcaagcgtacactctttctggataaccatcaagcgcatcgcgtcttccctttggtcatcaaacggcagaagtcccatcaatgtcaggacttcatcgtttatttgcgtgatgaaacagaatttagggacaagctctcacccataaacatctctctgaattacagtctggacgaatcaacattcaaagagggattagaggtgaagccaatcctcaattactaccgagagaatattgtgagcgaacaggcccacattctggtggactgtggggaggataatctgtgtgtgcccgacttgaagttaagcgcgaggcctgataaacatcaggtgatcattggggatgaaaaccacctgatgctcatcatcaacgccaggaacgagggggagggagcctacgaggccgagctgttcgtgatgattcctgaagaggcagactacgtggggatcgaaaggaacaataagggattcaggccactgagctgcgaatataagatggagaatgtgactaggatggtggtctgcgacctcggaaatccaatggtctccggaaccaactactccttaggattgagatttgccgtcccccgactagaaaaaacaaatatgagtataaacttcgacctgcagattcgaagttctaataaggataaccctgactctaacttcgtttccctccaaattaacataactgccgtggcccaggtcgagatccggggagtcagccaccctccccagatagtcctccccatccacaattgggagcctgaggaggaaccacataaggaggaggaggtcgggcccctcgttgaacatatatatgagctacacaatatcggaccttcgaccatttccgacactatactcgaagtaggttggcctttttcagcaagagatgagttcctcctgtacattttccacattcagaccctgggaccattgcaatgccagccaaaccccaatatcaatcctcaagacataaaacctgccgcatccccagaggacacccccgaactgtcagccttcctcaggaactcaaccataccgcatttagttaggaaaagagatgtccacgtggtcgaatttcacagacaaagcccagcgaagattctcaactgtaccaacattgagtgcctccagatcagttgcgctgtcggccgcctggaaggtggcgagtctgctgttctgaaagtacggtcccgactctgggctcacacgtttctccagcggaagaacgacccttatgccctggcctctttggtatcctttgaggtgaagaagatgccttacaccgatcagcctgcaaaacttcccgagggatcaatagtaattaaaaccagcgtaatatgggccactcccaacgtgtccttctcgatacccctgtgggtaattatcctggccatactgctgggcctgctcgttctcgcaatcctcaccctggccctttggaaatgtgggttttttgatagggctcgaccaccccaggaggatatgacggacagggaacaactgacaaacgacaagacccccgaagcttag

SEQ ID NO: 109748 - DNA, 3147 bp, Artificial Sequence
  derived and/or modified sequence
atgtccccgggagcatctagggggccacggggatcccaggcaccactgatcgctccgttatgctgcgcagccgctgcgctaggcatgctgctgtggtcacccgcatgccaggcctttaacctcgacgtggaaaaactcacggtctattccggacctaaggggtcctacttcggatacgctgtggattttcatatccccgatgcccgtacagcgtctgtgctcgtaggagctccaaaagcgaatactagccagccagacattgttgaggggggtgccgtctactattgtccctggcccgcagaggggtctgctcagtgtaggcagatcccattcgatacaaccaataacagaaagattcgcgtcaacggaaccaaagaacccatcgaattcaagagcaatcagtggttcggcgctaccgtcaaagcccacaagggaaaagtcgttgcctgtgccccactctaccactggaggactctgaagcctacccccgagaaggaccctgtaggtacttgctacgtcgccattcaaaacttctctgcctacgcggagttctccccctgtagaaattctaacgcggatccggagggtcaggggtactgccaggcgggattctcactggacttctataaaaacggcgacctcatcgttggaggccctggctcgttctactggcaggggcaggtgattacagcaagtgtcgccgacatcattgccaattatagtttcaaggacatactgaggaaactggcgggtgaaaagcagactgaggtggctcccgcatcatacgatgacagctacctggaactggttgcagggattccccgaggagcccagaattttggatacgtgagtataattaattccacggacatgacctttatccaaaacttcacgggagagcagatggcatcttatttcggatacactgttgttgtaagcgacgtcaattccgacggcctggatgacgtgttggtgggcgcaccactcttcatggagagggaattcgagagtaaccctagagaggtgggccagatatacctgtatctacaggtatcgtcgctgctgtttcgcgatccccagatactcactggaaccgaaacattcggcagattcggctctgccatggctcacctgggcgatcttaaccaggacggttacaacgacattgccattggggtcccctttgccggaaaagaccagcggggaaaggttctcatctacaatgggaacaaggacggtttaaacaccaagccatcccaagtgctacagggagtatgggctagccacgctgttccaagcggcttcgggtttacgctgcggggagattccgacatagataaaaacgactacccggatctgattgtgggggcatttgggaccggtaaggtagccgtttaccgcgctaggccagtggtgacggtcgatgcccagctcctgcttcatcctatgataattaatctggaaaataaaacctgccaagtcccagacagtatgacgagcgccgcttgtttctctctgagagtctgtgcctctgtgactgggcaaagcatagccaacacaattgtcctcatggcggaagtacagctggactcactgaagcagaagggagccataaaaaggaccctgtttcttgataaccaccaggcccaccgggtatttccactcgtgatcaaacggcagaagagtcaccagtgccaggactttatcgtataccttcgggatgaaacagagttcagggacaaacttagtcctataaacattagtttaaactactccctcgacgagtctacttttaaggaaggcctggaggtcaaacctatcctgaattactatcgcgaaaacatcgttagcgaacaggcacatatcttggttgactgcggggaggataacctgtgtgtccccgatcttaaactgtctgctcgtcctgacaaacatcaggtgatcattggggatgaaaaccacctgatgcttataatcaacgcacggaatgaaggagaaggcgcatatgaggccgaactctttgtcatgatccctgaggaagccgattacgttgggatcgagcggaacaataagggattcagacctctcagctgcgagtataagatggagaacgtaacgcggatggttgtctgtgacctcgggaacccgatggtatccggtactaattatagcttagggcttagattcgcggtccctcggctcgagaaaaccaacatgtccatcaacttcgacttgcagattcggagctccaacaaagataacccagattctaactttgttagcctccagatcaacattacggcggtggcgcaggtggaaattcggggagtctcccacccaccacagatcgtcctgcccattcataactgggagcccgaagaggaaccacacaaggaggaggaggtggggccattagtggagcacatctatgaactgcacaacatcggaccaagcactataagtgacacgatcctagaggttggctggccgttttccgctagggatgagttcctgttgtacatcttccacatccaaaccctgggacccctgcagtgtcagcctaacccgaacatcaatcctcaagacattaagcccgcagcaagtcccgaggacactcccgagttatccgccttcctccgaaacagtactataccccaccttgtccgaaagcgcgacgtccacgtggtagagtttcacagacagagtccagctaaaatcttgaattgcaccaacattgaatgtctccaaatcagctgcgcggttggacgcttggagggtggcgagagcgccgtcctgaaagttcggagcagactgtgggcacacacctttctccaacggaaaaacgacccctatgccttagcatctctcgtgtcttttgaagtcaagaagatgccttacaccgatcagccagccaaactccccgaggggagcattgttattaagacctcagtcatttgggctactcccaatgtgagtttctcgattcccttgtgggttattatccttgctatccttctcggtctgctcgtactggccattctaacgctggccttatggaagtgcggcttttttgaccgggcaaggccaccacaagaggacatgacggatcgtgaacaactgaccaacgacaagaccccggaggcctag

SEQ ID NO: 109749 - protein, 1161 aa, Artificial Sequence
  derived and/or modified sequence
MAHLELLLVENFKSWRGRQVIGPFRRFTCIIGPNGSGKSNVMDALSFVMGEKIANLRVKNIQELIHGAHIGKPISSSASVKIIYVEESGEEKTFARIIRGGCSEFRFNDNLVSRSVYIAELEKIGIIVKAQNCLVFQGTVESISVKKPKERTQFFEEISTSGELIGEYEEKKRKLQKAEEDAQFNFNKKKNIAAERRQAKLEKEEAERYQSLLEELKMNKIQLQLFQLYHNEKKIHLLNTKLEHVNRDLSVKRESLSHHENIVKARKKEHGMLTRQLQQTEKELKSVETLLNQKRPQYIKAKENTSHHLKKLDVAKKSIKDSEKQCSKQEDDIKALETELADLDAAWRSFEKQIEEEILHKKRDIELEASQLDRYKELKEQVRKKVATMTQQLEKLQWEQKTDEERLAFEKRRHGEVQGNLKQIKEQIEDHKKRIEKLEEYTKTCMDCLKEKKQQEETLVDEIEKTKSRMSEFNEELNLIRSELQNAGIDTHEGKRQQKRAEVLEHLKRLYPDSVFGRLFDLCHPIHKKYQLAVTKVFGRFITAIVVASEKVAKDCIRFLKEERAEPETFLALDYLDIKPINERLRELKGCKMVIDVIKTQFPQLKKVIQFVCGNGLVCETMEEARHIALSGPERQKTVALDGTLFLKSGVISGGSSDLKYKARCWDEKELKNLRDRRSQKIQELKGLMKTLRKETDLKQIQTLIQGTQTRLKYSQNELEMIKKKHLVAFYQEQSQLQSELLNIESQCIMLSEGIKERQRRIKEFQEKIDKVEDDIFQHFCEEIGVENIREFENKHVKRQQEIDQKRLEFEKQKTRLNVQLEYSRSHLKKKLNKINTLKETIQKGSEDIDHLKKAEENCLQTVNELMAKQQQLKDIRVTQNSSAEKVQTQIEEERKKFLAVDREVGKLQKEVVSIQTSLEQKRLEKHNLLLDCKVQDIEIILLSGSLDDIIEVEMGTEAESTQATIDIYEKEEAFEIDYSSLKEDLKALQSDQEIEAHLRLLLQQVASQEDILLKTAAPNLRALENLKTVRDKFQESTDAFEASRKEARLCRQEFEQVKKRRYDLFTQCFEHVSISIDQIYKKLCRNNSAQVSSYIKEQTQDQFQMIVISLKEEFYSRADALIGIYPEYDDCMFSRVLTLDLSQYPDTEGQESSKRHGESR

SEQ ID NO: 109750 - DNA, 3486 bp, Artificial Sequence
  derived and/or modified sequence
atggcccacctggaactgttgctggtggagaactttaagagctggagggggcggcaggtaatcgggcctttccgacgatttacgtgcattatcggcccaaacgggtctgggaagtcaaacgtgatggacgcattatctttcgtcatgggggagaagattgctaatttaagggtgaaaaatatccaggagctgattcacggcgctcatatcgggaagccaatatcttctagtgcaagtgttaagatcatttacgtggaggagtcaggggaggagaagactttcgcaaggatcatcagaggaggatgtagtgagttcaggtttaacgacaatttggttagtcgatctgtatatatcgcggagctggagaaaatcggaatcatcgtcaaagctcaaaattgcctggtgttccaaggaacagtcgaaagcatctcagttaaaaagcccaaggaacggacacagtttttcgaggagataagcacatccggcgagttgattggtgagtatgaagagaaaaaaaggaagcttcagaaggccgaagaagatgctcagtttaactttaataagaagaagaatatcgccgcggagaggcgccaggccaagttggaaaaagaagaggcagagaggtatcagagcttgctagaggagttaaagatgaacaagattcaactccagttgttccagctgtaccataacgagaagaaaatccatctactcaatactaaactcgaacatgtaaaccgggatttgtccgtgaagcgggagagcctgtctcaccatgaaaacattgtgaaggcacgcaagaaagaacatgggatgctgacgcgacagctacaacaaactgaaaaagaactgaagagtgttgagactctgctcaaccagaagagacctcagtacattaaagccaaagagaacacaagtcaccatctgaaaaagttggacgtagctaaaaagtccattaaggattctgagaagcagtgttccaagcaggaggacgacatcaaggcgctggagaccgaactggccgatctggacgctgcctggcggtccttcgaaaaacaaattgaggaagagatcctgcataagaagagggatattgagctggaagcctcgcagcttgaccggtataaagagcttaaggaacaggtcaggaagaaggtggctaccatgacgcagcagctggagaagttgcagtgggaacaaaagaccgacgaagaacgactcgcattcgaaaaaaggcgccacggcgaggtgcaaggcaatctgaaacaaatcaaggagcagattgaagatcataagaaaagaatcgaaaagctcgaagaatatacgaagacctgcatggactgtctgaaggaaaagaaacagcaggaagagactcttgtggatgagattgagaagacaaaatcccgaatgagcgaattcaacgaagagctgaacctgattcgctccgagcttcagaacgctgggattgacacccatgaagggaaacgccagcagaagcgggctgaggttctggagcacctgaaaaggctgtaccctgactccgttttcggccgactctttgatttgtgccaccctatccacaaaaaatatcagttggctgttacgaaagtgttcggccgcttcatcactgccatcgtggtcgcaagcgagaaagtcgctaaagactgtatcaggttcctgaaggaggagcgcgcagaaccggagacgtttttggcactagattacctggatattaagccaataaatgagcgccttcgcgagctcaagggctgcaagatggttatcgacgtgattaagacacagttcccgcagttgaagaaggtgatacagtttgtgtgcggcaatggcctggtgtgcgagactatggaagaggctaggcacatcgcccttagtgggcccgagcgacagaagaccgtcgcactggatggcacactgttcctgaaatctggcgtgatttcaggcggtagctctgatctcaaatataaggcaagatgttgggacgaaaaggaactcaagaacttgagggacagaagatcgcagaagatccaagagctgaaagggctgatgaaaacactgcggaaggaaaccgacctcaagcaaatccagactctgatccaagggactcagaccaggttaaagtactcccagaatgaactcgaaatgataaaaaaaaagcacctcgtagccttttatcaggagcagtcacagctgcagtctgagctgttaaatatagaatcccagtgtatcatgctttccgaaggcatcaaggaaaggcagcggaggatcaaagagtttcaggagaagatcgacaaagtggaggatgacatattccagcatttttgcgaggagattggggtcgagaatatccgggaatttgagaataagcatgtcaagcgccaacaggagatcgaccagaaacggctggagtttgaaaagcagaagactagactaaatgttcagttagaatatagtcgaagtcacctcaaaaaaaaactcaacaagattaacaccctgaaagaaacaatccaaaagggctccgaagatattgaccacctgaagaaagccgaggaaaactgcttgcaaacagtgaacgagctcatggcaaaacagcagcagctgaaggatatccgcgtgactcaaaactcctctgccgagaaagtgcagactcagatagaagaggagaggaaaaagttcctggctgtggatcgtgaagtgggcaaactccagaaggaagtggtgtcaattcaaacctcactcgagcagaaacgtctggagaagcacaatttgttactagactgtaaggtccaggatattgaaatcattctcctttcaggtagcctcgacgatatcattgaggtggagatgggcaccgaagcagaatcaactcaggccacaatagacatatacgaaaaggaagaagcattcgagattgactattcgtccctcaaagaggacctgaaggcactgcagtcggatcaagagattgaagcacatttgcggttgcttctgcagcaagtggccagccaggaggatatactgctgaaaacagcagccccaaaccttagagccctggagaacctcaagacggtccgggacaaatttcaggagtcaacggatgcctttgaagcttcgcgaaaggaggctcggctttgccggcaggagtttgaacaggtgaagaagcgacgctatgaccttttcacgcagtgcttcgaacacgtcagcataagtattgaccagatttataaaaagctgtgccgtaataactctgcacaggtgtcaagttatattaaagagcaaacacaggaccaattccagatgatagttatttcactgaaggaggagttttacagccgagctgatgccctgattggcatctatcccgagtatgatgactgcatgttctcccgagtccttacactcgacttgagccagtatccggatacagaaggacaggagagctcaaagcggcacggtgaatctcgctag

SEQ ID NO: 109751 - DNA, 3486 bp, Artificial Sequence
  derived and/or modified sequence
atggcccacctggagctgctgctggtggagaacttcaagtcctggaggggccggcaggtgattggccccttccgccgcttcacctgcatcatcggccccaacggcagcggcaagagcaatgtgatggatgccctgagctttgtgatgggagagaagatcgccaacctgcgggtgaagaacatccaggagctgatccacggggcccacatcggcaagcccatcagcagcagcgcctctgtgaagatcatctacgtggaggagagcggggaggagaagacctttgcccgcatcatccggggcggctgcagcgagttccgcttcaatgacaacctggtgagccgctctgtgtacatcgccgagctggagaagattggcatcatcgtgaaggcccagaactgcctggtgttccagggcaccgtggagagcatctctgtgaagaagcccaaggagaggacccagttctttgaggagatcagcaccagcggggagctgattggagaatatgaggagaagaagaggaagctgcagaaggccgaggaggatgcccagttcaacttcaacaagaagaagaacattgctgctgagcggcggcaggccaagctggagaaggaggaggccgagcgctaccagagcctgctggaggagctgaagatgaacaagatccagctgcagctgttccagctgtaccacaatgagaagaagatccacctgctgaacaccaagctggagcacgtgaacagagacctgtctgtgaagcgggagagcctgagccaccacgagaacatcgtgaaggccaggaagaaggagcacggcatgctgacccggcagctgcagcagacagagaaggagctgaagtctgtggagaccctgctgaaccagaagaggccccagtacatcaaggccaaggagaacaccagccaccacctgaagaagctggatgtggccaagaagagcatcaaggacagcgagaagcagtgcagcaagcaggaggatgacatcaaggccctggagacagagctggccgacctggatgctgcctggaggagctttgagaagcagatcgaggaggagatcctgcacaagaagagggacatcgagctggaggccagccagctggaccgctacaaggagctgaaggagcaggtgaggaagaaggtggccaccatgacccagcagctggagaagctgcagtgggagcagaagacagatgaggagcggctggcctttgagaagagaagacatggagaggtgcagggcaacctgaagcagatcaaggagcagatcgaggaccacaagaagagaattgagaagctggaggagtacaccaagacctgcatggactgcctgaaggagaagaagcagcaggaggagaccctggtggatgaaattgagaagaccaagagcaggatgtctgagttcaatgaggagctgaacctgatccgctctgagctgcagaatgccggcatcgacacccatgagggcaagaggcagcagaagagagctgaggtgctggagcacctgaagaggctgtacccagacagcgtgtttggccgcctgtttgacctgtgccaccccatccacaagaagtaccagctggccgtgaccaaggtgtttggccgcttcatcacagccatcgtggtggccagcgagaaggtggccaaggactgcatccgcttcctgaaggaggagagagctgagcctgagaccttcctggccctggactacctggacatcaagcccatcaatgaaaggctgcgggagctgaagggctgcaagatggtgattgatgtgatcaagacccagttcccccagctgaagaaggtgatccagtttgtgtgtggaaatggcctggtgtgtgagaccatggaggaggcccggcacatcgccctgagcggccctgagcggcagaagacagtggccctggatggcaccctcttcctgaagtctggagtcatcagcggcggcagcagtgacctgaagtacaaggcccgctgctgggatgagaaggagctgaagaacctgcgggacagaagaagccagaagatccaggagctgaagggcctgatgaagaccctgaggaaggagacagacctgaagcagatccagaccctcatccagggcacccagacccggctgaagtacagccagaatgagctggagatgatcaagaagaagcacctggtggccttctaccaggagcagagccagctgcagagcgagctgctgaacatcgagagccagtgcatcatgctgtctgagggcatcaaggagcggcagaggcgcatcaaggagttccaggagaagattgacaaggtggaggatgacatcttccagcacttctgtgaggagattggagtggagaacatccgggagtttgagaacaagcacgtgaagaggcagcaggagattgaccagaagaggctggagtttgagaagcagaagacccggctgaatgtgcagctggagtacagccgcagccacctgaagaagaagctgaacaagatcaacaccctgaaggagaccatccagaagggctctgaagatattgaccacctgaagaaggccgaggagaactgcctgcagacagtgaatgagctgatggccaagcagcagcagctgaaggacatccgggtgacccagaacagcagcgctgagaaggtgcagacccagatcgaggaggagaggaagaagttcctggccgtggaccgggaggtgggcaagctgcagaaggaggtggtgtccatccagaccagcctggagcagaagaggctggagaagcacaacctgctgctggactgcaaggtgcaggacatcgagatcatcctgctgagcggcagcctggatgacatcatcgaggtggagatgggcacagaagctgagagcacccaggccaccatcgacatctatgagaaggaggaggcctttgaaattgactacagcagcctgaaggaggacctgaaggccctgcagagcgaccaggagattgaggcccacctgcggctgctgctgcagcaggtggccagccaggaggacatcctgctgaagacagctgcccccaacctgcgggccctggagaacctgaagacagtgcgggacaagttccaggagagcacagatgcctttgaggccagcaggaaggaggcccggctgtgccggcaggagtttgagcaggtgaagaagagaagatatgacctcttcacccagtgctttgagcacgtgtccatcagcattgaccagatctacaagaagctgtgcaggaacaacagcgcccaggtgagcagctacatcaaggagcagacccaggaccagttccagatgatcgtcatcagcctgaaggaggagttctacagcagagcagatgccctgattggcatctacccagaatatgatgactgcatgttcagccgggtgctgaccctggacctgagccagtacccagacacagagggccaggagagcagcaagagacatggagagagcaggtag

SEQ ID NO: 109752 - DNA, 3486 bp, Artificial Sequence
  derived and/or modified sequence
atggcccacctggagctgctgctggtggagaacttcaagagctggcgaggacgacaggttattggacctttccgccgcttcacgtgtatcatcggccccaatggcagtggtaaatcaaatgtcatggacgcgcttagcttcgtaatgggggaaaagattgcgaacctaagagtaaaaaacattcaggagttaattcatggggcccacatcggtaaaccgatttcgagcagcgcaagcgtgaaaattatatacgtcgaggaaagtggtgaggagaaaacattcgccagaatcatccgcggaggatgctcagaatttcgctttaatgataatctcgtgagccggtcagtgtatattgctgagctggagaagatcggaatcatcgtcaaggctcagaattgtctggtgttccaaggaactgtggaatcgatatccgtcaaaaagcccaaagagcggacgcagttcttcgaagagatctcaacatccggagagctaattggtgaatacgaggaaaagaaaagaaagttgcaaaaagccgaagaggatgcccagtttaatttcaacaagaaaaaaaacattgcagccgaacgaaggcaagcaaagttagaaaaggaagaggccgaaaggtatcagtcgttgctggaggaactcaaaatgaacaagattcagcttcagctttttcaactgtatcacaatgagaaaaagattcacctcctgaacaccaaattggaacacgttaatagagacttgtctgtgaaaagggagagtctttctcatcatgagaacatcgtgaaagctcgaaaaaaagaacatgggatgttaactaggcagctgcagcagaccgagaaagagttaaagtctgttgagacactattgaatcagaagcgtccccagtatatcaaagcaaaggaaaatacaagtcaccatttgaaaaaacttgacgttgctaagaagtccatcaaagacagcgagaagcagtgttctaaacaggaggatgacataaaggctctggagactgagctggcagatctcgacgccgcatggcggtcattcgaaaagcagatcgaagaagagatcttgcataagaagcgggatatcgagctggaggcatctcagctggaccgttataaggagctgaaagaacaagtaagaaagaaagtcgcaactatgactcagcaactggaaaagctccagtgggagcagaaaaccgacgaagagagactcgcttttgagaaaagacggcatggggaggtccagggaaacctgaagcaaattaaggagcaaatagaggaccacaagaagaggattgaaaagctcgaagagtacaccaaaacttgcatggattgtctcaaggaaaaaaagcaacaggaggagacactggtggacgagatcgagaagaccaagagcagaatgagtgagttcaacgaggagctcaatctgattcggagcgaactgcagaatgcagggatcgatacgcacgaaggaaaacggcagcagaagagggctgaggtgttggagcaccttaagaggctctatcccgacagtgtctttggaaggctgtttgacctatgtcaccccatccataaaaagtatcagctggccgtcactaaggtctttggccgctttattacagccatagtggttgcttccgagaaggtagcaaaagattgcatcaggttcctcaaagaggagagggctgagccagaaaccttcctcgccctggattatctcgacatcaaaccaattaacgagaggctcagagagttaaagggctgtaagatggtgattgacgtcatcaagacacaattcccacagttgaaaaaggtcatacagttcgtgtgcggtaacggcttggtgtgcgagactatggaggaggcccgacatattgccctgtccggccccgaaaggcagaaaactgtggccttagatgggactctcttcctgaaatccggagtaatctccggcgggtcctcagatttgaaatataaagccaggtgttgggatgagaaagaactgaagaatctgcgcgaccggagatctcagaagatccaagaactcaagggacttatgaagacgctgcgaaaggaaaccgatttaaaacagatccagacactcatccagggtacacagactcgcctcaaatactctcagaatgaattagagatgatcaaaaaaaagcatctagtcgctttttatcaggagcagagccagctccaatccgagttgctcaatatcgagtcgcaatgcatcatgctcagtgagggaattaaagagcgacagcgacgaattaaggagtttcaggaaaagattgacaaagtggaagatgacatcttccagcacttttgtgaagagataggcgttgagaatatacgagaatttgagaataaacacgttaagcgtcaacaggagatcgaccagaagcggctcgagttcgagaaacagaaaaccaggcttaacgtccagctagagtattcgcgatctcacctgaagaaaaaactaaataagatcaataccctcaaggagactatccagaaaggtagcgaagatatagatcacctaaagaaggcagaggaaaactgtctgcagacagttaacgaattgatggctaaacagcagcaactgaaggacatccgcgtgacccagaattcatctgctgagaaggtacaaacgcaaatagaggaggagcggaaaaaatttctggccgtggatagggaggtgggtaaattgcagaaagaagtcgtatcaatccagacttcacttgaacaaaaacgcctggagaagcataatctactccttgattgcaaggtccaggatatcgagattatactgctctctggctccttggacgacattatcgaagtggagatgggcactgaagccgagtctacccaggcaaccatcgatatctacgagaaggaggaagctttcgaaatagactattcatcactcaaggaggacctcaaggcgctccaatccgaccaagaaattgaggctcacctgcgcctcctgcttcagcaggtagcttctcaggaggatattctgttgaagacagctgcgcccaacctcagagcactggagaacctgaagacggtcagggacaagtttcaagaatctacagacgcatttgaagccagtaggaaagaggccaggctgtgcaggcaggaatttgagcaggtgaagaagagacgatatgatcttttcacccaatgcttcgaacacgtctcgatctccattgaccaaatctataagaaactctgcaggaataatagtgcccaggtctccagctatatcaaagaacaaacacaggatcaatttcagatgatcgttatctccctgaaggaagagttttattcaagagctgacgccctgatagggatctatcctgagtatgacgattgtatgtttagccgcgttttgaccctggatctctcccagtacccagacacagagggccaggagtcatctaaacggcatggcgagtctcgctag

SEQ ID NO: 109753 - DNA, 3636 bp, Artificial Sequence
  derived and/or modified sequence
cgctttttccgcgggcgcttgataacgcgggtgaggcgtggagggcggcgccatggcccacctggagctgctgcttgtggaaaatttcaagtcgtggcggggccgccaggtcattggccccttccggaggttcacctgcatcatcggccccaacggctctggaaaatctaatgtaatggatgcacttagttttgtaatgggagagaaaatagctaatttaagagtgaaaaatattcaagaactcattcatggagcacatattggaaaacctatttcttcttctgcaagtgtaaaaattatatatgtggaggaaagtggcgaagagaaaacatttgcaaggattatccgagggggatgctcagaatttcgctttaatgataatcttgtgagtcgttctgtttacattgcagagttggaaaagataggcataatagtcaaagcacaaaattgtttggtttttcagggaactgtagagtcaatttcagtgaagaaacccaaagaaaggacccagttttttgaggaaatcagcacttcaggagagcttataggagaatatgaagaaaagaaaagaaagttacaaaaagccgaagaggatgcacagtttaactttaataagaaaaaaaatatagcggcagagcgcagacaagcaaaattagagaaggaagaggcagaacgttaccagagtctccttgaagaactgaaaatgaacaagatacaactgcagctttttcaactataccataatgagaaaaagattcatctcctgaacaccaagttagagcatgtgaatagggatttgagtgtcaaaagagagtctttgtctcatcatgaaaacatagttaaagccaggaaaaaggaacatggaatgctaactagacaactacaacaaacagaaaaagaattaaaatcggttgaaacccttttaaatcagaagaggcctcagtacattaaagccaaagaaaacacttctcaccaccttaagaaattagatgtggctaagaaatcaataaaggacagcgaaaaacaatgttctaaacaggaagatgatataaaagccctggagacagagctggctgatttagatgctgcatggagaagttttgaaaagcagattgaggaagaaattttacataaaaagcgagacattgaactggaagccagtcagctggatcgttataaagaacttaaggaacaagtaagaaagaaagtagctacaatgactcaacaactggaaaaactgcagtgggaacagaagacagatgaagaaagactggcatttgaaaagaggaggcatggagaagttcagggaaatctaaaacaaataaaagaacaaatagaagatcataaaaaacgaatagagaagttagaggagtatacaaagacatgcatggattgcttgaaagagaaaaaacagcaagaggaaaccctagtggatgaaattgaaaaaacaaaatcaagaatgtctgaatttaatgaagaattgaatcttattagaagtgaattgcagaatgctgggattgatacccatgagggaaaacgtcagcaaaagagagcagaggttctggaacaccttaaaagactgtacccagattctgtgtttggaagactatttgacctgtgtcatcctattcataagaaataccagctggctgttactaaggtttttggccggttcatcactgccattgttgtagcctctgaaaaggtagcaaaagattgtattcgatttctgaaggaggaaagagctgaacctgagacattcctcgctctagattaccttgatatcaagccaatcaatgaaagactaagggagcttaaaggctgtaaaatggtgattgatgtcataaagactcagtttcctcagctgaagaaagtgattcagtttgtgtgtggaaatggtcttgtttgtgagactatggaagaagcaaggcatattgcactcagtggacctgaaagacagaaaacagtagctcttgatggaacattatttttaaaatctggagtgatctctggagggtcaagtgacttaaaatacaaggctagatgctgggatgagaaagagttaaagaatctaagagacagacgaagccagaaaatccaagagctaaagggtttaatgaagacactccgcaaagaaacagatttgaaacaaatacagaccctgatacagggaactcaaacacgactcaaatattcacaaaatgaactagagatgattaagaagaagcaccttgttgctttttaccaggaacaatctcagttacaaagtgaactactaaatattgagtctcaatgtattatgttgagtgaaggaatcaaggaacgacaacgaagaattaaagaatttcaagaaaagatagataaggtagaagacgatatcttccaacacttctgtgaagaaattggcgtggaaaatattcgtgaatttgagaacaaacatgttaaacggcaacaagaaattgatcaaaaaagattagaatttgaaaaacaaaaaactcggcttaatgttcaacttgagtatagtcgcagtcaccttaagaagaaactgaataagatcaacacattaaaagaaactatccagaaaggtagtgaagatattgatcacctaaagaaggctgaagaaaactgtctgcagacagtgaatgaactcatggcaaagcagcagcaacttaaggacatacgtgtcactcagaactccagtgccgagaaagttcaaactcaaattgaagaggaacggaagaagtttctggctgttgatagggaagtggggaaattgcaaaaagaagttgtaagtattcaaacttctctggaacagaaacgattagagaagcataacttgctgcttgattgcaaagtgcaagacattgagataatccttttgtcggggtcactggatgacatcattgaagtggagatgggaactgaagcagaaagtacccaggcaacaattgatatctatgaaaaagaagaagcctttgaaatagactacagctctctaaaagaggatttgaaggctctacagtctgatcaagaaatcgaggcccaccttaggctcttattgcagcaagtagcatcccaggaagatatcttactgaaaacagcagccccaaacctacgagcactggagaacttaaagactgtcagagacaagtttcaagagtccacagatgcttttgaggccagcagaaaggaagccagactgtgtaggcaagagttcgagcaagtgaaaaaaaggagatacgatcttttcacccagtgttttgagcatgtctcaatctcaattgatcaaatctacaagaagctctgcagaaacaacagcgcccaagtgtcaagttacatcaaagagcaaactcaagaccagtttcagatgatagtcatctccctaaaagaagagttctattccagagccgacgcgctgatcggcatctatcctgagtacgatgactgcatgttcagccgagttttgaccctagatctttctcagtatccagacactgaaggccaagaaagcagcaagagacacggagagtcccgctaggggcagtcctgcagcagtcacctgatcactgttcagttcccactctaatactcacacagctcctccacaggagacttctggagcaagcaggaccagcc

SEQ ID NO: 109754 - DNA, 3486 bp, Artificial Sequence
  derived and/or modified sequence
atggcccatctcgaacttctgcttgtggagaactttaagagttggagggggaggcaggtgataggccctttccgcagatttacctgcatcattggcccaaacgggtctgggaagagtaacgtgatggatgctctgagctttgtcatgggtgagaagatagctaatctgcgtgtgaaaaatatccaggaactgattcatggcgctcatatcgggaagcccatcagtagtagtgcttccgtcaagatcatctacgtggaggagtccggcgaggaaaaaactttcgccagaataattcgcggaggctgttccgaattccggttcaacgataatctggtgtctcgcagcgtttatattgccgagctggaaaagatcggtattattgtgaaggctcagaactgcctggttttccagggcaccgtggaatcaatctccgttaagaagccgaaagagcggacccaattttttgaggagatctccacgtcgggagaactgattggcgagtacgaggaaaagaagcggaaactccagaaggctgaggaggatgcgcagttcaatttcaacaaaaaaaaaaacatcgcagcagaaaggcgccaggctaagctggaaaaggaagaggccgagcgctatcagagcctcctggaggagttgaagatgaacaagatacagctgcagctatttcagctttatcacaacgagaaaaagatacacctcctgaataccaagctggaacacgtgaaccgggatctttcagtaaagcgcgaatctctgtcccatcacgagaacatcgtgaaagctcggaaaaaggagcacggcatgctgactcgtcaacttcaacaaaccgagaaggagctcaaatccgtggagacgctccttaatcagaaacgaccgcagtacattaaggctaaggaaaacacgagtcaccatctcaagaagctggatgtggccaagaagtccatcaaggacagcgagaagcagtgtagcaagcaggaggacgacataaaagcccttgagaccgaattggccgatttggatgccgcttggcgcagcttcgagaagcagattgaggaggagatcctacacaaaaagagggatatcgagctagaagcatctcagcttgaccgttacaaggaactgaaggagcaggtgagaaaaaaagttgccactatgacccaacagctcgaaaagttgcaatgggaacaaaaaactgatgaggagcgcctcgcctttgaaaagaggcggcacggagaggtgcaggggaatcttaagcagataaaggagcaaattgaggaccataagaaacgtatagagaaattggaggagtacaccaagacctgcatggactgcttgaaagagaagaagcaacaggaggagacactggtcgacgaaatagagaaaaccaagtcgagaatgagcgaattcaacgaggagctgaatttgatacgctcagagctgcagaacgctggaattgacactcacgaagggaagaggcagcagaagagagccgaggtactggaacacttgaaaagactgtaccccgattccgtgttcgggaggctgtttgacctttgccacccaatacacaaaaaatatcagctggctgttacaaaggtcttcggcaggttcattacggccattgtggtggcatcggagaaggtggccaaggattgtataagattcttgaaggaagagcgcgctgaacccgagacctttctggcactagactatctggacatcaagcctatcaacgaaagacttagggagctcaaaggctgcaagatggtgatagacgtcatcaagacacagttcccacaactcaaaaaagtgatccagtttgtgtgcggcaacggtctggtgtgcgaaaccatggaggaggccagacatatcgccctctccggacccgaacgccagaagaccgtcgccttggacggcaccctcttcttaaaatccggagtgattagtgggggaagcagtgatctgaaatataaggcgagatgttgggatgagaaagagttaaaaaaccttcgcgaccgaagaagccaaaagatccaggagcttaaggggttaatgaagactctgcgcaaggagactgatctaaagcagattcagaccctcatacagggaactcagactcggctaaagtacagccaaaacgagctggaaatgataaagaagaagcatctagtggcattttaccaagagcaatcacagctgcagagcgagcttctgaacattgagtcccagtgcattatgctatcggaaggcataaaagagaggcagagaaggatcaaggagttccaagagaagatcgataaagttgaggatgatatatttcagcacttctgcgaggaaattggcgtggagaacatccgagaatttgagaataaacatgtcaaaagacagcaggaaatagaccagaagaggttagagtttgagaagcagaaaacacggctaaacgtgcagctcgaatactcgagaagccatctcaagaaaaaactgaataagatcaacacccttaaggaaaccattcagaaaggatccgaagatatcgatcacctcaagaaagcagaggaaaattgcctgcagactgttaacgaactgatggctaaacaacagcaactgaaagacatccgggtgacgcagaatagcagcgcagagaaggtgcagacgcagattgaagaagagaggaaaaaatttttggcggtggaccgggaagtgggaaagctccagaaggaggtcgtgtcaattcagaccagtcttgagcagaaacgattggagaaacataatttactccttgactgcaaggtacaagacattgaaatcattctcctcagcggctccctggatgatatcatcgaagtcgagatgggtacggaggccgagagcacccaggccacgattgatatttacgaaaaggaagaggcatttgagattgattacagttctctgaaagaggatctgaaagcattacagtcggaccaggagattgaggctcatctgaggctacttctgcagcaagtggcttcacaggaggatatcttattaaagactgcagcaccaaacctgcgagccctggagaacctgaagacagttcgagataaatttcaggaatctaccgacgccttcgaggcctcgaggaaggaggcccgactgtgccgacaagagttcgaacaggtaaagaaacggagatatgacctttttactcaatgctttgagcatgtcagcatttccatagaccagatatataagaaactctgtaggaacaactccgcccaggtttcaagttatatcaaagagcagacccaggatcaatttcagatgattgttatctccctgaaggaagaattctatagccgggctgatgctctcattggcatctaccccgaatatgacgattgcatgtttagccgcgtcctgacgttggatctaagtcagtaccccgatactgagggccaagagtccagtaaaaggcatggcgaaagtcggtag

SEQ ID NO: 109755 - DNA, 3486 bp, Artificial Sequence
  derived and/or modified sequence
atggcccacctggagctgctgctggtggagaacttcaagagctggagaggcagacaggtgatcggccccttcagaagattcacctgcatcatcggccccaacggcagcggcaagagcaacgtgatggacgccctgagcttcgtgatgggcgagaagatcgccaacctgagagtgaagaacatccaggagctgatccacggcgcccacatcggcaagcccatcagcagcagcgccagcgtgaagatcatctacgtggaggagagcggcgaggagaagaccttcgccagaatcatcagaggcggctgcagcgagttcagattcaacgacaacctggtgagcagaagcgtgtacatcgccgagctggagaagatcggcatcatcgtgaaggcccagaactgcctggtgttccagggcaccgtggagagcatcagcgtgaagaagcccaaggagagaacccagttcttcgaggagatcagcaccagcggcgagctgatcggcgagtacgaggagaagaagagaaagctgcagaaggccgaggaggacgcccagttcaacttcaacaagaagaagaacatcgccgccgagagaagacaggccaagctggagaaggaggaggccgagagataccagagcctgctggaggagctgaagatgaacaagatccagctgcagctgttccagctgtaccacaacgagaagaagatccacctgctgaacaccaagctggagcacgtgaacagagacctgagcgtgaagagagagagcctgagccaccacgagaacatcgtgaaggccagaaagaaggagcacggcatgctgaccagacagctgcagcagaccgagaaggagctgaagagcgtggagaccctgctgaaccagaagagaccccagtacatcaaggccaaggagaacaccagccaccacctgaagaagctggacgtggccaagaagagcatcaaggacagcgagaagcagtgcagcaagcaggaggacgacatcaaggccctggagaccgagctggccgacctggacgccgcctggagaagcttcgagaagcagatcgaggaggagatcctgcacaagaagagagacatcgagctggaggccagccagctggacagatacaaggagctgaaggagcaggtgagaaagaaggtggccaccatgacccagcagctggagaagctgcagtgggagcagaagaccgacgaggagagactggccttcgagaagagaagacacggcgaggtgcagggcaacctgaagcagatcaaggagcagatcgaggaccacaagaagagaatcgagaagctggaggagtacaccaagacctgcatggactgcctgaaggagaagaagcagcaggaggagaccctggtggacgagatcgagaagaccaagagcagaatgagcgagttcaacgaggagctgaacctgatcagaagcgagctgcagaacgccggcatcgacacccacgagggcaagagacagcagaagagagccgaggtgctggagcacctgaagagactgtaccccgacagcgtgttcggcagactgttcgacctgtgccaccccatccacaagaagtaccagctggccgtgaccaaggtgttcggcagattcatcaccgccatcgtggtggccagcgagaaggtggccaaggactgcatcagattcctgaaggaggagagagccgagcccgagaccttcctggccctggactacctggacatcaagcccatcaacgagagactgagagagctgaagggctgcaagatggtgatcgacgtgatcaagacccagttcccccagctgaagaaggtgatccagttcgtgtgcggcaacggcctggtgtgcgagaccatggaggaggccagacacatcgccctgagcggccccgagagacagaagaccgtggccctggacggcaccctgttcctgaagagcggcgtgatcagcggcggcagcagcgacctgaagtacaaggccagatgctgggacgagaaggagctgaagaacctgagagacagaagaagccagaagatccaggagctgaagggcctgatgaagaccctgagaaaggagaccgacctgaagcagatccagaccctgatccagggcacccagaccagactgaagtacagccagaacgagctggagatgatcaagaagaagcacctggtggccttctaccaggagcagagccagctgcagagcgagctgctgaacatcgagagccagtgcatcatgctgagcgagggcatcaaggagagacagagaagaatcaaggagttccaggagaagatcgacaaggtggaggacgacatcttccagcacttctgcgaggagatcggcgtggagaacatcagagagttcgagaacaagcacgtgaagagacagcaggagatcgaccagaagagactggagttcgagaagcagaagaccagactgaacgtgcagctggagtacagcagaagccacctgaagaagaagctgaacaagatcaacaccctgaaggagaccatccagaagggcagcgaggacatcgaccacctgaagaaggccgaggagaactgcctgcagaccgtgaacgagctgatggccaagcagcagcagctgaaggacatcagagtgacccagaacagcagcgccgagaaggtgcagacccagatcgaggaggagagaaagaagttcctggccgtggacagagaggtgggcaagctgcagaaggaggtggtgagcatccagaccagcctggagcagaagagactggagaagcacaacctgctgctggactgcaaggtgcaggacatcgagatcatcctgctgagcggcagcctggacgacatcatcgaggtggagatgggcaccgaggccgagagcacccaggccaccatcgacatctacgagaaggaggaggccttcgagatcgactacagcagcctgaaggaggacctgaaggccctgcagagcgaccaggagatcgaggcccacctgagactgctgctgcagcaggtggccagccaggaggacatcctgctgaagaccgccgcccccaacctgagagccctggagaacctgaagaccgtgagagacaagttccaggagagcaccgacgccttcgaggccagcagaaaggaggccagactgtgcagacaggagttcgagcaggtgaagaagagaagatacgacctgttcacccagtgcttcgagcacgtgagcatcagcatcgaccagatctacaagaagctgtgcagaaacaacagcgcccaggtgagcagctacatcaaggagcagacccaggaccagttccagatgatcgtgatcagcctgaaggaggagttctacagcagagccgacgccctgatcggcatctaccccgagtacgacgactgcatgttcagcagagtgctgaccctggacctgagccagtaccccgacaccgagggccaggagagcagcaagagacacggcgagagcagatag

SEQ ID NO: 109756 - protein, 198 aa, Artificial Sequence
  derived and/or modified sequence
MWGVFRRQTTHSSNPPLPGQQSCCNHRDFFCSGAMSEPAGDVRQNPCGSKACRRLFGPVDSEQLSRDCDALMAGCIQEARERWNFDFVTETPLEGDFAWERVRGLGLPKLYLPTGPRRGRDELGGGRRPGTSPALLQGTAEEDHVDLSLSCTLVPRSGEQAEGSPGGPGDSQGRKRRQTSMTDFYHSKRRLIFSKRKP

SEQ ID NO: 109757 - DNA, 597 bp, Artificial Sequence
  derived and/or modified sequence
atgtggggcgtgttcagaagacagaccacccacagcagcaacccccccctgcccggccagcagagctgctgcaaccacagagacttcttctgcagcggcgccatgagcgagcccgccggcgacgtgagacagaacccctgcggcagcaaggcctgcagaagactgttcggccccgtggacagcgagcagctgagcagagactgcgacgccctgatggccggctgcatccaggaggccagagagagatggaacttcgacttcgtgaccgagacccccctggagggcgacttcgcctgggagagagtgagaggcctgggcctgcccaagctgtacctgcccaccggccccagaagaggcagagacgagctgggcggcggcagaagacccggcaccagccccgccctgctgcagggcaccgccgaggaggaccacgtggacctgagcctgagctgcaccctggtgcccagaagcggcgagcaggccgagggcagccccggcggccccggcgacagccagggcagaaagagaagacagaccagcatgaccgacttctaccacagcaagagaagactgatcttcagcaagagaaagccctag

SEQ ID NO: 109758 - DNA, 2180 bp, Artificial Sequence
  derived and/or modified sequence
gaggcgggcccgggcggggcggttgtatatcagggccgcgctgagctgcgccagctgaggtgtgagcagctgccgaagtcagttccttgtggagccggagctgggcgcggattcgccgaggcaccgaggcactcagaggaggcgccatgtcagaaccggctggggatgtccgtcagaacccatgcggcagcaaggcctgccgccgcctcttcggcccagtggacagcgagcagctgagccgcgactgtgatgcgctaatggcgggctgcatccaggaggcccgtgagcgatggaacttcgactttgtcaccgagacaccactggagggtgacttcgcctgggagcgtgtgcggggccttggcctgcccaagctctaccttcccacggggccccggcgaggccgggatgagttgggaggaggcaggcggcctggcacctcacctgctctgctgcaggggacagcagaggaagaccatgtggacctgtcactgtcttgtacccttgtgcctcgctcaggggagcaggctgaagggtccccaggtggacctggagactctcagggtcgaaaacggcggcagaccagcatgacagatttctaccactccaaacgccggctgatcttctccaagaggaagccctaatccgcccacaggaagcctgcagtcctggaagcgcgagggcctcaaaggcccgctctacatcttctgccttagtctcagtttgtgtgtcttaattattatttgtgttttaatttaaacacctcctcatgtacataccctggccgccccctgccccccagcctctggcattagaattatttaaacaaaaactaggcggttgaatgagaggttcctaagagtgctgggcatttttattttatgaaatactatttaaagcctcctcatcccgtgttctccttttcctctctcccggaggttgggtgggccggcttcatgccagctacttcctcctccccacttgtccgctgggtggtaccctctggaggggtgtggctccttcccatcgctgtcacaggcggttatgaaattcaccccctttcctggacactcagacctgaattctttttcatttgagaagtaaacagatggcactttgaaggggcctcaccgagtgggggcatcatcaaaaactttggagtcccctcacctcctctaaggttgggcagggtgaccctgaagtgagcacagcctagggctgagctggggacctggtaccctcctggctcttgatacccccctctgtcttgtgaaggcagggggaaggtggggtcctggagcagaccaccccgcctgccctcatggcccctctgacctgcactggggagcccgtctcagtgttgagccttttccctctttggctcccctgtaccttttgaggagccccagctaccctttttctccagctgggctctgcaattcccctctgctgctgtccctcccccttgtcctttcccttcagtaccctctcagctccaggtggctctgaggtgcctgtcccacccccacccccagctcaatggactggaaggggaagggacacacaagaagaagggcaccctagttctacctcaggcagctcaagcagcgaccgccccctcctctagctgtgggggtgagggtcccatgtggtggcacaggcccccttgagtggggttatctctgtgttaggggtatatgatgggggagtagatctttctaggagggagacactggcccctcaaatcgtccagcgaccttcctcatccaccccatccctccccagttcattgcactttgattagcagcggaacaaggagtcagacattttaagatggtggcagtagaggctatggacagggcatgccacgtgggctcatatggggctgggagtagttgtctttcctggcactaacgttgagcccctggaggcactgaagtgcttagtgtacttggagtattggggtctgaccccaaacaccttccagctcctgtaacatactggcctggactgttttctctcggctccccatgtgtcctggttcccgtttctccacctagactgtaaacctctcgagggcagggaccacaccctgtactgttctgtgtctttcacagctcctcccacaatgctgaatatacagcaggtgctcaataaatgattcttagtgactttacttgtaa

SEQ ID NO: 109759 - DNA, 766 bp, Artificial Sequence
  derived and/or modified sequence
gagcagctgccgaagtcagttccttgtggagccggagctgggcgcggattcgccgaggcaccgaggcactcagaggaggaaaatccagttgctgccaaggtcgtgcagtcactcagccctggagtcaagccagagcaggcaggcgccatgtcagaaccggctggggatgtccgtcagaacccatgcggcagcaaggcctgccgccgcctcttcggcccagtggacagcgagcagctgagccgcgactgtgatgcgctaatggcgggctgcatccaggaggcccgtgagcgatggaacttcgactttgtcaccgagacaccactggagggtgacttcgcctgggagcgtgtgcggggccttggcctgcccaagctctaccttcccacggggccccggcgaggccgggatgagttgggaggaggcaggcggcctggcacctcacctgctctgctgcaggggacagcagaggaagaccatgtggacctgtcactgtcttgtacccttgtgcctcgctcaggggagcaggctgaagggtccccaggtggacctggagactctcagggtcgaaaacggcggcagaccagcatgacagatttctaccactccaaacgccggctgatcttctccaagaggaagccctaatccgcccacaggaagcctgcagtcctggaagcgcgagggcctcaaaggcccgctctacatcttctgccttagtctcagtttgtgtgtcttaattattatttgtgttttaatttaaacacctcct

SEQ ID NO: 109760 - DNA, 2261 bp, Artificial Sequence
  derived and/or modified sequence
agctgaggtgtgagcagctgccgaagtcagttccttgtggagccggagctgggcgcggattcgccgaggcaccgaggcactcagaggaggtgagagagcggcggcagacaacaggggaccccgggccggcggcccagagccgagccaagcgtgcccgcgtgtgtccctgcgtgtccgcgaggatgcgtgttcgcgggtgtgtgctgcgttcacaggtgtttctgcggcaggcgccatgtcagaaccggctggggatgtccgtcagaacccatgcggcagcaaggcctgccgccgcctcttcggcccagtggacagcgagcagctgagccgcgactgtgatgcgctaatggcgggctgcatccaggaggcccgtgagcgatggaacttcgactttgtcaccgagacaccactggagggtgacttcgcctgggagcgtgtgcggggccttggcctgcccaagctctaccttcccacggggccccggcgaggccgggatgagttgggaggaggcaggcggcctggcacctcacctgctctgctgcaggggacagcagaggaagaccatgtggacctgtcactgtcttgtacccttgtgcctcgctcaggggagcaggctgaagggtccccaggtggacctggagactctcagggtcgaaaacggcggcagaccagcatgacagatttctaccactccaaacgccggctgatcttctccaagaggaagccctaatccgcccacaggaagcctgcagtcctggaagcgcgagggcctcaaaggcccgctctacatcttctgccttagtctcagtttgtgtgtcttaattattatttgtgttttaatttaaacacctcctcatgtacataccctggccgccccctgccccccagcctctggcattagaattatttaaacaaaaactaggcggttgaatgagaggttcctaagagtgctgggcatttttattttatgaaatactatttaaagcctcctcatcccgtgttctccttttcctctctcccggaggttgggtgggccggcttcatgccagctacttcctcctccccacttgtccgctgggtggtaccctctggaggggtgtggctccttcccatcgctgtcacaggcggttatgaaattcaccccctttcctggacactcagacctgaattctttttcatttgagaagtaaacagatggcactttgaaggggcctcaccgagtgggggcatcatcaaaaactttggagtcccctcacctcctctaaggttgggcagggtgaccctgaagtgagcacagcctagggctgagctggggacctggtaccctcctggctcttgatacccccctctgtcttgtgaaggcagggggaaggtggggtcctggagcagaccaccccgcctgccctcatggcccctctgacctgcactggggagcccgtctcagtgttgagccttttccctctttggctcccctgtaccttttgaggagccccagctaccctttttctccagctgggctctgcaattcccctctgctgctgtccctcccccttgtcctttcccttcagtaccctctcagctccaggtggctctgaggtgcctgtcccacccccacccccagctcaatggactggaaggggaagggacacacaagaagaagggcaccctagttctacctcaggcagctcaagcagcgaccgccccctcctctagctgtgggggtgagggtcccatgtggtggcacaggcccccttgagtggggttatctctgtgttaggggtatatgatgggggagtagatctttctaggagggagacactggcccctcaaatcgtccagcgaccttcctcatccaccccatccctccccagttcattgcactttgattagcagcggaacaaggagtcagacattttaagatggtggcagtagaggctatggacagggcatgccacgtgggctcatatggggctgggagtagttgtctttcctggcactaacgttgagcccctggaggcactgaagtgcttagtgtacttggagtattggggtctgaccccaaacaccttccagctcctgtaacatactggcctggactgttttctctcggctccccatgtgtcctggttcccgtttctccacctagactgtaaacctctcgagggcagggaccacaccctgtactgttctgtgtctttcacagctcctcccacaatgctgaatatacagcaggtgctcaataaatgattcttagtgacttt

SEQ ID NO: 109761 - DNA, 1157 bp, Artificial Sequence
  derived and/or modified sequence
agtttccccagcagtgtatacgggctatgtggggagtattcaggagacagacaactcactcgtcaaatcctccccttcctggccaacaaagctgctgcaaccacagggatttcttctgttcaggcgccatgtcagaaccggctggggatgtccgtcagaacccatgcggcagcaaggcctgccgccgcctcttcggcccagtggacagcgagcagctgagccgcgactgtgatgcgctaatggcgggctgcatccaggaggcccgtgagcgatggaacttcgactttgtcaccgagacaccactggagggtgacttcgcctgggagcgtgtgcggggccttggcctgcccaagctctaccttcccacggggccccggcgaggccgggatgagttgggaggaggcaggcggcctggcacctcacctgctctgctgcaggggacagcagaggaagaccatgtggacctgtcactgtcttgtacccttgtgcctcgctcaggggagcaggctgaagggtccccaggtggacctggagactctcagggtcgaaaacggcggcagaccagcatgacagatttctaccactccaaacgccggctgatcttctccaagaggaagccctaatccgcccacaggaagcctgcagtcctggaagcgcgagggcctcaaaggcccgctctacatcttctgccttagtctcagtttgtgtgtcttaattattatttgtgttttaatttaaacacctcctcatgtacataccctggccgccccctgccccccagcctctggcattagaattatttaaacaaaaactaggcggttgaatgagaggttcctaagagtgctgggcatttttattttatgaaatactatttaaagcctcctcatcccgtgttctccttttcctctctcccggaggttgggtgggccggcttcatgccagctacttcctcctccccacttgtccgctgggtggtaccctctggaggggtgtggctccttcccatcgctgtcacaggcggttatgaaattcaccccctttcctggacactcagacctgaattctttttcatttgagaagtaaacagatggcactttgaaggggcctcaccgagtgggggcatcatcaaaaactttggagtcccctcacctcctcta

SEQ ID NO: 109762 - DNA, 597 bp, Artificial Sequence
  derived and/or modified sequence
atgtggggagtcttccggcgacagacaacacactccagcaatccgcccctgcccggccagcaatcttgctgtaatcaccgggatttcttctgttcaggggctatgagcgagccagccggcgacgttcgtcaaaatccatgtggaagtaaagcatgcaggagactgtttggacccgtggattcggagcagctgtccagggactgtgacgctttgatggcaggatgtatacaagaggctagagagcggtggaatttcgacttcgtgactgagacccccctggagggagactttgcctgggaacgcgtgcgcgggctgggtctgcctaaactgtatcttcctacaggcccccggcgtggacgagatgagttaggcggaggaagaaggccaggcactagtccagctctgcttcagggaacagcggaggaagatcatgtagacctttcactctcatgcactctcgtgcccagaagtggcgaacaggccgagggctcccccggaggccctggcgactcacaaggccggaaaagacgccagacctcaatgaccgatttctaccattctaagcgtagactcattttttccaaacgaaaaccttag

SEQ ID NO: 109763 - DNA, 597 bp, Artificial Sequence
  derived and/or modified sequence
atgtggggcgtcttccggcggcagaccacccacagcagcaacccccccctgcccggccagcagagctgctgcaaccaccgggacttcttctgcagcggggccatgtctgagcctgctggagatgtgcggcagaacccctgtggcagcaaggcctgcagaagactctttggacctgtggacagcgagcagctgagccgggactgtgatgccctgatggccggctgcatccaggaggcccgggagcgctggaactttgattttgtgacagagacccccctggagggggactttgcctgggagcgggtgcggggcctgggcctgcccaagctgtacctgcccaccggcccccggcggggcagagatgagctgggcggcggcagaagacctggcaccagccctgccctgctgcagggcacagctgaggaggaccacgtggacctgagcctgagctgcaccctggtgcccaggtctggagagcaggccgagggcagccctgggggccctggggacagccagggcaggaagaggcggcagacctccatgacagacttctaccacagcaagagaagactcatcttcagcaagaggaagccctag

SEQ ID NO: 109764 - DNA, 597 bp, Artificial Sequence
  derived and/or modified sequence
atgtggggcgtgttccggcggcagaccacccacagcagcaacccccccctacctggacaacaaagttgctgcaatcaccgagattttttctgttcaggtgcaatgagcgaacccgccggtgacgtccgccaaaacccgtgtgggtccaaagcatgtcgtcgactgttcggtcccgtagactccgaacagctctccagagactgtgatgccttgatggccggatgcattcaggaggctcgtgagaggtggaattttgatttcgtgacagagacccccctggaaggggatttcgcctgggaaagagtccggggtctgggattgccaaaactctatctccccaccggcccccggagaggcagggatgaacttggtggcggccgcaggcccggaacatccccagcacttctgcaaggcaccgcagaagaggaccatgtggacctgtccctgtcgtgtaccctcgtgccaagaagcggggagcaggcggagggttctcctggcggtcctggcgacagccagggcagaaagcggagacagacatccatgactgatttttaccacagtaaaagacggctgatcttttccaaaaggaagccatag

SEQ ID NO: 109765 - DNA, 597 bp, Artificial Sequence
  derived and/or modified sequence
atgtggggggtgtttcgcagacagactactcactcctcaaaccctcccctccccggtcagcaaagctgttgtaaccaccgagacttcttctgttctggcgcaatgtccgagcccgctggagatgtcaggcagaatccctgcggctccaaggcttgtagacggctgtttggccctgtggattccgaacagctgtccagggattgtgacgccctgatggcagggtgtattcaagaggcaagggagcgttggaattttgattttgttaccgaaaccccactggagggcgactttgcttgggagcgggtgaggggcttggggctgcccaaactctacttgcccaccggccctaggcgcggtcgtgatgagctaggagggggaaggcggccagggacgtctcccgcattgctgcagggcacggcagaagaggaccacgtggacctaagcctcagttgcacgctcgtcccgaggtccggtgagcaggccgaggggagccctggtggacccggagattcccaaggccgaaaacgccgacagacttctatgaccgacttctatcactcaaagcggaggctaatcttctcgaaaaggaaaccttag

SEQ ID NO: 109766 - DNA, 600 bp, Artificial Sequence
  derived and/or modified sequence
ccgaaggtcagttccttgtggagccggagctgggcgcggattcgccgaggcaccgaggcactcagaggaggcgccatgtcagaaccggctggggatgtccgtcagaacccatgcggcagcaaggcctgccgccgcctcttcggcccagtggacagcgagcagctgagccgcgactgtgatgcgctaatggcgggctgcatccaggaggcccgtgagcgatggaacttcgactttgtcaccgagacaccactggagggtgacttcgcctgggagcgtgtgcggggccttggcctgcccaagctctaccttcccacggggccccggcgaggccgggatgagttgggaggaggcaggcggcctggcacctcacctgctctgctgcaggggacagcagaggaagaccatgtggacctgtcactgtcttgtacccttgtgcctcgctcaggggagcaggctgaagggtccccaggtggacctggagactctcagggtcgaaaacggcggcagaccagcatgacagatttctaccactccaaacgccggctgatcttctccaagaggaagccctaatccgcccacaggaagcctgcagtcctggaa

SEQ ID NO: 109767 - protein, 937 aa, Artificial Sequence
  derived and/or modified sequence
MEPQVTLNVTFKNEIQSFLVSDPENTTWADIEAMVKVSFDLNTIQIKYLDEENEEVKIVLLGEYEEALKMAVKQGNQLQMQVHEGHHVVDEAPPPVVGAKRLAARAGKKPLAHYSSLVRVLGSDMKTPEDPAVQSFPLVPCDTDQPQDKPPDWFTSYLETFREQVVNETVEKLEQKLHEKLVLQNPSLGSCPSEVSMPTSEETLFLPENQFSWHIACNNCQRRIVGVRYQCSLCPSYNICEDCEAGPYGHDTNHVLLKLRRPVVGSSEPFCHSKYSTPRLPAALEQVRLQKQVDKNFLKAEKQRLRAEKKQRKAEVKELKKQLKLHRKIHLWNSIHGLQSPKSPLGRPESLLQSNTLMLPLQPCTSVMPMLSAAFVDENLPDGTHLQPGTKFIKHWRMKNTGNVKWSADTKLKFMWGNLTLASTEKKDVLVPCLKAGHVGVVSVEFIAPALEGTYTSHWRLSHKGQQFGPRVWCSIIVDPFPSEESPDNIEKGMISSSKTDDLTCQQEETFLLAKEERQLGEVTEQTEGTAACIPQKAKNVASERELYIPSVDLLTAQDLLSFELLDINIVQELERVPHNTPVDVTPCMSPLPHDSPLIEKPGLGQIEEENEGAGFKALPDSMVSVKRKAENIASVEEAEEDLSGTQFVCETVIRSLTLDAAPDHNPPCRQKSLQMTFALPEGPLGNEKEEIIHIAEEEAVMEEEEDEEDEEEEDELKDEVQSQSSASSEDYIIILPECFDTSRPLGDSMYSSALSQPGLERGAEGKPGVEAGQEPAEAGERLPGGENQPQEHSISDILTTSQTLETVPLIPEVVELPPSLPRSSPCVHHHGSPGVDLPVTIPEVSSVPDQIRGEPRGSSGLVNSRQKSYDHSRHHHGSSIAGGLVKGALSVAASAYKALFAGPPVTAQGLWGLLSFLHLAKKCFFLKAPSEAFSWF

SEQ ID NO: 109768 - DNA, 2814 bp, Artificial Sequence
  derived and/or modified sequence
atggagccccaagttaccttgaatgttactttcaaaaatgagattcaaagtttccttgttagcgaccctgaaaacactacatgggccgatatcgaagccatggtgaaagtgtcctttgacttgaacactatccagatcaaatacctagatgaggagaatgaggaggttaagattgttctgctaggcgaatacgaagaggccttgaagatggcggtaaagcagggaaaccagctgcagatgcaggtacatgaagggcaccatgttgtcgatgaagccccaccccccgtagtcggagccaagcgcctagcagctagagcaggtaaaaaacccctggcccactactcatcccttgtgcgggtgctgggcagcgacatgaaaacgccggaggaccccgccgtgcaaagctttcctctcgtgccatgcgacactgaccagccacaggataaaccccccgattggtttacctcctatctcgaaactttcagggagcaggtggtcaatgagacggttgaaaagctcgagcagaagctgcacgaaaagctagttttgcagaatccttccttgggatcgtgcccttctgaagtgtccatgccgacctccgaggaaactttgtttcttcccgagaaccaattcagctggcatatcgcttgtaacaactgtcagcgacgaatagtcggcgtgaggtaccagtgttcattatgcccttcctataatatatgtgaagactgcgaagcaggcccgtatggacatgacaccaaccatgttcttctgaagctgagacgcccggtggttggctcaagcgagcctttttgtcatagtaagtattctacccctcgcctgccagccgcattggagcaggtgaggctgcaaaagcaggtggacaaaaacttcctgaaggccgagaagcagcgcctaagagccgagaagaaacagagaaaggcagaggtgaaagaactgaagaaacagctgaagctgcaccgtaaaatccatctatggaatagtatccacggactacagtcgccaaaaagccctctgggaaggccggagtcactgctgcagagcaacactcttatgctccctctccagccttgtacttctgtgatgcccatgctgagcgctgcttttgtagacgagaatctcccagatggaacgcacctacagccaggaacaaagttcataaagcattggagaatgaaaaataccggtaacgttaagtggagtgcagatacaaagttgaaattcatgtggggcaaccttactctggcatccacagaaaagaaggatgtcctcgttccatgtttaaaagccggccacgttggtgtggtgagcgttgagttcatcgcaccagccctggaaggcacctatacatcccactggaggctctctcacaaaggacagcagtttggaccccgagtctggtgttctatcatcgtggatcccttccccagcgaggaatcccccgacaatattgagaaaggaatgatctcatcatctaagaccgatgacctcacttgccagcaagaggagaccttcctgttagccaaagaggagcggcaactaggtgaagtaaccgaacagacagaaggcactgcggcgtgcatcccccaaaaagcgaaaaacgtggcctccgagcgtgagctctacataccctcagtggatctgctgacagcccaggacttgctaagctttgaactgctcgacatcaatatcgtgcaagaacttgaacgtgtcccacacaacacgcccgtcgatgtcaccccctgtatgtcacccttaccacatgactcacccttaatcgagaagccggggcttgggcagattgaagaggaaaacgaaggcgcaggattcaaggccttacctgacagcatggtgtctgtgaagcgcaaggctgagaatattgccagcgtcgaggaagccgaggaagatttatctgggacgcagtttgtgtgcgagactgtgatcagatccttgactctggacgccgcgcctgatcataacccaccttgcagacagaagtccctgcagatgacattcgcccttcccgagggcccactcggcaacgagaaggaggagatcattcacatcgccgaagaagaagctgtcatggaagaggaagaagatgaagaggacgaggaagaagaggatgaacttaaagacgaggtgcaatcccagtccagcgccagtagtgaagactacatcatcatactacccgagtgctttgacaccagccgacccctgggcgatagtatgtattcaagcgcgctgtcacagcctggcttggaacgtggcgcggagggcaagcctggagttgaggccggccaggagccagcagaggccggcgagaggctgcctggaggagaaaatcaaccacaggaacattccatctccgatattcttaccacctcacagactctggagaccgtgccactgattcccgaagtcgtggaattacctccaagtcttcctcgcagcagcccttgtgtacaccaccacggctccccaggtgtcgacttaccagtgactatcccagaagtgtcctccgtgcccgaccagattcgaggtgagccgcgaggtagctccgggctcgtgaactcccgccagaagagctatgaccacagcagacatcaccacggctcttcaattgcagggggcctggtgaagggtgctctgtctgtcgctgcatctgcctacaaggcgctgtttgctggccccccagtgactgcccagggactgtgggggttattgtcttttctccacctagctaaaaagtgcttctttttgaaagctccttcggaagccttcagctggttctag

SEQ ID NO: 109769 - DNA, 2814 bp, Artificial Sequence
  derived and/or modified sequence
atggagccccaggtgaccctgaatgtgaccttcaagaatgagatccagagcttcctggtgtctgaccctgagaacaccacctgggccgacatcgaggccatggtgaaggtgtcctttgacctgaacaccatccagatcaagtacctggatgaggagaatgaggaggtgaagatcgtgctgctgggggagtatgaggaggccctgaagatggctgtgaagcagggcaaccagctgcagatgcaggtgcatgagggccaccacgtggtggatgaggcccctcctcctgtggtgggcgccaagaggctggccgcccgggccggcaagaagcccctggcccactacagcagcctggtgcgggtgctgggcagtgacatgaagaccccagaagatcctgctgtgcagagcttccccctggtgccctgtgacacagaccagccccaggacaagcccccagactggttcaccagctacctggagaccttccgggagcaggtggtgaatgaaacagtggagaagctggagcagaagctgcacgagaagctggtgctgcagaaccccagcctgggcagctgccccagcgaggtgtccatgcccaccagcgaggagaccctcttcctgcctgagaaccagttctcctggcacatcgcctgcaacaactgccagaggcgcatcgtgggcgtgcgctaccagtgcagcctgtgccccagctacaacatctgtgaggactgtgaggccggcccctacggccatgacaccaaccacgtgctgctgaagctgcggcggcctgtggtgggcagcagcgagcccttctgccacagcaagtacagcaccccccggctgcctgctgccctggagcaggtgcggctgcagaagcaggtggacaagaacttcctgaaggccgagaagcagaggctgcgggcagagaagaagcagaggaaggccgaggtgaaggagctgaagaagcagctgaagctgcacaggaagatccacctgtggaacagcatccacggcctgcagagccccaagagccccctgggccggcctgagagcctgctgcagagcaacaccctgatgctgcccctgcagccctgcacctctgtgatgcccatgctgtctgctgcctttgtggatgagaacctgcctgatggcacccacctgcagcccggcaccaagttcatcaagcactggaggatgaagaacacaggaaatgtgaagtggagcgctgacaccaagctgaagttcatgtggggcaacctgaccctggccagcacagagaagaaggatgtgctggtgccctgcctgaaggccggccacgtgggcgtggtgtctgtggagttcatcgccccagccctggagggcacctacaccagccactggaggctgagccacaagggccagcagtttggcccccgggtgtggtgcagcatcatcgtggaccccttccccagcgaggagagcccagacaacatcgagaagggcatgatcagcagcagcaagacagatgacctgacctgccagcaggaggagaccttcctgctggccaaggaggagcggcagctgggggaggtgacagagcagacagagggcacagctgcctgcatcccccagaaggccaagaatgtggccagcgagcgggagctgtacatccccagcgtggacctgctgacagcccaggacctgctgagctttgagctgctggacatcaacatcgtgcaggagctggagcgggtgccccacaacacccctgtggatgtgaccccctgcatgagccccctgccccatgacagccccctgattgagaagccaggcctgggccagatcgaggaggagaatgaaggagctggcttcaaggccctgcctgacagcatggtgtctgtgaagaggaaggcagaaaatattgcctctgtggaggaggccgaggaggacctgagcggcacccagtttgtgtgtgagaccgtcatccgcagcctgaccctggatgctgccccagaccacaaccccccctgccggcagaagagcctgcagatgacctttgccctgcctgagggccccctgggcaatgagaaggaggagatcatccacatcgccgaggaggaggccgtgatggaggaggaggaggatgaagaagatgaggaggaggaggatgagctgaaggatgaggtgcagagccagagcagcgccagcagcgaggactacatcatcatcctgcctgagtgctttgacaccagccggcccctgggggacagcatgtacagcagcgccctgagccagcccggcctggagagaggagctgagggcaagccaggagtggaggccggccaggagcctgctgaggccggggagcggctgcctggaggagagaaccagccccaggagcacagcatcagtgacatcctgaccaccagccagaccctggagaccgtgcccctcatccctgaggtggtggagctgccccccagcctgcccaggagcagcccctgtgtgcaccaccacggcagccctggggtggacctgcctgtgaccatccctgaggtgtcctctgtgcctgaccagatccggggggagccccggggcagcagcggcctggtgaacagccggcagaagagctatgaccacagccgccaccaccacggcagcagcattgctgggggcctggtgaagggggccctgtctgtggccgccagcgcctacaaggccctgtttgctggcccccctgtgacagcccagggcctgtggggcctgctgtccttcctgcacctggccaagaagtgcttcttcctgaaggcccccagcgaggccttctcctggttctag

SEQ ID NO: 109770 - DNA, 2814 bp, Artificial Sequence
  derived and/or modified sequence
atggagccccaggtgaccctgaacgtgaccttcaagaacgagatccagagtttccttgtgagtgaccccgaaaatacaacttgggccgacatcgaagccatggttaaggtctcatttgatctgaatactattcagatcaaatacctcgacgaggaaaatgaggaggtcaagattgtccttcttggggagtacgaggaagccctgaagatggctgtcaaacaggggaaccagctgcagatgcaagtgcatgaaggacaccatgtcgtcgatgaggcccccccaccggtggtgggggccaagcggcttgccgcgcgcgcggggaagaagccattggcccattattccagccttgtcagggtgctggggagtgacatgaagacaccggaagatcccgcagttcagagctttccactcgtgccttgcgacactgatcaacctcaagacaagccacccgattggtttacatcgtatctggagacatttcgcgaacaggtagtgaatgagacagttgaaaagttggaacagaaattacacgaaaaactggttctgcagaatcccagtctgggttcatgtccgagcgaagtgtccatgccaacctccgaagaaacacttttcctcccggagaaccagttttcatggcacatcgcatgcaacaattgtcagagacgcatcgtgggagtccgttatcagtgttccttgtgtcctagttataatatctgtgaagattgtgaggccggaccttacggacatgatacgaaccacgtgcttttaaagctgagacggcccgttgtcggaagcagtgagcccttctgccattcgaagtacagtacaccaagacttcctgccgccctggagcaggttcggctgcagaagcaagtggacaaaaactttctcaaagctgaaaagcagcggctcagggctgagaaaaagcaacggaaggcagaggtaaaagagctcaagaaacagctcaaactccaccggaagatccacctgtggaatagcattcacgggttgcagtcacctaaatctcctcttggcaggcccgagtcactgctccaaagcaataccctgatgctgccattgcagccgtgcacgtccgtgatgccgatgctgagcgccgcctttgttgatgagaatctcccagacgggacacacctgcaacccgggaccaagttcatcaagcactggagaatgaagaacactgggaatgttaagtggtcagccgatacaaaactcaaatttatgtggggtaaccttaccctggcctcaaccgagaagaaggacgtgctcgtgccgtgtctgaaggcagggcacgtgggagtcgtttccgttgagttcattgcccctgccctggaaggaacatacacgtcccactggaggctgtctcacaaaggccagcagtttggacccagggtctggtgctccatcattgtagatccattcccgagcgaggaatccccagacaatatcgagaagggaatgatctcctctagcaagacagatgatctgacctgtcagcaggaagagacctttttgttggcaaaggaagaaagacagctcggagaggtcactgagcagacggagggtaccgccgcgtgcatccctcagaaggctaagaatgtcgccagcgaaagagagctgtatattcccagtgtggatcttctgactgctcaggatctgctgtcattcgagcttcttgacatcaacattgtccaggaactggaaagagtcccccacaatactcccgtggatgtcacgccctgcatgagccctctgccgcatgattcacctttgatagagaaacctgggctcggtcaaatagaggaggaaaatgagggcgcaggatttaaagccttgccagacagcatggtctccgttaagcgaaaggccgaaaatattgcctctgttgaggaggccgaggaggacttgtccgggacccagtttgtgtgcgagacagtgatcaggtctctcaccttagacgccgcacctgaccataaccccccctgtagacagaaaagcctgcagatgacttttgctctcccagaaggccctttgggaaatgaaaaagaggagatcatccacatagccgaggaagaagcagtcatggaagaggaagaggatgaagaggacgaggaggaggaggacgagttgaaagatgaagtgcagtcccagtcaagtgcttcttccgaagactacatcataatcctgcctgaatgcttcgacacttctcgccccctgggggattcaatgtatagcagtgccttgagccagcccggcctggagaggggggccgagggaaaacccggtgttgaagccgggcaggaaccggcggaggccggagagcgcctgccgggcggagaaaaccagccgcaggagcatagtatctccgatatcttgaccacgagccagactctggaaacagtgcctctgatacccgaggttgtagagctaccaccttccctgccccggtcctcaccatgcgttcaccaccatggctccccaggcgtcgacctgcctgttaccataccagaggtgagctctgtgcccgaccagattaggggtgagccgcgcgggtcatcgggattagtgaactctaggcagaagagttacgaccactcccgacatcaccatggctcctctattgccgggggactggtgaaaggcgccctgtctgtggcagcatcggcctataaggccttatttgctggcccccccgtcaccgcacagggtctgtgggggcttcttagttttctccacctggccaagaaatgcttctttcttaaagcgccgagcgaggccttcagctggttttag

SEQ ID NO: 109771 - DNA, 2897 bp, Artificial Sequence
  derived and/or modified sequence
ggatagcggcagagccggtagcggacggtccttgcattggcctccggcaggcgccccccgggggcgggaagctgcctcacagcatggaaccacaggttactctaaatgtgacttttaaaaatgaaattcaaagctttctggtttctgatccagaaaatacaacttgggctgatatcgaagctatggtaaaagtttcatttgatctgaatactattcaaataaaatacctggatgaggaaaatgaagaggtaaaaatagttcttttaggagaatatgaagaagcgcttaagatggcagttaaacagggaaaccaactgcagatgcaagtccacgaagggcaccatgtcgttgatgaagccccacccccagttgtaggagcaaaacgactagctgccagggcagggaagaagccacttgcacattactcttcactggtgagagtcttgggatcagacatgaagaccccagaggatcctgcagtgcagtcgtttccacttgttccatgtgacacagaccagcctcaagacaagcccccagactggttcacaagctacctggagacgttcagagaacaagtggttaacgaaacggttgagaagcttgaacagaaattacatgaaaagcttgtcctccagaacccatccttgggttcttgtccctcagaagtctcaatgcctacttcagaagaaacattgtttttgccagaaaaccagttcagctggcatattgcttgcaacaactgccaaagaaggattgttggtgtccgctaccagtgtagcctatgcccatcctacaatatctgtgaagattgtgaagcagggccatatggccatgacactaaccacgtcctgctgaagttgcggagacctgttgtgggctcctctgaaccgttctgtcactcaaagtactctactcctcgtcttcctgctgctctggaacaagtcaggctccagaaacaggttgataagaactttcttaaagcagaaaagcaaaggttgcgagctgagaagaaacaacgtaaagcagaggtcaaggaacttaaaaagcagcttaaactccataggaaaattcacctgtggaattcaatccatggactccagagccccaagtctcctttaggccgacctgagagcttgctccagtctaataccctgatgctccctttgcagccctgtacctccgttatgccaatgctcagtgcagcatttgtggatgagaatttgcctgatgggactcaccttcagccaggaaccaagtttatcaaacactggaggatgaaaaatacaggaaatgtaaagtggagtgcagacacaaagctcaagttcatgtggggaaacctgactttggcttccacagaaaagaaggatgttttggttccctgcctcaaggccggccatgtgggagttgtatctgtggagttcattgccccagccttggagggaacgtatacttcccattggcgtctttctcacaaaggccagcaatttgggcctcgggtctggtgcagtatcatagtagatcctttcccctccgaagagagccctgataacattgaaaagggcatgatcagctcaagcaaaactgatgatctcacctgccagcaagaggaaacttttcttctggctaaagaagaaagacagcttggtgaagtgactgagcagacagaagggacagcagcctgcatcccacagaaggcaaaaaatgttgccagtgagagggagctctacatcccatctgtggatcttctgactgcccaggacctgctgtcctttgagctgttggatataaacattgttcaagagttggagagagtgccccacaacacccctgtggatgtgactccctgcatgtctcctctgccacatgacagtcctttaatagagaagccaggcttggggcagatagaggaagagaatgaaggggcaggatttaaagcacttcctgattctatggtgtcagtaaagaggaaggctgagaacattgcttctgtggaggaagcagaagaagacctgagtgggacccagtttgtgtgtgagacagtaatccgatcccttaccttggatgctgccccagaccacaaccctccttgcagacagaagtccttgcagatgacatttgccttgcctgaaggaccacttggaaatgagaaggaggagattatccatatcgctgaggaagaagctgtcatggaggaggaggaggatgaggaggatgaggaggaggaggatgagctcaaagatgaagttcaaagtcagtcctctgcttcctcagaggattacatcatcatcctgcctgagtgctttgataccagccgccccctgggggattctatgtacagctctgcgctctcacagccaggcctggagcgaggtgctgaaggcaagcctggggttgaggctgggcaggaaccagctgaggctggggaaagactccctggaggggagaaccagccacaggagcacagcataagtgacatcctcacgacctcacagactctggaaacagtgcccctaatcccagaggtagtggagcttccaccgtcactgcccaggagctctccttgtgtacatcatcatggttccccaggagtggatttaccagttaccataccagaagtttcttcagtccctgatcagatcagaggagagcccagaggctcatcaggacttgtaaacagcagacagaagagctatgaccactcaaggcaccatcatgggagcagcattgctggaggactggtgaagggggctttgtctgttgctgcctctgcatacaaggccctgtttgctgggccaccagtcactgcacagggtctctggggcttgctgtcattccttcatctggccaaaaaatgcttcttcctgaaagccccgagtgaagcattctcctggttctaa

SEQ ID NO: 109772 - DNA, 2814 bp, Artificial Sequence
  derived and/or modified sequence
atggaaccccaagtcaccctgaatgtcacttttaaaaatgagattcaatcatttcttgtatcagatccggagaacacgacatgggccgacatcgaagcaatggtgaaagtctcctttgatttgaacaccatccaaataaaatacctggatgaggaaaacgaagaagtaaagatagtactgctgggagaatatgaggaggcactcaagatggccgtgaagcagggcaaccagctccagatgcaggtgcacgagggtcaccacgtggtggatgaggcaccaccacctgtggtgggcgcaaaaaggttagcagcccgagccggtaagaagccattagcccattatagtagtctggtccgggttttgggatctgatatgaaaacaccggaggaccccgcagtccagagtttccctctggtaccttgcgacacagaccagccacaagataagcccccagactggtttacatcctaccttgagactttcagggaacaggtggtcaatgagacggttgaaaaactggagcagaagctgcacgagaagctcgtcttacagaacccaagcctcggcagttgtccgtccgaagtgagtatgccgacttccgaggaaactctgttcctgcccgagaatcagttctcttggcacattgcatgcaacaactgccagcggagaattgttggcgttcgctatcagtgcagtctctgtccgtcatacaatatttgcgaggattgtgaggcagggccatacggacacgacactaatcatgtcctgctgaagctgcgtagaccggtcgtcggctcctcggagcctttctgccacagcaagtatagcacacctcgtctacctgcagctctggaacaagtcaggcttcagaaacaggtggacaaaaatttcctaaaggcagagaagcagcgcctgagagcagaaaagaaacaaaggaaggcagaggtcaaagagctaaagaagcaactgaaactgcaccgcaaaatccacctctggaattcaatccatggattacagtctccaaagagtccactgggacgaccggagtctctattgcaatccaataccctgatgttgccattgcagccgtgtacatccgtaatgcccatgctaagcgctgccttcgtcgacgagaacctgcctgatggaacccacctccagcctgggacaaaatttatcaaacattggcgtatgaagaacacaggaaatgtgaagtggtccgctgacaccaagctgaagtttatgtggggcaatcttactcttgccagcaccgagaagaaagatgtactggtcccatgcttgaaagcaggccacgtgggcgtcgtcagcgttgaatttattgctcctgccttagaaggcacttataccagtcattggcggctttctcacaaaggacagcaattcggcccacgagtgtggtgctctatcattgttgacccttttccaagtgaagaatctccagataatattgaaaaggggatgataagctccagcaaaactgatgatctcacttgccagcaggaagagactttcctcttggctaaagaggagcgacagctgggcgaggtgacagaacaaaccgaaggcactgctgcctgcattccacaaaaagcaaagaacgtagctagcgagagggagctatatattccaagtgtggacctcctgacggctcaggacttattgtcgtttgaactgttggatatcaatattgtgcaggaactcgagcgagtccctcataatacgcctgtcgacgtcaccccttgcatgtccccccttcctcacgactcacccctgatcgagaagccgggattgggccaaatagaggaagaaaacgagggagccggttttaaggccctgccggattcaatggtgtccgtaaagaggaaagctgaaaatatagcttctgtcgaggaagctgaggaagatctatccgggactcagttcgtatgtgaaaccgttattaggagtctgaccctggatgccgcaccagatcacaacccaccctgtcgccaaaagtcactgcaaatgacgttcgcattgcccgagggccctctggggaacgagaaggaagagattattcatatcgctgaagaagaagccgttatggaggaggaggaagatgaggaagatgaggaggaggaggacgagcttaaggatgaggttcaaagccagtcctccgcatccagcgaagactacatcattatcctgccagagtgttttgatacatcgcgaccactgggcgattctatgtacagcagcgcactgtcacagcccggactggagaggggggctgaaggcaagcctggcgtggaagctggacaggagccagcggaagccggagagcgtctgcccggaggggagaatcagccccaagaacacagcattagcgatatactgactacatctcaaacgctggaaacagtgcctcttattcctgaagtggttgaactgcccccttccctcccacgatcttccccgtgtgtccatcaccatgggtcaccaggtgttgacctcccagtgactatccccgaggttagttccgttccggatcagattcgcggagaacctcgcggatctagtggattagtcaattctcgacaaaaatcgtatgatcactctcgtcaccatcatggcagcagtattgctggcggactggttaagggggctttatccgtagcagcctcggcatataaagctttgtttgcgggtcctcctgtgaccgcccagggactttggggtctgttgtcattcctccacctagccaagaagtgcttctttttaaaggccccaagcgaagcttttagttggttctag

SEQ ID NO: 109773 - DNA, 2814 bp, Artificial Sequence
  derived and/or modified sequence
atggagccccaggtgaccctgaacgtgaccttcaagaacgagatccagagcttcctggtgagcgaccccgagaacaccacctgggccgacatcgaggccatggtgaaggtgagcttcgacctgaacaccatccagatcaagtacctggacgaggagaacgaggaggtgaagatcgtgctgctgggcgagtacgaggaggccctgaagatggccgtgaagcagggcaaccagctgcagatgcaggtgcacgagggccaccacgtggtggacgaggcccccccccccgtggtgggcgccaagagactggccgccagagccggcaagaagcccctggcccactacagcagcctggtgagagtgctgggcagcgacatgaagacccccgaggaccccgccgtgcagagcttccccctggtgccctgcgacaccgaccagccccaggacaagccccccgactggttcaccagctacctggagaccttcagagagcaggtggtgaacgagaccgtggagaagctggagcagaagctgcacgagaagctggtgctgcagaaccccagcctgggcagctgccccagcgaggtgagcatgcccaccagcgaggagaccctgttcctgcccgagaaccagttcagctggcacatcgcctgcaacaactgccagagaagaatcgtgggcgtgagataccagtgcagcctgtgccccagctacaacatctgcgaggactgcgaggccggcccctacggccacgacaccaaccacgtgctgctgaagctgagaagacccgtggtgggcagcagcgagcccttctgccacagcaagtacagcacccccagactgcccgccgccctggagcaggtgagactgcagaagcaggtggacaagaacttcctgaaggccgagaagcagagactgagagccgagaagaagcagagaaaggccgaggtgaaggagctgaagaagcagctgaagctgcacagaaagatccacctgtggaacagcatccacggcctgcagagccccaagagccccctgggcagacccgagagcctgctgcagagcaacaccctgatgctgcccctgcagccctgcaccagcgtgatgcccatgctgagcgccgccttcgtggacgagaacctgcccgacggcacccacctgcagcccggcaccaagttcatcaagcactggagaatgaagaacaccggcaacgtgaagtggagcgccgacaccaagctgaagttcatgtggggcaacctgaccctggccagcaccgagaagaaggacgtgctggtgccctgcctgaaggccggccacgtgggcgtggtgagcgtggagttcatcgcccccgccctggagggcacctacaccagccactggagactgagccacaagggccagcagttcggccccagagtgtggtgcagcatcatcgtggaccccttccccagcgaggagagccccgacaacatcgagaagggcatgatcagcagcagcaagaccgacgacctgacctgccagcaggaggagaccttcctgctggccaaggaggagagacagctgggcgaggtgaccgagcagaccgagggcaccgccgcctgcatcccccagaaggccaagaacgtggccagcgagagagagctgtacatccccagcgtggacctgctgaccgcccaggacctgctgagcttcgagctgctggacatcaacatcgtgcaggagctggagagagtgccccacaacacccccgtggacgtgaccccctgcatgagccccctgccccacgacagccccctgatcgagaagcccggcctgggccagatcgaggaggagaacgagggcgccggcttcaaggccctgcccgacagcatggtgagcgtgaagagaaaggccgagaacatcgccagcgtggaggaggccgaggaggacctgagcggcacccagttcgtgtgcgagaccgtgatcagaagcctgaccctggacgccgcccccgaccacaaccccccctgcagacagaagagcctgcagatgaccttcgccctgcccgagggccccctgggcaacgagaaggaggagatcatccacatcgccgaggaggaggccgtgatggaggaggaggaggacgaggaggacgaggaggaggaggacgagctgaaggacgaggtgcagagccagagcagcgccagcagcgaggactacatcatcatcctgcccgagtgcttcgacaccagcagacccctgggcgacagcatgtacagcagcgccctgagccagcccggcctggagagaggcgccgagggcaagcccggcgtggaggccggccaggagcccgccgaggccggcgagagactgcccggcggcgagaaccagccccaggagcacagcatcagcgacatcctgaccaccagccagaccctggagaccgtgcccctgatccccgaggtggtggagctgccccccagcctgcccagaagcagcccctgcgtgcaccaccacggcagccccggcgtggacctgcccgtgaccatccccgaggtgagcagcgtgcccgaccagatcagaggcgagcccagaggcagcagcggcctggtgaacagcagacagaagagctacgaccacagcagacaccaccacggcagcagcatcgccggcggcctggtgaagggcgccctgagcgtggccgccagcgcctacaaggccctgttcgccggcccccccgtgaccgcccagggcctgtggggcctgctgagcttcctgcacctggccaagaagtgcttcttcctgaaggcccccagcgaggccttcagctggttctag

SEQ ID NO: 109774 - protein, 837 aa, Artificial Sequence
  derived and/or modified sequence
MEPQVTLNVTFKNEIQSFLVSDPENTTWADIEAMVSINSQGEYEEALKMAVKQGNQLQMQVHEGHHVVDEAPPPVVGAKRLAARAGKKPLAHYSSLVRVLGSDMKTPEDPAVQSFPLVPCDTDQPQDKPPDWFTSYLETFREQVVNETVEKLEQKLHEKLVLQNPSLGSCPSEVSMPTSEETLFLPENQFSWHIACNNCQRRIVGVRYQCSLCPSYNICEDCEAGPYGHDTNHVLLKLRRPVVGSSEPFCHSKYSTPRLPAALEQVRLQKQVDKNFLKAEKQRLRAEKKQRKAEVKELKKQLKLHRKIHLWNSIHGLQSPKSPLGRPESLLQSNTLMLPLQPCTSVMPMLSAAFVDENLPDGTHLQPGTKFIKHWRMKNTGNVKWSADTKLKFMWGNLTLASTEKKDVLVPCLKAGHVGVVSVEFIAPALEGTYTSHWRLSHKGQQFGPRVWCSIIVDPFPSEESPDNIEKGMISSSKTDDLTCQQEETFLLAKEERQLGEVTEQTEGTAACIPQKAKNVASERELYIPSVDLLTAQDLLSFELLDINIVQELERVPHNTPVDVTPCMSPLPHDSPLIEKPGLGQIEEENEGAGFKALPDSMVSVKRKAENIASVEEAEEDLSGTQFVCETVIRSLTLDAAPDHNPPCRQKSLQMTFALPEGPLGNEKEEIIHIAEEEAVMEEEEDEEDEEEEDELKDEVQSQSSASSEDYIIILPECFDTSRPLGDSMYSSALSQPGLERGAEGKPGVEAGQEPAEAGERLPGGENQPQEHSISDILTTSQTLETVPLIPEVVELPPSLPRSSPCVHHHGSPGVDLPVTIPEVSSVPDQIRGANNF

SEQ ID NO: 109775 - DNA, 2514 bp, Artificial Sequence
  derived and/or modified sequence
atggagccacaggtgacccttaatgtcacctttaagaacgagattcagtccttcctggtctctgaccctgagaacaccacatgggcggacatcgaggcaatggtgtccattaatagtcaaggggaatacgaggaggctctgaaaatggctgtgaagcagggcaatcagcttcagatgcaagtgcatgaagggcatcacgttgtggatgaggcccctccacctgtggttggagccaaacggcttgctgcccgcgccggcaagaagcccctggctcactacagctcactggtgagagtgcttggctcagatatgaagacccccgaggatccggccgtgcagtcctttcccctggttccctgtgacactgaccaaccccaggacaaacccccagactggttcacaagctacctagaaaccttcagagagcaggtggttaacgaaaccgtcgagaaattggagcagaaactacatgaaaagctcgtgctgcaaaacccctcactgggcagctgtcccagtgaggtttcgatgcctacctcagaggaaacattgttcctccccgagaaccaattctcgtggcacatagcttgcaataactgtcagcgaaggatagtgggagtcaggtaccagtgcagcctttgcccttcttacaatatatgcgaagactgcgaggctggaccttacggtcacgataccaatcacgtcctgctaaaactccggcggcctgtggtgggtagtagtgagcccttttgccattcgaagtattccacaccgagactgccagccgccctagaacaggttaggctccagaaacaggtggacaagaactttcttaaagccgagaaacagcgactccgcgcagagaaaaaacagcgcaaagccgaggttaaagagctgaaaaagcagcttaaattacaccgcaaaatccatctgtggaattccatccacggcctccagtctcccaaatccccactcggaagaccagaatctctgcttcagagcaacacactaatgctgccactccaaccatgtacaagcgtaatgcccatgttaagcgcggctttcgtcgacgagaacttgcccgatgggacccatttacagccgggcacaaaattcattaagcactggcggatgaagaatactggaaacgtcaaatggtcagccgacacaaaactaaagttcatgtggggtaatctaacactggcatccacagagaaaaaggacgtgttggttccatgcctcaaggcgggtcacgtgggtgtggtgagtgtcgaattcatcgcgcctgcactcgagggtacctatacaagccattggcgcctttcccacaagggccaacagtttggtcctagggtttggtgttcaatcatcgttgacccattccctagcgaggaaagcccggacaacattgaaaagggcatgatctcttcttccaagaccgatgacttgacctgccagcaggaagagacgttcctgttggcgaaagaggagagacaactgggagaagtaacggagcaaaccgaaggaacagcggcctgtatcccccagaaagcaaaaaatgtcgcaagcgagcgggagctctacattccatcggtagatctcctgactgctcaagaccttttaagttttgaactcttagacatcaatatagtccaggaactagagagggtgcctcacaatactcctgtggatgtgactccgtgcatgtcccccctcccgcatgatagccccctaatagagaagccaggtctgggccagattgaggaagagaatgagggggccggcttcaaagctttgcccgatagtatggtgagcgtcaaacgaaaggccgagaacatcgcaagcgtcgaagaggccgaggaggacctgtctggcacccagtttgtctgcgagactgtcattagatccttaacgctggatgcagcccctgatcacaatcctccctgcagacagaaatcgctccaaatgacctttgctctacctgaggggccactgggaaatgagaaagaggagataatccatattgccgaagaggaggccgttatggaagaagaagaagatgaagaggatgaggaagaggaggatgagctgaaggacgaagtacaaagccaatcttcggcttcctcagaggattatatcatcattctgcctgaatgctttgacactagccgccctctcggtgacagcatgtactcctccgcactgtcccagcccggcttagagcgtggagctgagggcaaacctggcgtggaagcagggcaggaacctgcggaagcgggggaaaggctgccaggtggtgaaaatcaacctcaagagcattcgatctctgacattttaactacttcccagaccctagaaactgtgcctctaatccctgaagtggtggaactacctccatcactccctagaagctccccgtgtgtccaccaccacggatctcccggggtggatcttccagttacaattcccgaagtaagcagcgtccctgaccagataaggggtgctaataacttttag

SEQ ID NO: 109776 - DNA, 2514 bp, Artificial Sequence
  derived and/or modified sequence
atggagccccaggtgaccctgaatgtgaccttcaagaatgagatccagagcttcctggtgtctgaccctgagaacaccacctgggccgacatcgaggccatggtgtccatcaacagccagggcgagtatgaggaggccctgaagatggctgtgaagcagggcaaccagctgcagatgcaggtgcatgagggccaccacgtggtggatgaggcccctcctcctgtggtgggcgccaagaggctggccgcccgggccggcaagaagcccctggcccactacagcagcctggtgcgggtgctgggcagtgacatgaagaccccagaggaccctgctgtgcagagcttccccctggtgccctgtgacacagaccagccccaggacaagcccccagactggttcaccagctacctggagaccttccgggagcaggtggtgaatgagaccgtggagaagctggagcagaagctgcacgagaagctggtgctgcagaaccccagcctgggcagctgccccagcgaggtgtccatgcccaccagcgaggagaccctcttcctgcctgagaaccagttctcctggcacatcgcctgcaacaactgccagaggagaattgtgggcgtgcgctaccagtgcagcctgtgccccagctacaacatctgtgaggactgtgaggccggcccctacggccatgacaccaaccacgtgctgctgaagctgcggcggcctgtggtgggcagcagcgagcccttctgccacagcaagtacagcaccccccggctgcctgctgccctggagcaggtgcggctgcagaagcaggtggacaagaacttcctgaaggccgagaagcagaggctgcgggcagagaagaagcagaggaaggccgaggtgaaggagctgaagaagcagctgaagctgcacaggaagatccacctgtggaacagcatccacggcctgcagagccccaagagccccctgggccggcctgagagcctgctgcagagcaacaccctgatgctgcccctgcagccctgcacctctgtgatgcccatgctgtctgctgcctttgtggatgagaacctgcctgatggcacccacctgcagcccggcaccaagttcatcaagcactggaggatgaagaacacaggaaatgtgaagtggagcgctgacaccaagctgaagttcatgtggggcaacctgaccctggccagcacagagaagaaggatgtgctggtgccctgcctgaaggccggccacgtgggcgtggtgtctgtggagttcatcgccccagccctggagggcacctacaccagccactggaggctgagccacaagggccagcagtttggcccccgggtgtggtgcagcatcatcgtggaccccttccccagcgaggagagcccagacaacatcgagaagggcatgatcagcagcagcaagacagatgacctgacctgccagcaggaggagaccttcctgctggccaaggaggagcggcagctgggggaggtgacagagcagacagagggcacagctgcctgcatcccccagaaggccaagaatgtggccagcgagcgggagctgtacatccccagcgtggacctgctgacagcccaggacctgctgagctttgagctgctggacatcaacatcgtgcaggagctggagcgggtgccccacaacacccctgtggatgtgaccccctgcatgagccccctgccccatgacagccccctcatcgagaagccaggcctgggccagatcgaggaggagaatgaaggagctggcttcaaggccctgcctgacagcatggtgtctgtgaagaggaaggccgagaacatcgcctctgtggaggaggccgaggaggacctgagcggcacccagtttgtgtgtgaaacagtcatccgcagcctgaccctggatgctgccccagaccacaaccccccctgccggcagaagagcctgcagatgacctttgccctgcctgagggccccctgggcaatgagaaggaggagatcatccacatcgccgaggaggaggccgtgatggaggaggaggaggatgaggaggatgaggaggaggaggatgagctgaaggatgaggtgcagagccagagcagcgccagcagcgaggactacatcatcatcctgcctgaatgttttgacaccagccggcccctgggggacagcatgtacagcagcgccctgagccagcccggcctggagagaggagctgagggcaagccaggagtggaggccggccaggagcctgctgaggccggggagcggctgcctggaggagagaaccagccccaggagcacagcatcagtgacatcctgaccaccagccagaccctggagaccgtgcccctcatccctgaggtggtggagctgccccccagcctgcccaggagcagcccctgtgtgcaccaccacggcagccctggggtggacctgcctgtgaccatccctgaggtgtcctctgtgcctgaccagatccggggggccaacaacttctag

SEQ ID NO: 109777 - DNA, 2514 bp, Artificial Sequence
  derived and/or modified sequence
atggagccccaggtgaccctgaacgtgaccttcaagaacgagatccagtcctttctggtgagcgatcccgaaaatacaacgtgggcagatatcgaagcaatggtgagcatcaattctcagggcgaatatgaggaggcactgaagatggccgttaaacagggaaatcagttgcagatgcaggtccacgagggccaccacgttgtcgacgaggcccccccccctgtggtcggtgctaagagactggccgcacgggcggggaagaagcctctcgcacattactcctcactcgtccgggtgctgggctccgatatgaaaacccctgaagatccggcagtgcagagtttccctttggtaccctgcgacacagaccagcctcaggacaaaccccccgactggtttacgagttatttagagacatttcgggagcaggtcgttaacgagacggtcgagaagctggaacagaagctccatgaaaagctggttcttcagaatcctagtttaggcagctgccccagcgaggtgtccatgcctacctcagaggaaactctgtttttgcccgagaaccagttttcatggcacatcgcctgtaacaattgtcagagaagaattgtgggtgtccgttaccagtgcagcctttgccccagttacaatatttgcgaggattgcgaagcaggcccatatggacatgacaccaaccacgtcctccttaagctgaggcgccctgtggtgggcagttctgagcctttttgtcattcaaaatattcaacccctcgcttacccgccgcactcgaacaggtacgtcttcagaaacaggtggacaaaaatttcctgaaggccgagaaacagagactacgggccgagaagaagcaacgaaaagctgaagtaaaggagctgaaaaagcagctgaagctgcatagaaagatacacctttggaactcaatccacggccttcagtccccaaagtcccctttgggaagacccgagagcctcctgcagtccaacactcttatgcttccattgcagccctgcacctcagttatgcccatgctgtccgccgctttcgtggacgagaacctccctgacggtacgcacctgcaacccggaaccaaattcattaaacactggcgtatgaaaaataccgggaatgtgaagtggagcgccgatactaaactcaagtttatgtgggggaatctgaccctggccagcaccgaaaaaaaagacgtgcttgtgccttgtctgaaagccggacacgtgggcgttgtcagcgtggaattcatcgcaccggccctagagggtacatacacgagccattggcggctgtcgcataaaggacagcagttcggccccagggtatggtgtagcattatagtggaccctttccccagcgaggagtccccagataatatcgaaaaggggatgatctcttcatcaaagacagatgacctgacctgccagcaggaggaaaccttcttgctcgccaaggaggagcgccagctgggcgaggtcaccgaacagacagaaggcaccgccgcttgcatcccacaaaaagccaagaacgttgcctcggagagagaactttatatcccatcggtagacctgctaacagctcaggatctgttatcattcgagttattggatatcaacatcgtgcaagagctagaacgggttccccacaatactccggttgacgttacaccttgcatgagccctctaccccacgacagtccactcatcgagaagcctgggttaggccagattgaggaggagaatgaaggcgcaggctttaaagctctgccagatagtatggtgtctgtcaaaagaaaggctgagaatatcgcatctgtggaggaggccgaggaagatctttcagggacccagttcgtatgcgagacagtcattcgctctttaacactcgacgcagccccagaccacaaccccccatgccgacagaaatccttacagatgacattcgccttgccggaggggccattggggaacgagaaggaggaaataatacacatagctgaggaggaggctgtgatggaagaagaagaagatgaggaggatgaagaggaggaggatgaacttaaggacgaggttcaatcgcagtccagtgcctcatctgaagactatattattattctcccggaatgttttgataccagccggccgctgggagacagcatgtattcctcggcgctgagccagcctggcttggaacgtggtgccgagggcaaacccggggttgaggccggccaggagcctgccgaggccggtgagcggctccctggcggggaaaatcagccacaggaacactcaattagcgatatcctcaccacttcgcagactcttgaaacagtgccgctcatcccagaagtcgtagagctcccacctagtttgccacgctctagtccatgcgtacaccaccatgggtcacccggagtggacctccctgtaacaatacctgaggtgagctccgtgcccgaccagatcagaggggctaacaatttctag

SEQ ID NO: 109778 - DNA, 2703 bp, Artificial Sequence
  derived and/or modified sequence
atccgccatgttagattcaccccacagggatagcggcagagccggtagcggacggtccttgcattggcctccggcaggcgccccccgggggcgggaagctgcctcacagcatggaaccacaggttactctaaatgtgacttttaaaaatgaaattcaaagctttctggtttctgatccagaaaatacaacttgggctgatatcgaagctatggtatccatcaacagtcaaggagaatatgaagaagcgcttaagatggcagttaaacagggaaaccaactgcagatgcaagtccacgaagggcaccatgtcgttgatgaagccccacccccagttgtaggagcaaaacgactagctgccagggcagggaagaagccacttgcacattactcttcactggtgagagtcttgggatcagacatgaagaccccagaggatcctgcagtgcagtcgtttccacttgttccatgtgacacagaccagcctcaagacaagcccccagactggttcacaagctacctggagacgttcagagaacaagtggttaacgaaacggttgagaagcttgaacagaaattacatgaaaagcttgtcctccagaacccatccttgggttcttgtccctcagaagtctcaatgcctacttcagaagaaacattgtttttgccagaaaaccagttcagctggcatattgcttgcaacaactgccaaagaaggattgttggtgtccgctaccagtgtagcctatgcccatcctacaatatctgtgaagattgtgaagcagggccatatggccatgacactaaccacgtcctgctgaagttgcggagacctgttgtgggctcctctgaaccgttctgtcactcaaagtactctactcctcgtcttcctgctgctctggaacaagtcaggctccagaaacaggttgataagaactttcttaaagcagaaaagcaaaggttgcgagctgagaagaaacaacgtaaagcagaggtcaaggaacttaaaaagcagcttaaactccataggaaaattcacctgtggaattcaatccatggactccagagccccaagtctcctttaggccgacctgagagcttgctccagtctaataccctgatgctccctttgcagccctgtacctccgttatgccaatgctcagtgcagcatttgtggatgagaatttgcctgatgggactcaccttcagccaggaaccaagtttatcaaacactggaggatgaaaaatacaggaaatgtaaagtggagtgcagacacaaagctcaagttcatgtggggaaacctgactttggcttccacagaaaagaaggatgttttggttccctgcctcaaggccggccatgtgggagttgtatctgtggagttcattgccccagccttggagggaacgtatacttcccattggcgtctttctcacaaaggccagcaatttgggcctcgggtctggtgcagtatcatagtagatcctttcccctccgaagagagccctgataacattgaaaagggcatgatcagctcaagcaaaactgatgatctcacctgccagcaagaggaaacttttcttctggctaaagaagaaagacagcttggtgaagtgactgagcagacagaagggacagcagcctgcatcccacagaaggcaaaaaatgttgccagtgagagggagctctacatcccatctgtggatcttctgactgcccaggacctgctgtcctttgagctgttggatataaacattgttcaagagttggagagagtgccccacaacacccctgtggatgtgactccctgcatgtctcctctgccacatgacagtcctttaatagagaagccaggcttggggcagatagaggaagagaatgaaggggcaggatttaaagcacttcctgattctatggtgtcagtaaagaggaaggctgagaacattgcttctgtggaggaagcagaagaagacctgagtgggacccagtttgtgtgtgagacagtaatccgatcccttaccttggatgctgccccagaccacaaccctccttgcagacagaagtccttgcagatgacatttgccttgcctgaaggaccacttggaaatgagaaggaggagattatccatatcgctgaggaagaagctgtcatggaggaggaggaggatgaggaggatgaggaggaggaggatgagctcaaagatgaagttcaaagtcagtcctctgcttcctcagaggattacatcatcatcctgcctgagtgctttgataccagccgccccctgggggattctatgtacagctctgcgctctcacagccaggcctggagcgaggtgctgaaggcaagcctggggttgaggctgggcaggaaccagctgaggctggggaaagactccctggaggggagaaccagccacaggagcacagcataagtgacatcctcacgacctcacagactctggaaacagtgcccctaatcccagaggtagtggagcttccaccgtcactgcccaggagctctccttgtgtacatcatcatggttccccaggagtggatttaccagttaccataccagaagtttcttcagtccctgatcagatcagaggagccaataatttctgaagatcagacagcagccctgatggcccatctctttgaaatgggattctgtgacaggcagctgaacctacggctgctgaag

SEQ ID NO: 109779 - DNA, 2514 bp, Artificial Sequence
  derived and/or modified sequence
atggagccccaggtgaccttgaacgtcacctttaagaatgaaatccagtcgttcctggtgtctgacccagaaaacacgacctgggcggacatagaagctatggtgtccataaattcccaaggcgaatacgaagaggctcttaagatggcggtcaaacagggaaaccagctgcagatgcaagtgcacgaagggcatcatgtggttgatgaagctcctccccctgtggtgggggctaaaagactagcagccagggctggtaagaagcccctggcccactacagcagtctcgtaagggtcctgggcagtgatatgaaaacccctgaggatccagctgtgcaaagtttccctcttgttccctgtgacactgatcagccccaggacaaaccccctgactggtttacttcgtacttagagacatttcgggagcaggtggtgaacgagaccgtggagaaactggaacagaagttgcacgaaaaactcgtgttgcagaatccctctcttggttcatgcccgtcagaggtcagcatgcccacgtctgaagagaccctctttttgcctgagaaccagttctcatggcacattgcatgcaacaactgccagaggaggattgtcggagttcgctaccaatgctccctgtgcccgtcttataatatctgcgaagactgtgaagccggaccgtacggccatgacaccaatcatgttcttcttaagcttcgaagacccgtggttggctcctctgaacctttctgccacagcaaatactcgactcctcgactgccggcagctcttgaacaggtgagactgcagaagcaggtggacaaaaattttctgaaagctgaaaaacagagacttagggcggaaaaaaaacaacgcaaggctgaagtcaaagaactgaagaaacagctgaagttacatagaaaaatccacctgtggaactctatacatggactacagtcgccaaaatcacctctcggaagacctgaatccctgctgcagtccaacactctgatgctgccactgcagccctgtacttctgttatgccaatgctctcagctgccttcgtggatgagaacctgcctgacggcacccatctgcagccaggtaccaagttcattaagcattggcggatgaagaacacaggcaatgtgaaatggagtgccgataccaaactgaagtttatgtggggcaacttgacactggcgtcaacagaaaaaaaagatgttcttgtgccctgtctgaaggctggccatgttggcgtcgtaagtgtagagttcatcgctcctgcacttgaaggaacgtacacatcacactggcggctgagccacaaggggcagcagtttgggcctcgtgtctggtgttccatcatcgttgacccctttccctcagaagaatctcctgacaacattgaaaaggggatgatctcttcatccaagaccgacgacttaacttgccagcaggaggaaacattcttactggccaaagaggagcggcagttgggcgaagtaactgagcagactgaggggaccgcagcctgcattcctcagaaggctaaaaacgtcgcgtcagagcgcgagctttacatcccctccgttgatctccttacggcccaagatctgctcagcttcgaactcctcgatatcaatatagttcaggaactggagagggtaccacacaacaccccggttgacgtaacaccctgtatgtccccattaccccacgacagtcccctgattgaaaagcccggtctcgggcagattgaagaggaaaacgagggcgctggcttcaaggcactccctgactctatggtctctgtcaagagaaaagcagagaacatcgcgagtgtggaggaagccgaggaggacttgagcgggacacaattcgtctgtgaaaccgtgattcggtccctgacattagacgctgcccctgaccacaatcctccctgcaggcagaagtctctgcaaatgaccttcgccctgcccgagggtcccctcggcaacgaaaaggaagagattatccacatcgctgaggaagaggccgtaatggaagaagaggaggatgaagaagatgaagaagaagaagatgagttgaaggatgaagtccagtcccagagctccgcaagttctgaggattacataataatcttgcctgagtgtttcgacacctctagacccctgggcgatagcatgtacagtagtgcgctctcacagcccggactcgaacgtggagccgagggcaaaccaggagtagaggcaggtcaggagccagcagaggccggagaacgccttccgggtggagagaatcaaccccaggagcactccattagtgacatcctcacaacatcccagacactcgaaaccgtccctctgatacccgaagtcgttgaactccctcctagcctgccaaggtcttccccttgcgttcaccatcacgggtctccaggcgttgatctgccggtgactataccagaggtcagctctgtccctgaccagatccggggagcgaataatttctag

SEQ ID NO: 109780 - DNA, 2514 bp, Artificial Sequence
  derived and/or modified sequence
atggagccccaggtgaccctgaacgtgaccttcaagaacgagatccagagcttcctggtgagcgaccccgagaacaccacctgggccgacatcgaggccatggtgagcatcaacagccagggcgagtacgaggaggccctgaagatggccgtgaagcagggcaaccagctgcagatgcaggtgcacgagggccaccacgtggtggacgaggcccccccccccgtggtgggcgccaagagactggccgccagagccggcaagaagcccctggcccactacagcagcctggtgagagtgctgggcagcgacatgaagacccccgaggaccccgccgtgcagagcttccccctggtgccctgcgacaccgaccagccccaggacaagccccccgactggttcaccagctacctggagaccttcagagagcaggtggtgaacgagaccgtggagaagctggagcagaagctgcacgagaagctggtgctgcagaaccccagcctgggcagctgccccagcgaggtgagcatgcccaccagcgaggagaccctgttcctgcccgagaaccagttcagctggcacatcgcctgcaacaactgccagagaagaatcgtgggcgtgagataccagtgcagcctgtgccccagctacaacatctgcgaggactgcgaggccggcccctacggccacgacaccaaccacgtgctgctgaagctgagaagacccgtggtgggcagcagcgagcccttctgccacagcaagtacagcacccccagactgcccgccgccctggagcaggtgagactgcagaagcaggtggacaagaacttcctgaaggccgagaagcagagactgagagccgagaagaagcagagaaaggccgaggtgaaggagctgaagaagcagctgaagctgcacagaaagatccacctgtggaacagcatccacggcctgcagagccccaagagccccctgggcagacccgagagcctgctgcagagcaacaccctgatgctgcccctgcagccctgcaccagcgtgatgcccatgctgagcgccgccttcgtggacgagaacctgcccgacggcacccacctgcagcccggcaccaagttcatcaagcactggagaatgaagaacaccggcaacgtgaagtggagcgccgacaccaagctgaagttcatgtggggcaacctgaccctggccagcaccgagaagaaggacgtgctggtgccctgcctgaaggccggccacgtgggcgtggtgagcgtggagttcatcgcccccgccctggagggcacctacaccagccactggagactgagccacaagggccagcagttcggccccagagtgtggtgcagcatcatcgtggaccccttccccagcgaggagagccccgacaacatcgagaagggcatgatcagcagcagcaagaccgacgacctgacctgccagcaggaggagaccttcctgctggccaaggaggagagacagctgggcgaggtgaccgagcagaccgagggcaccgccgcctgcatcccccagaaggccaagaacgtggccagcgagagagagctgtacatccccagcgtggacctgctgaccgcccaggacctgctgagcttcgagctgctggacatcaacatcgtgcaggagctggagagagtgccccacaacacccccgtggacgtgaccccctgcatgagccccctgccccacgacagccccctgatcgagaagcccggcctgggccagatcgaggaggagaacgagggcgccggcttcaaggccctgcccgacagcatggtgagcgtgaagagaaaggccgagaacatcgccagcgtggaggaggccgaggaggacctgagcggcacccagttcgtgtgcgagaccgtgatcagaagcctgaccctggacgccgcccccgaccacaaccccccctgcagacagaagagcctgcagatgaccttcgccctgcccgagggccccctgggcaacgagaaggaggagatcatccacatcgccgaggaggaggccgtgatggaggaggaggaggacgaggaggacgaggaggaggaggacgagctgaaggacgaggtgcagagccagagcagcgccagcagcgaggactacatcatcatcctgcccgagtgcttcgacaccagcagacccctgggcgacagcatgtacagcagcgccctgagccagcccggcctggagagaggcgccgagggcaagcccggcgtggaggccggccaggagcccgccgaggccggcgagagactgcccggcggcgagaaccagccccaggagcacagcatcagcgacatcctgaccaccagccagaccctggagaccgtgcccctgatccccgaggtggtggagctgccccccagcctgcccagaagcagcccctgcgtgcaccaccacggcagccccggcgtggacctgcccgtgaccatccccgaggtgagcagcgtgcccgaccagatcagaggcgccaacaacttctag

SEQ ID NO: 109781 - protein, 819 aa, Artificial Sequence
  derived and/or modified sequence
MAQPGPASQPDEDLKRQNAVLQAAQDDLGHLRTQLWEAQAEMENIKAIATVSENTKQEAIDEVKRQWREEVASLQAVMKETVRDYEHQFHLRLEQERTQWAQYRESAEREIADLRRRLSEGQEEENLENEMKKAQEDAEKLRSVVMPMEKEIAALKDKLTEAEDKIKELEASKVKELNHYLEAEKSCRTDLEMYVAVLNTQKSVLQEDAEKLRKELHEVCHLLEQERQQHNQLKHTWQKANDQFLESQRLLMRDMQRMEIVLTSEQLRQVEELKKKDQEDDEQQRLNKRKDHKKADVEEEIKIPVVCALTQEESSAQLSNEEEHLDSTRGSVHSLDAGLLLPSGDPFSKSDNDMFKDGLRRAQSTDSLGTSGSLQSKALGYNYKAKSAGNLDESDFGPLVGADSVSENFDTASLGSLQMPSGFMLTKDQERAIKAMTPEQEETASLLSSVTQGMESAYVSPSGYRLVSETEWNLLQKEVHNAGNKLGRRCDMCSNYEKQLQGIQIQEAETRDQVKKLQLMLRQANDQLEKTMKDKQELEDFIKQSSEDSSHQISALVLRAQASEILLEELQQGLSQAKRDVQEQMAVLMQSREQVSEELVRLQKDNDSLQGKHSLHVSLQQAEDFILPDTTEALRELVLKYREDIINVRTAADHVEEKLKAEILFLKEQIQAEQCLKENLEETLQLEIENCKEEIASISSLKAELERIKVEKGQLESTLREKSQQLESLQEIKISLEEQLKKETAAKATVEQLMFEEKNKAQRLQTELDVSEQVQRDFVKLSQTLQVQLERIRQADSLERIRAILNDTKLTDINQLPET

SEQ ID NO: 109782 - DNA, 2460 bp, Artificial Sequence
  derived and/or modified sequence
atggcccaacccggccccgctagccaaccagatgaggatttaaaacgccagaacgcggtcctccaagccgcccaagacgacctgggtcacctgagaacccagttatgggaagctcaggccgagatggagaacatcaaggccattgctactgtatctgagaatactaagcaagaagccatagatgaagtgaagcgtcagtggcgtgaggaggtggcgagcctccaggcagtgatgaaagaaaccgtacgcgattacgagcatcagtttcacctgcgcctagagcaggaacgcacacaatgggcccaatatcgcgaatcagcggagagagagattgccgacctgcgaagaaggctgtcagaaggccaggaggaggagaatctggaaaacgaaatgaagaaggcgcaggaagatgccgagaaattaaggagtgtggtcatgcccatggagaaggaaatcgccgcactgaaggataagctgaccgaggctgaggacaagatcaaagagctggaggcctccaaggtcaaagagctgaaccactacctggaagccgagaaatcatgccgtacggatctggagatgtacgtggcagtcctcaacacacaaaaatcagtgctccaggaggatgccgaaaagttgcgcaaagaattacacgaggtctgccacttgcttgaacaggagcgccagcagcacaatcagttaaagcatacttggcagaaggcaaatgaccaatttctggagtctcagaggttactaatgagggacatgcagcgtatggaaattgtgctgacctcagagcagttgagacaggtcgaggagttaaagaaaaaagatcaggaggatgatgaacaacagcgcctaaacaaacggaaagatcataagaaggccgacgtcgaggaagaaataaaaatacctgtggtgtgtgccctgactcaagaggagtcttccgctcagctgagcaatgaggaggagcatttggattccacacgaggttctgtccactccctggatgcagggctccttcttccgagcggggatcccttttcgaaatctgacaatgacatgttcaaggacggactgagacgcgctcaaagcacagactccctgggcacatccggatctctgcagagcaaggctctcggctacaactacaaagcaaaaagcgctggtaatcttgatgagagcgactttggcccacttgtgggcgccgattcagtatccgagaattttgatacggcttctttaggctcgcttcagatgccaagcggatttatgctcaccaaagatcaggagcgggcaattaaggcaatgacacctgagcaggaggaaaccgccagtctgttgagttcagttacccagggaatggaatccgcctacgtgtcccccagcggttaccggctcgtgtccgagacggagtggaatctcttgcagaaggaggtccacaatgccggcaacaaacttggacgccgctgtgacatgtgttctaattacgagaaacagttgcagggtatccagatccaggaggctgaaacccgggaccaagtaaaaaaattgcaactgatgctgcggcaagccaacgaccagctcgagaagaccatgaaagataagcaagaactggaagacttcatcaagcagagctcggaagattcctcccaccagatatccgccttagtgttgagagcacaggcaagcgaaatactgctcgaggagctgcagcaaggcttgtctcaggccaaacgagatgttcaggaacaaatggctgttctgatgcagagccgggagcaggtgtcggaggagctcgtgaggctacagaaagataacgattccttgcagggaaagcattccctgcacgtgtcacttcaacaagcggaggacttcatcctcccagataccaccgaggctttgagggagctggtgctgaagtatcgcgaagatataattaatgtacggacagccgccgaccatgtcgaagaaaagttgaaagccgagatcctttttctgaaagaacaaattcaagccgagcagtgcctcaaggagaatcttgaagagacgttgcagcttgaaatcgaaaactgtaaggaagaaattgcatctatctctagcctgaaagccgaactggagcgcataaaagttgaaaaggggcaactcgaaagcaccctgagggaaaagtcccagcagctggaatccctgcaggagataaaaataagcctggaagaacagctcaagaaagagacggccgctaaggctaccgtggagcagcttatgttcgaagaaaaaaataaagctcaaagattgcagactgagctcgatgtgagcgaacaggttcaacgggattttgtaaaactgtctcagaccctgcaggtgcagctggaacgaatcaggcaagcggattcactagagcggatccgagcaattctgaatgatactaaattgaccgatattaatcagctgcccgagacttag

SEQ ID NO: 109783 - DNA, 2460 bp, Artificial Sequence
  derived and/or modified sequence
atggcccagcccggccctgccagccagccagatgaggacctgaagaggcagaatgctgtgctgcaggccgcccaggatgacctgggccacctgcggacccagctgtgggaggcccaggccgagatggagaacatcaaggccatcgccaccgtgtctgagaacaccaagcaggaggccattgatgaggtgaagaggcagtggagggaggaggtggccagcctgcaggccgtgatgaaggagaccgtgcgggactatgagcaccagttccacctgcggctggagcaggagaggacccagtgggcccagtaccgggagagcgctgagcgggagattgctgacctgcggcggcggctgtctgagggccaggaggaggagaacctggagaatgagatgaagaaggcccaggaggatgctgagaagctgcggtctgtggtgatgcccatggagaaggagattgctgccctgaaggacaagctgacagaagctgaggacaagatcaaggagctggaggccagcaaggtgaaggagctgaaccactacctggaggccgagaagagctgcaggacagacctggagatgtatgtggccgtgctgaacacccagaagtctgtgctgcaggaggatgctgagaagctgaggaaggagctgcacgaggtgtgccacctgctggagcaggagcggcagcagcacaaccagctgaagcacacctggcagaaggccaatgaccagttcctggagagccagaggctgctgatgagggacatgcagaggatggagatcgtgctgaccagcgagcagctgcggcaggtggaggagctgaagaagaaggaccaggaggatgatgagcagcagaggctgaacaagaggaaggaccacaagaaggcagatgtggaggaggagatcaagatccctgtggtgtgtgccctgacccaggaggagagcagcgcccagctgagcaatgaggaggagcacctggacagcacccggggctctgtgcacagcctggatgctggcctgctgctgcccagcggggaccccttcagcaagagtgacaatgacatgttcaaggatggcctgcggcgggcccagagcacagacagcctgggcaccagcggcagcctgcagagcaaggccctgggctacaactacaaggccaagtctgctggcaacctggatgaaagtgactttggccccctggtgggcgctgacagcgtgtctgaaaattttgacacagccagcctgggcagcctgcagatgcccagcggcttcatgctgaccaaggaccaggagcgggccatcaaggccatgaccccagagcaggaggagacagccagcctgctgagctctgtgacccagggcatggagagcgcctacgtgagccccagcggctaccgcctggtgtctgaaacagagtggaacctgctgcagaaggaggtgcacaatgccggcaacaagctgggccgccgctgtgacatgtgcagcaactatgagaagcagctgcagggcatccagatccaggaggccgagacccgggaccaggtgaagaagctgcagctgatgctgcggcaggccaatgaccagctggagaagaccatgaaggacaagcaggagctggaggacttcatcaagcagagcagcgaggacagcagccaccagatcagcgccctggtgctgcgggcccaggccagcgagatcctgctggaggagctgcagcagggcctgagccaggccaagagagatgtgcaggagcagatggctgtgctgatgcagagccgggagcaggtgtctgaggagctggtgcggctgcagaaggacaatgacagcctgcagggcaagcacagcctgcacgtgtccctgcagcaggccgaggacttcatcctgcctgacaccacagaggccctgcgggagctggtgctgaagtaccgggaggacatcatcaacgtgaggacagctgctgaccacgtggaggagaagctgaaggccgagatcctcttcctgaaggagcagatccaggccgagcagtgcctgaaggagaacctggaggagaccctgcagctggagattgagaactgcaaggaggagatcgccagcatcagcagcctgaaggccgagctggagcgcatcaaggtggagaagggccagctggagagcaccctgcgggagaagagccagcagctggagagcctgcaggagatcaagatcagcctggaggagcagctgaagaaggagacagctgccaaggccaccgtggagcagctgatgtttgaggagaagaacaaggcccagaggctgcagacagagctggatgtgtctgagcaggtgcagagggactttgtgaagctgagccagaccctgcaggtgcagctggagcgcatccggcaggccgacagcctggagcgcatccgggccatcctgaatgacaccaagctgacagacatcaaccagctgcctgagacctag

SEQ ID NO: 109784 - DNA, 2460 bp, Artificial Sequence
  derived and/or modified sequence
atggcccagcccggccccgccagccagcccgacgaggacctgaagcggcagaacgccgttctgcaagctgcacaggacgacttgggtcacttgagaacacaactttgggaggctcaggccgagatggagaatattaaagcaattgccacagtcagtgaaaacacaaaacaggaggcaatcgacgaggtgaaacgccagtggagggaggaagtcgcctcgctgcaggctgtcatgaaggagaccgttcgagactatgagcaccagttccatttgcggctggaacaagagagaacacagtgggcccagtatcgcgaaagcgctgagagggaaatcgccgaccttagaagaagactgagtgagggacaagaagaggagaatctagagaacgagatgaaaaaggcgcaagaggacgccgagaagctgcgctccgtggtgatgcctatggagaaggaaattgctgccctgaaagataaactgacagaagcagaagacaagattaaagagctcgaggcaagcaaggtcaaagagctaaatcactatctggaggccgagaagagctgtcggacagacctagaaatgtacgtggccgttttgaacacacagaaaagtgtcttgcaggaagatgccgagaaactcagaaaggagcttcatgaggtgtgtcatttacttgagcaggagcggcaacagcacaatcaattgaaacatacctggcaaaaagccaacgatcagtttctggaatctcagcggctcctcatgcgggatatgcagagaatggagattgttctgacatcagaacaactcagacaggtggaagaactgaaaaagaaagaccaggaggacgacgagcagcaaagattgaacaagcggaaagaccacaagaaggcagacgtggaggaggagataaagattcctgttgtctgcgctctgacccaggaggagtcctcagcgcaactgagtaacgaggaggaacaccttgatagcacacgggggtcggttcacagcctggacgctgggctcctgctcccatctggagatcccttctctaaatccgataacgacatgttcaaagacggcctcaggagggcacaatccactgactccttggggacatccgggtccttacagtctaaggccctggggtataattataaggcaaaatccgctgggaatctcgatgaaagcgacttcggacccctggttggcgctgactccgtgtcagagaattttgataccgctagcttaggaagtcttcagatgccttccggcttcatgctcacgaaggaccaggagagagccatcaaggccatgactcccgaacaagaagaaacggcttctttgctatctagtgtgacacaggggatggagtccgcctacgtcagcccctcaggttatcggttggttagtgagaccgagtggaacctgcttcagaaggaggttcacaatgccgggaataagctgggacgccgctgtgacatgtgttctaattacgaaaagcagctgcaggggatccagatccaggaagctgagacccgcgaccaggttaaaaagctgcagctgatgctcaggcaggccaatgaccagctggaaaagacgatgaaggataagcaggaactggaggactttattaaacagagtagtgaggactcaagccatcaaatttcagccctcgtactccgagctcaggcatctgagatactgctagaagagcttcaacaaggtttaagccaggcgaagcgcgacgtccaggagcaaatggccgtgttgatgcagtctcgggagcaggttagcgaggagcttgtccgtcttcagaaggacaacgattcattacaggggaagcactcattacatgttagtctgcagcaggccgaggactttatcctacctgacacaacagaggcccttagagaactggtcctaaagtacagagaagatattataaatgtccggaccgccgcagatcatgttgaggagaagttgaaagctgagatcctcttcctcaaagaacagatacaggccgagcagtgcctgaaggagaacctggaagaaactctgcaactggaaattgaaaattgcaaggaggaaatagcttctatcagtagcttgaaggctgagctagagcgcatcaaagtggagaaaggacaactggaatcaacactgagagaaaagagccagcagctggagagtctacaggaaatcaagatttcactggaggagcagctgaaaaaggagaccgctgctaaggccactgttgaacagctgatgttcgaggagaaaaacaaagcccaacgcttgcagacggaacttgatgtgtccgagcaagttcagcgagacttcgtgaagcttagtcagactttgcaggtgcagctggaacgcatccgccaggccgactctctggagcgtattagagctatattaaatgatactaaattaaccgacatcaaccaattgccggagacatag

SEQ ID NO: 109785 - DNA, 2460 bp, Artificial Sequence
  derived and/or modified sequence
atggcccagccgggtcccgcttcccagcccgatgaggacctgaagagacaaaatgccgtactgcaagcagcccaggacgacctcgggcatctgcgcacccagctgtgggaagcacaggcagagatggagaacatcaaggccattgcaaccgtctccgaaaatacaaagcaggaagctatcgatgaggtgaagcggcagtggagagaggaggtggcgagccttcaggccgttatgaaggagaccgtgcgcgattatgaacatcagttccacctgcggctggaacaagagcgaacgcagtgggcccagtaccgcgagtccgccgagcgtgagatcgccgatctacgaagaagactttcagaaggtcaagaggaagagaatctagagaacgaaatgaagaaagcccaggaagacgccgagaaattgcgaagtgtcgtgatgccaatggagaaggagatagccgctctgaaagacaaactcacagaggccgaagacaaaatcaaggaactcgaggcatcgaaggtgaaagagctgaaccattacctggaggccgagaagtcctgtcggacggacctggaaatgtacgttgccgtgcttaacacccagaagtcagtcctgcaggaggatgcagagaagctaaggaaagaactgcacgaggtctgtcacctgctagagcaggaacggcaacagcataatcagttgaaacacacctggcaaaaggcaaatgatcagtttctcgaatcccaaagactccttatgcgggacatgcagagaatggagatagtcttgacatcagaacagttgcggcaagtagaagagctgaagaagaaagatcaagaggacgacgaacagcaaaggttgaataaacgcaaagaccacaagaaagctgacgtagaggaagagatcaagatcccggtggtgtgtgctctgacgcaggaagagagttccgcacagctctccaatgaggaggaacatttggacagcactagagggtccgtccacagtttagatgctggcttgctgctgcccagtggcgacccattcagcaaatccgacaacgatatgttcaaagatgggctgagacgggcacaaagtaccgacagtctggggaccagcggcagcctccaatctaaagctcttgggtacaactataaagctaaaagcgccggtaaccttgatgaatctgactttggtcctctggtgggtgccgactctgtcagcgagaacttcgacactgcatctcttggcagtttgcaaatgcctagcgggtttatgctgacaaaggaccaagaacgggctatcaaagccatgacgcctgaacaggaggagacagctagcctgctcagtagcgtcacccagggaatggaatctgcctatgtgtctccatctggataccggctggtgagcgagacagagtggaatctactgcagaaagaagtccacaacgcaggcaataaactcgggagacggtgtgacatgtgttccaattacgagaagcagctgcagggcattcagatccaggaagccgaaaccagggatcaggtcaaaaaattacagttgatgctcaggcaggccaatgatcaactggagaaaacgatgaaagataaacaggagctggaggacttcataaaacagagtagtgaagacagttcccaccagatcagtgccctggtgctcagggcgcaggcttctgaaatactcctggaagaattgcagcagggtcttagccaggccaaacgggatgtccaagaacagatggcagtgttgatgcagagtcgagaacaggtttccgaggagttggtgcgactacagaaagataacgactcccttcaaggtaaacatagtttgcacgtctccctccaacaggccgaggacttcattctgcctgacacaaccgaggctctgagagaactcgtgctgaaataccgcgaggatattatcaacgtgcgaaccgctgctgaccatgtggaagaaaaattgaaagccgaaattttgtttctcaaggagcaaattcaagctgagcagtgcctgaaagagaacctggaagagactctgcagctcgagatcgaaaattgcaaggaagagatcgccagtatatcttccctcaaggcagaacttgagcggattaaggtggaaaagggtcagcttgagagcacactcagggagaaatcacaacaacttgagagtctgcaggagatcaagatctctttggaggagcaattaaagaaggagacagcagccaaggcgacggtggagcagttgatgtttgaagagaaaaacaaggctcagcgtctgcagactgaactcgatgttagtgagcaggtacagcgtgattttgtgaaactgagccagactctccaggtccagctcgagcgcatccgccaggccgactccctggagcggatcagggctattctgaatgacaccaaacttactgatattaaccaactgcctgagacatag

SEQ ID NO: 109786 - DNA, 2875 bp, Artificial Sequence
  derived and/or modified sequence
atttcccgctgtcaggatgaggaggcggaggtcggcggtcgggtccgtctctgcccgcggctgtggcggcgccggcggatccagccttagcggtttctctctgggcggcggcggcggcggctcggttgacgcctcctccgccagctgagcccgcgggagcccaggacgccgcttccccgcccatccccgctccccgaggccggccgcctggtcatggcgcagccgggcccggcttcccagcctgacgaggatctgaagaggcaaaatgcagtattacaagctgcacaagatgatttgggacaccttcgaacccagctgtgggaagctcaagcagagatggagaatattaaggcgattgccacagtctctgagaacaccaagcaagaagctatagatgaagtgaaaagacagtggagagaagaagttgcttcacttcaggctgttatgaaagaaacagttcgtgactatgagcaccagttccaccttaggctggagcaggagcgaacacagtgggcacagtatagagaatccgcagagagggaaatagctgatttaagaagaaggctgtctgaaggtcaagaggaggaaaatttagaaaatgaaatgaaaaaggcccaagaggatgctgagaaacttcggtccgttgtgatgccaatggaaaaggaaattgcagctttgaaggataaactgacagaggctgaagacaaaattaaagagctggaggcctcaaaggttaaagaactgaatcattatctggaagctgagaaatcttgtaggactgatctagagatgtatgtagctgttttgaatactcagaaatctgttctacaggaagatgctgagaaactgcggaaagaattgcatgaagtttgccatctcttggagcaagagcgacaacaacacaaccagttaaaacatacgtggcagaaggccaatgaccagtttctggaatctcagcgtttactgatgagagacatgcagcgaatggagattgtgctaacttcagaacagctccgacaagttgaagaactgaagaagaaagatcaggaggatgatgaacaacaaagactcaataagagaaaggatcacaaaaaagcagatgttgaggaagaaataaaaataccagtagtgtgtgctttaactcaagaagaatcttcagcccagttatcaaatgaagaggagcatttagacagcacccgtggctcagttcattccttagatgcaggcttgctgttgccatctggagatcctttcagtaaatcggacaatgacatgtttaaagatggactcaggagagcacagtctacagacagcttgggaacctcgggctcattgcaatccaaagctttaggctataactacaaagcaaaatctgctggaaacctggacgagtcagattttggaccactggtaggagcagattcagtgtctgagaactttgatactgcatcccttgggtcactccagatgccaagtgggtttatgttaaccaaagatcaggaaagagcaatcaaggcgatgacaccagaacaagaagagacagcgtccctcctctccagcgttacccagggcatggagagtgcctatgtgtcccctagtggttatcgtttagttagtgaaacagaatggaatctcttgcagaaagaggtacataatgctggaaataaacttggtagacgttgtgatatgtgttccaattacgaaaaacagttacaaggaattcagattcaggaggctgaaacgagagaccaggtgaaaaaactacagctgatgctaaggcaagctaatgaccagttagagaagacaatgaaagataagcaggagctggaagacttcataaagcaaagcagcgaagattcgagtcaccagatctctgcactcgtcctaagagcccaggcctccgagatcttacttgaagagttacagcaggggctttcccaggcaaagagggatgttcaggaacagatggcggtgctgatgcagtcacgggaacaggtttcagaagagctggtgaggttacagaaagataatgacagtctccagggaaagcacagcctgcatgtgtcattacagcaagcagaagacttcatcctcccagacactacagaggcactgcgggagttggtattaaaataccgtgaggacatcattaatgtgcggacagcagcagaccacgtagaagaaaagctgaaggctgagatacttttcctaaaagagcagatccaagcagaacagtgtttaaaagaaaatcttgaagaaactctgcaactagaaatagaaaactgcaaggaggaaatagcttctatttctagcctaaaagctgaattagaaagaataaaagtggaaaaaggacagttggagtccacattaagagagaagtctcaacagcttgagagtcttcaggaaataaagatcagtttggaagagcagttaaagaaagagactgctgctaaggctaccgttgaacaactaatgtttgaagagaagaataaagctcagagattacagacagaattagatgtcagtgagcaagtccagagggattttgtaaagctttcacagacccttcaggtgcagttagagcggatccggcaagctgactccttggagagaatccgggcaattctgaatgatactaaactgacagacattaaccagcttcctgagacatgacaccctcatggcaggattctagcctgcactttgggtttttaactcatctttagagcaacagtaattattatttaactcttaactgaagaaagagaagtcacaacaaaaggaagactggagaaatgcttacttctagagggagaagactgtgcggcacaggaaacagcaaacagtggggtgatctgcagcccagagaccttca

SEQ ID NO: 109787 - DNA, 2460 bp, Artificial Sequence
  derived and/or modified sequence
atggcccagcccggccccgccagccagcccgacgaggacctgaagagacagaacgccgtgctgcaggccgcccaggacgacctgggccacctgagaacccagctgtgggaggcccaggccgagatggagaacatcaaggccatcgccaccgtgagcgagaacaccaagcaggaggccatcgacgaggtgaagagacagtggagagaggaggtggccagcctgcaggccgtgatgaaggagaccgtgagagactacgagcaccagttccacctgagactggagcaggagagaacccagtgggcccagtacagagagagcgccgagagagagatcgccgacctgagaagaagactgagcgagggccaggaggaggagaacctggagaacgagatgaagaaggcccaggaggacgccgagaagctgagaagcgtggtgatgcccatggagaaggagatcgccgccctgaaggacaagctgaccgaggccgaggacaagatcaaggagctggaggccagcaaggtgaaggagctgaaccactacctggaggccgagaagagctgcagaaccgacctggagatgtacgtggccgtgctgaacacccagaagagcgtgctgcaggaggacgccgagaagctgagaaaggagctgcacgaggtgtgccacctgctggagcaggagagacagcagcacaaccagctgaagcacacctggcagaaggccaacgaccagttcctggagagccagagactgctgatgagagacatgcagagaatggagatcgtgctgaccagcgagcagctgagacaggtggaggagctgaagaagaaggaccaggaggacgacgagcagcagagactgaacaagagaaaggaccacaagaaggccgacgtggaggaggagatcaagatccccgtggtgtgcgccctgacccaggaggagagcagcgcccagctgagcaacgaggaggagcacctggacagcaccagaggcagcgtgcacagcctggacgccggcctgctgctgcccagcggcgaccccttcagcaagagcgacaacgacatgttcaaggacggcctgagaagagcccagagcaccgacagcctgggcaccagcggcagcctgcagagcaaggccctgggctacaactacaaggccaagagcgccggcaacctggacgagagcgacttcggccccctggtgggcgccgacagcgtgagcgagaacttcgacaccgccagcctgggcagcctgcagatgcccagcggcttcatgctgaccaaggaccaggagagagccatcaaggccatgacccccgagcaggaggagaccgccagcctgctgagcagcgtgacccagggcatggagagcgcctacgtgagccccagcggctacagactggtgagcgagaccgagtggaacctgctgcagaaggaggtgcacaacgccggcaacaagctgggcagaagatgcgacatgtgcagcaactacgagaagcagctgcagggcatccagatccaggaggccgagaccagagaccaggtgaagaagctgcagctgatgctgagacaggccaacgaccagctggagaagaccatgaaggacaagcaggagctggaggacttcatcaagcagagcagcgaggacagcagccaccagatcagcgccctggtgctgagagcccaggccagcgagatcctgctggaggagctgcagcagggcctgagccaggccaagagagacgtgcaggagcagatggccgtgctgatgcagagcagagagcaggtgagcgaggagctggtgagactgcagaaggacaacgacagcctgcagggcaagcacagcctgcacgtgagcctgcagcaggccgaggacttcatcctgcccgacaccaccgaggccctgagagagctggtgctgaagtacagagaggacatcatcaacgtgagaaccgccgccgaccacgtggaggagaagctgaaggccgagatcctgttcctgaaggagcagatccaggccgagcagtgcctgaaggagaacctggaggagaccctgcagctggagatcgagaactgcaaggaggagatcgccagcatcagcagcctgaaggccgagctggagagaatcaaggtggagaagggccagctggagagcaccctgagagagaagagccagcagctggagagcctgcaggagatcaagatcagcctggaggagcagctgaagaaggagaccgccgccaaggccaccgtggagcagctgatgttcgaggagaagaacaaggcccagagactgcagaccgagctggacgtgagcgagcaggtgcagagagacttcgtgaagctgagccagaccctgcaggtgcagctggagagaatcagacaggccgacagcctggagagaatcagagccatcctgaacgacaccaagctgaccgacatcaaccagctgcccgagacctag

SEQ ID NO: 109788 - DNA, 546 bp, Artificial Sequence
  derived and/or modified sequence
atggtgctacttcaatcttcaggctttccagagatactggatgccaataagcagcctgcggaagctgtttccgctaccgaaccggtaacatttaatcctcagaaggaggagtccgactgtttgcagtctaatgaaatggtcttgcagttcctggccttctcaagggtcgcccaggattgcaggggcacatcgtggcccaagaccgtttatttcacctttcagttctaccggttccccccggccaccacaccccggctccagctcgtacagctcgatgaggctggccagccgtcgtcaggcgctctgacccacatactcgttccggtgtcacgtgatggcaccttcgatgcaggctcaccgggttttcagctaaggtacatggtcggcccaggctttctgaagcctggggagcgccgctgctttgctcgatacttagctgtgcagaccctgcagatcgacgtgtgggatggcgatagtctgcttctgatcggatcagcagccgttcagatgaaggaaacctcccatattttctccgtttcacaatag

SEQ ID NO: 109789 - DNA, 546 bp, Artificial Sequence
  derived and/or modified sequence
atggtgctgctgcagagcagcggcttccctgagatcctggatgccaacaagcagcctgctgaggccgtgtctgccacagagcctgtgaccttcaacccccagaaggaggagagtgactgcctgcagagcaatgagatggtgctgcagttcctggccttcagccgggtggcccaggactgccggggcacctcctggcccaagacagtgtacttcaccttccagttctaccgcttccccccagccaccaccccccggctgcagctggtgcagctggatgaggccggccagcccagcagcggggccctgacccacatcctggtgcctgtgtccagagatggcacctttgatgctggcagccctggcttccagctgcgctacatggtgggccctggcttcctgaagccaggagagcggcgctgctttgcccgctacctggccgtgcagaccctgcagattgatgtgtgggatggagacagcctgctgctgattggcagcgctgctgtgcagatgaaggagaccagccacatcttctctgtgtcccagtag

SEQ ID NO: 109790 - DNA, 546 bp, Artificial Sequence
  derived and/or modified sequence
atggtgctgctgcagagcagcggcttccccgagatcctggacgccaataaacaacccgccgaggccgtgagtgccacagagccggtgacttttaaccctcagaaggaggagtctgactgtctgcaaagtaatgagatggtcctgcaatttttggccttctccagagtggcacaggattgtcgcggaacctcttggccaaagaccgtgtattttacattccagttctatcgtttcccgccagccaccacacctagactgcaactcgtccaactggacgaggctggccagccatcaagtggggcgttgacccacatcctggttcctgtgtcccgcgacggcactttcgatgcggggagccctggctttcaactgcggtacatggttggcccgggctttttaaagccaggagagcgccgatgttttgcgcgctacttggcagtgcagacgctccagatagatgtgtgggacggagattctcttctgctgatcggttccgcagccgtgcaaatgaaggaaacgtcacacatcttttctgtatcacagtag

SEQ ID NO: 109791 - DNA, 546 bp, Artificial Sequence
  derived and/or modified sequence
atggtcctcttgcaaagcagcggattcccggaaatcttagacgctaataagcagccagccgaggccgttagtgcaaccgaacctgtgacatttaatcctcagaaggaagagtccgattgtttgcagtccaatgaaatggtcctgcaatttctggctttctccagagtcgcccaggactgtagaggcacctcttggcctaaaacagtgtacttcacatttcaattctaccgctttccacccgctacgaccccaaggttacagctcgtccagctggacgaggctggacaaccctcctctggggcactgacccatattctggtcccggtcagcagagacggtaccttcgacgctggttcccctgggtttcaactccgatatatggtgggtcctggcttcttaaaaccaggcgagcgccgttgtttcgccaggtacctggcagtacagacgctccagattgatgtgtgggatggcgacagccttctgctgatcggctcagccgcagtccagatgaaggaaacctcacatatcttttctgtttcccaatag

SEQ ID NO: 109792 - DNA, 546 bp, Artificial Sequence
  derived and/or modified sequence
atggtgctgctgcagagcagcggcttccccgagatcctggacgccaacaagcagcccgccgaggccgtgagcgccaccgagcccgtgaccttcaacccccagaaggaggagagcgactgcctgcagagcaacgagatggtgctgcagttcctggccttcagcagagtggcccaggactgcagaggcaccagctggcccaagaccgtgtacttcaccttccagttctacagattcccccccgccaccacccccagactgcagctggtgcagctggacgaggccggccagcccagcagcggcgccctgacccacatcctggtgcccgtgagcagagacggcaccttcgacgccggcagccccggcttccagctgagatacatggtgggccccggcttcctgaagcccggcgagagaagatgcttcgccagatacctggccgtgcagaccctgcagatcgacgtgtgggacggcgacagcctgctgctgatcggcagcgccgccgtgcagatgaaggagaccagccacatcttcagcgtgagccagtag

SEQ ID NO: 109793 - DNA, 204 bp, Artificial Sequence
  derived and/or modified sequence
atgcagaagaacggcgccggcctgcacaccgccagcagctgcttctgggacagcagcaccgacggcatgatcttcatccacgtgtgcgaggtgctgctgtgcgagatctacgactggaagttccccatcttcgagtgcaacgcctgcctgagccccttcaagaccttcaacaacagactggccaaggtgctgtgcgtggcctag

SEQ ID NO: 109794 - DNA, 204 bp, Artificial Sequence
  derived and/or modified sequence
atgcaaaaaaacggggcaggcctgcacacagcttccagctgtttttgggattcaagcacggacgggatgatctttatccacgtgtgcgaggtactgctgtgcgagatctatgattggaaattccctatttttgagtgcaatgcctgcctgagtccctttaaaacttttaacaacaggctggctaaggtgctttgtgtggcttag

SEQ ID NO: 109795 - DNA, 204 bp, Artificial Sequence
  derived and/or modified sequence
atgcagaagaatggagctggcctgcacacagccagcagctgcttctgggacagcagcacagatggcatgatcttcatccacgtgtgtgaggtgctgctgtgtgagatctatgactggaagttccccatctttgaatgtaatgcctgcctgagccccttcaagaccttcaacaaccggctggccaaggtgctgtgtgtggcctag

SEQ ID NO: 109796 - DNA, 204 bp, Artificial Sequence
  derived and/or modified sequence
atgcagaagaacggcgccggcctgcacaccgccagcagctgcttctgggacagttcaaccgatgggatgatttttatccacgtatgcgaagtgcttctctgtgagatctacgattggaaatttcctatcttcgaatgcaacgcatgtctatctcctttcaaaactttcaacaacagacttgctaaggtgttgtgcgtggcttag

SEQ ID NO: 109797 - DNA, 204 bp, Artificial Sequence
  derived and/or modified sequence
atgcagaaaaatggagctggtttacatacagcctccagctgtttttgggatagctctaccgatggtatgattttcattcacgtgtgcgaggtcctactctgcgagatttacgactggaaattcccaatctttgaatgtaacgcctgtttgagcccattcaaaacctttaacaatcgattggccaaggtcttgtgtgtggcttag

SEQ ID NO: 109798 - DNA, 279 bp, Artificial Sequence
  derived and/or modified sequence
atggaggactaccaggccgccgaggagaccgccttcgtggtggacgaggtgagcaacatcgtgaaggaggccatcgagagcgccatcggcggcaacgcctaccagcacagcaaggtgaaccagtggaccaccaacgtggtggagcagaccctgagccagctgaccaagctgggcaagcccttcaagtacatcggcaacggcgtgctgttcctgctgtacctgagagacggcttcctgaccctgatcagaggcgccagcagcaccagaaacaacagctag

SEQ ID NO: 109799 - DNA, 279 bp, Artificial Sequence
  derived and/or modified sequence
atggaggactatcaagccgcagaggagaccgccttcgtggtcgatgaggtgtccaatatcgtcaaagaggcaatcgagtcagcgataggcggcaacgcctaccagcactctaaggtgaatcaatggacaaccaacgtggtagagcaaacactctcccagctgactaagcttggtaagccattcaagtatatcggcaacggggtgctattcctgttgtacctccgggacgggtttctgaccttgattcgaggcgcatcatccacgaggaataattcctag

SEQ ID NO: 109800 - DNA, 774 bp, Artificial Sequence
  derived and/or modified sequence
gggagccggaggggacgcgccggaggaaagatggaagactaccaggctgcggaggagactgcttttgttgttgatgaagtgagcaacattgtaaaagaggctatagaaagcgcaattggtggtaacgcttatcaacacagcaaagtgaaccagtggaccacaaatgtagtagaacaaactttaagccaactcaccaagctgggaaaaccatttaaatacatcggtaatggagtcttgtttcttttatatttgcgggatggttttttaacactgatcagaggggcatccagtaccagaaacaacagctaacgtggctcaactcaaggaaggctcctggtgggagtcggtcgtgtgtgtagtatacgttagcgtacgcttgaccatttggctgctggtacaattgcagatcgtatgtgaagcgggatcttacaggaggtcccatcagatgcttttagaacaagtgaagcatagaggaagtgtggacagcccccagctgacagtggctcaacttagaatttttcaactttgatggatttaccagggtattaagtgcatttgcaacttacattttcatatattgttgatttatgatgggtttatgggatgttgtaagtcaaggagcacctataatttgtcaatatagtgagacaaggcaatctgtccctataatttttatcgagaacatcaaccacgtggagctacatacattgtacgtttgctaaaagtggacagaatgacatttgtgttacccagtagacttctctaacaaaaatt

SEQ ID NO: 109801 - DNA, 279 bp, Artificial Sequence
  derived and/or modified sequence
atggaggactaccaggccgctgaggagacagcctttgtggtggatgaggtgagcaacatcgtgaaggaggccattgaaagtgccatcggcggcaatgcctaccagcacagcaaggtgaaccagtggaccaccaacgtggtggagcagaccctgagccagctgaccaagctgggcaagcccttcaagtacatcggaaatggagtgctcttcctgctgtacctgagagatggcttcctgaccctcatccggggggccagcagcaccaggaacaacagctag

SEQ ID NO: 109802 - DNA, 279 bp, Artificial Sequence
  derived and/or modified sequence
atggaggactaccaggccgccgaggagaccgccttcgtggtggacgaagtgagcaacatagtgaaggaagccatcgagagtgcgattgggggaaacgcctatcagcacagcaaggtgaaccagtggactaccaacgtggtggagcagaccttatctcagttaactaaactcggtaagccgttcaaatatatcgggaatggcgtactgtttctactgtatctacgggacgggttcttaactttaattcggggtgctagcagcacgcgaaataatagctag

SEQ ID NO: 109803 - DNA, 279 bp, Artificial Sequence
  derived and/or modified sequence
atggaggactatcaggctgccgaggaaactgcatttgttgtcgatgaggttagcaatatcgttaaggaagctatagagtccgctattggcggaaacgcataccagcactcgaaagtcaaccagtggactacaaacgtcgttgaacagacgctctctcagctcactaagctgggtaagccatttaagtatattgggaacggggtccttttcctgctctacttgcgcgatggcttcctcacccttataaggggtgcgagttctactagaaataacagttag

SEQ ID NO: 109804 - DNA, 1041 bp, Artificial Sequence
  derived and/or modified sequence
atgctggagaactacaacagcatcgtgagcctggactgggagaccaagcccgagatccacgacgccagcgacaagaagagcgagggcagcctgagagagtgcctgggcagacagagccccctgtgccccaagttcgaggtgcacacccccaacggcagaatgggcaccgagaagcagagccccagcggcgagaccagaaagaagagcctgagcagagacaagggcctgagaagaagaagaagcgccctgagcagagagatcctgaccaaggagagacaccaggagtgcagcgactgcggcaagaccttcttcgaccacagcagcctgaccagacaccagagaacccacaccggcgagaagccctacgactgcagagagtgcggcaaggccttcagccacagaagcagcctgagcagacacctgatgagccacaccggcgagagcccctacgagtgcagcgtgtgcagcaaggccttcttcgacagaagcagcctgaccgtgcaccagagaatccacaccggcgagaagcccttccagtgcaacgagtgcggcaaggccttcttcgacagaagcagcctgaccagacaccagagaatccacaccggcgagagcccctacgagtgccaccagtgcggcaaggccttcagccagaagagcatcctgaccagacaccagctgatccacaccggcagaaagccctacgagtgcaacgagtgcggcaaggccttctacggcgtgagcagcctgaacagacaccagaaggcccacgccggcgaccccagataccagtgcaacgagtgcggcaaggccttcttcgacagaagcagcctgacccagcaccagaagatccacaccggcgacaagccctacgagtgcagcgagtgcggcaaggccttcagccagagatgcagactgaccagacaccagagagtgcacaccggcgagaagcccttcgagtgcaccgtgtgcggcaaggtgttcagcagcaagagcagcgtgatccagcaccagagaagatacgccaagcagggcatcgactag

SEQ ID NO: 109805 - DNA, 1041 bp, Artificial Sequence
  derived and/or modified sequence
atgctcgagaactataatagcatagtgagcctcgactgggagaccaagcccgagatccatgatgcctccgataagaagtctgaagggagtctgagagagtgccttggcaggcagtctccgttatgtcctaaattcgaggtgcatactccgaatggccgcatgggcacggagaagcaatcgccgtctggcgagacgcgtaaaaagtctctgtctcgtgataagggactccgaaggcggcgatccgcactgagccgggagattcttacaaaagagcgtcaccaggaatgtagcgactgtggaaaaacttttttcgaccattcgtctctcactcgccaccagaggactcacactggagaaaagccctacgactgccgagaatgtgggaaggccttttcacacaggtcttcgctatctcgtcacctcatgagccacactggagagtctccgtatgaatgttccgtgtgctctaaggcattcttcgacaggagctctttgacagtacaccagcgcattcataccggtgaaaagccgtttcagtgtaatgagtgcggcaaggccttctttgataggagctctctgacccgtcaccagcggatccatacgggggagagtccttacgagtgtcatcagtgtggaaaagcttttagccagaagagcatactgacacgccaccagctgatccatacaggccgcaaaccatatgagtgtaatgaatgtggtaaagcattctatggggtctcttctctgaataggcaccagaaagctcatgccggcgacccaaggtatcagtgtaatgagtgtggtaaggctttcttcgaccggtcatcattaactcagcaccaaaagatacacaccggagacaaaccctacgaatgttccgaatgtgggaaagctttctcccagcggtgccgcctgacacgccatcagcgggtccacacaggagagaaacccttcgaatgcaccgtctgtggaaaggtgttttcgagtaagtcctcagtcatacagcaccagcggaggtacgctaagcagggcattgattag

SEQ ID NO: 109806 - DNA, 1041 bp, Artificial Sequence
  derived and/or modified sequence
atgctggagaactacaacagcatcgtgtccctggactgggagaccaagccagagatccatgatgccagtgacaagaagtctgagggcagcctgagagaatgtctgggccggcagagccccctgtgccccaagtttgaggtgcacaccccaaatggaaggatgggcacagagaagcagagccccagcggggagaccaggaagaagagcctgagccgggacaagggcctgcggaggagaagaagtgccctgagccgggagatcctgaccaaggagcggcaccaggagtgcagcgactgtgggaagaccttctttgaccacagcagcctgaccaggcaccagaggacccacactggagagaagccctatgactgccgggagtgtgggaaggccttcagccacaggagcagcctgagccgccacctgatgagccacactggagagagcccctatgaatgttctgtgtgcagcaaggccttctttgacaggagcagcctgactgtgcaccagaggatccacactggagagaagcccttccagtgcaatgaatgtgggaaggccttctttgacaggagcagcctgaccaggcaccagaggatccacactggagagagcccctatgagtgccaccagtgtgggaaggccttcagccagaagagcatcctgaccaggcaccagctgatccacactggaaggaagccctatgaatgtaatgaatgtgggaaggccttctacggcgtgagcagcctgaacagacaccagaaggcccatgctggggacccccgctaccagtgcaatgaatgtgggaaggccttctttgacaggagcagcctgacccagcaccagaagatccacactggagacaagccctatgaatgttctgaatgtgggaaggccttcagccagcgctgccgcctgaccaggcaccagagggtgcacactggagagaagccctttgaatgtactgtgtgtgggaaggtgttcagcagcaagagcagcgtcatccagcaccagaggagatatgccaagcagggcattgattag

SEQ ID NO: 109807 - DNA, 1041 bp, Artificial Sequence
  derived and/or modified sequence
atgctggagaactacaacagcatcgtgagcctggactgggagaccaagcccgagattcacgatgcatcagacaaaaaaagtgaggggagtctgagagagtgtctgggccgtcaatcaccactgtgtcctaagtttgaggtgcacactccaaatgggagaatgggaacggaaaaacagtcgccttcgggcgagacgcgtaaaaagagcctatccagagataaaggactgcggagaagacgaagcgccctctccagggaaatcctgactaaggaaaggcaccaggaatgtagcgactgtgggaagaccttttttgatcatagttcactgactcggcaccagcgaactcatacaggtgagaagccatatgactgtagggagtgcggcaaggccttctctcacagatcatcactgtcaagacatctcatgagtcatacaggtgaaagcccatacgagtgctcagtctgctcgaaagctttcttcgatcggagctccctgactgtgcatcagagaattcacacaggcgaaaagccctttcaatgtaacgaatgcggtaaagcctttttcgatcggagttccctgacaaggcaccaacgcatccacacgggcgagtccccttacgagtgccaccagtgtggcaaagctttcagccagaagtccattttgacccgccatcaattaatacacacaggacgcaagccttacgagtgtaatgaatgtggtaaggccttttacggggtcagctcgcttaataggcaccagaaagcacatgcaggcgacccacgataccagtgcaacgagtgtggaaaagcattctttgatcgctctagcttaactcaacatcagaagatacatacaggcgacaaaccctatgaatgtagcgagtgcgggaaggccttcagtcaacggtgtagactgacccgtcatcaacgcgttcacacgggcgagaagcccttcgagtgtacagtctgcggaaaggtgtttagctcaaaatcaagtgtaatccagcatcagagaaggtacgctaagcagggtattgactag

SEQ ID NO: 109808 - DNA, 1041 bp, Artificial Sequence
  derived and/or modified sequence
atgctcgaaaattataattcgatcgtgagtcttgactgggagactaaaccagagattcatgacgccagtgataaaaagtccgagggctcacttcgggagtgtctgggcagacagagtcccttgtgtcccaagttcgaggtgcacacaccaaatgggaggatgggcactgagaaacagagcccgtctggagaaacaagaaagaagtcgctaagtagagataaggggctccgtcgtaggcggagtgcgctgtctagagaaattctgaccaaggagagacaccaggagtgctcagattgcgggaagacgttctttgatcactcttctctaacgcggcaccaaaggacgcacacaggcgaaaaaccctatgactgcagagaatgcggaaaggcattctctcaccgttcatccctctcacgacatcttatgtctcataccggcgagagcccttacgaatgtagcgtatgctcaaaagctttctttgatagaagtagcctgacggttcatcagagaatacacactggggaaaagcctttccagtgcaacgaatgtggcaaagctttcttcgatcgcagcagcctgacaagacaccaacgtatccataccggagaatcaccttatgagtgtcaccagtgcgggaaggcattctcgcagaagtctatccttacgcggcatcaactgattcatacgggaaggaagccttatgaatgcaatgagtgtggtaaggcattttatggggtctctagtctcaacagacaccaaaaggcccatgcgggagatccacgataccagtgcaatgaatgtggcaaagcttttttcgacaggtcttccctgactcagcaccagaaaatccatactggtgataaaccatacgagtgctctgaatgcggaaaggccttcagccaacgatgccggctgacacggcaccagcgtgtgcatactggagagaagcctttcgagtgtactgtctgtggaaaggtattttcatcaaagtccagcgttattcagcaccaacgcaggtacgccaagcaagggattgattag

SEQ ID NO: 109809 - protein, 439 aa, Artificial Sequence
  derived and/or modified sequence
MAAVSPTTRCQESVTFEDVAVVFTDEEWSRLVPIQRDLYKEVMLENYNSIVSLGLPVPQPDVIFQLKRGDKPWMVDLHGSEEREWPESVSLAQEKNCICFLFVPDWETKPEIHDASDKKSEGSLRECLGRQSPLCPKFEVHTPNGRMGTEKQSPSGETRKKSLSRDKGLRRRRSALSREILTKERHQECSDCGKTFFDHSSLTRHQRTHTGEKPYDCRECGKAFSHRSSLSRHLMSHTGESPYECSVCSKAFFDRSSLTVHQRIHTGEKPFQCNECGKAFFDRSSLTRHQRIHTGESPYECHQCGKAFSQKSILTRHQLIHTGRKPYECNECGKAFYGVSSLNRHQKAHAGDPRYQCNECGKAFFDRSSLTQHQKIHTGDKPYECSECGKAFSQRCRLTRHQRVHTGEKPFECTVCGKVFSSKSSVIQHQRRYAKQGID

SEQ ID NO: 109810 - DNA, 1320 bp, Artificial Sequence
  derived and/or modified sequence
atggccgccgtgagccccaccaccagatgccaggagagcgtgaccttcgaggacgtggccgtggtgttcaccgacgaggagtggagcagactggtgcccatccagagagacctgtacaaggaggtgatgctggagaactacaacagcatcgtgagcctgggcctgcccgtgccccagcccgacgtgatcttccagctgaagagaggcgacaagccctggatggtggacctgcacggcagcgaggagagagagtggcccgagagcgtgagcctggcccaggagaagaactgcatctgcttcctgttcgtgcccgactgggagaccaagcccgagatccacgacgccagcgacaagaagagcgagggcagcctgagagagtgcctgggcagacagagccccctgtgccccaagttcgaggtgcacacccccaacggcagaatgggcaccgagaagcagagccccagcggcgagaccagaaagaagagcctgagcagagacaagggcctgagaagaagaagaagcgccctgagcagagagatcctgaccaaggagagacaccaggagtgcagcgactgcggcaagaccttcttcgaccacagcagcctgaccagacaccagagaacccacaccggcgagaagccctacgactgcagagagtgcggcaaggccttcagccacagaagcagcctgagcagacacctgatgagccacaccggcgagagcccctacgagtgcagcgtgtgcagcaaggccttcttcgacagaagcagcctgaccgtgcaccagagaatccacaccggcgagaagcccttccagtgcaacgagtgcggcaaggccttcttcgacagaagcagcctgaccagacaccagagaatccacaccggcgagagcccctacgagtgccaccagtgcggcaaggccttcagccagaagagcatcctgaccagacaccagctgatccacaccggcagaaagccctacgagtgcaacgagtgcggcaaggccttctacggcgtgagcagcctgaacagacaccagaaggcccacgccggcgaccccagataccagtgcaacgagtgcggcaaggccttcttcgacagaagcagcctgacccagcaccagaagatccacaccggcgacaagccctacgagtgcagcgagtgcggcaaggccttcagccagagatgcagactgaccagacaccagagagtgcacaccggcgagaagcccttcgagtgcaccgtgtgcggcaaggtgttcagcagcaagagcagcgtgatccagcaccagagaagatacgccaagcagggcatcgactag

SEQ ID NO: 109811 - DNA, 1320 bp, Artificial Sequence
  derived and/or modified sequence
atggccgcagtctcccctacaactcggtgccaagaatccgttacgttcgaggacgtcgcagtcgtctttaccgacgaagaatggtcccgtttggtccctattcagcgggatttgtataaagaagtgatgttggagaattataattccattgtgagcctgggcctcccagtgccacagccggacgtgatcttccagttgaaaagaggcgataaaccctggatggttgacctgcatggatctgaggagagagaatggccagaatctgtcagcctggcccaagagaaaaattgtatctgttttttgtttgtacctgactgggagacaaaacccgagatccacgacgcgtcggacaaaaagagtgaggggagcctgagagagtgcctggggcggcagagtcctctgtgtcctaaattcgaagtacacacccccaatggacgtatgggcaccgaaaaacagagcccctccggcgaaacaaggaagaagtccctctctagggacaaggggcttagaagacggagatcagcattaagccgggagatcctgaccaaagagcgacaccaggaatgttccgattgcggaaagacatttttcgatcacagtagcctgaccagacaccagagaacccacacaggggaaaaaccttatgattgccgcgaatgtgggaaggccttctctcaccgctcgagcctgagccgacacctcatgtctcacaccggcgaaagcccatacgagtgcagcgtgtgttcaaaagccttcttcgacagatccagcttaactgtgcatcagaggattcatacgggtgaaaaaccctttcagtgtaatgagtgcggtaaagctttctttgatcgtagctcgttgacaaggcaccagcgcatccacactggtgagtctccatacgagtgccaccagtgtgggaaggccttttcacagaaatccattctgactcgtcaccagcttattcataccggaaggaaaccatacgagtgcaacgagtgtggcaaagctttctatggggtgagcagcttaaatcgccatcaaaaagcacacgctggggacccacgctatcaatgcaatgagtgcggaaaggccttcttcgacagatcgtctctgactcagcatcagaagattcacacaggggacaaaccctacgagtgttcggagtgcggcaaagccttcagccagagatgtcgactgactaggcaccagagggtgcacactggtgaaaagcccttcgaatgcacggtgtgtggaaaggttttctcctcaaagtcaagcgtgattcaacaccagaggagatatgctaaacagggcatagactag

SEQ ID NO: 109812 - DNA, 1320 bp, Artificial Sequence
  derived and/or modified sequence
atggctgctgtgagccccaccacccgctgccaggagagcgtgacctttgaagatgtggccgtggtgttcacagatgaggagtggagccggctggtgcccatccagagggacctgtacaaggaggtgatgctggagaactacaacagcatcgtgtccctgggcctgcctgtgccccagccagatgtgatcttccagctgaagagaggagacaagccctggatggtggacctgcacggcagcgaggagcgggagtggccagagagcgtgtccctggcccaggagaagaactgcatctgcttcctgtttgtgcctgactgggagaccaagccagagatccatgatgccagtgacaagaagtctgagggcagcctgcgggagtgcctgggccggcagagccccctgtgccccaagtttgaggtgcacacccccaacggccgcatgggcacagagaagcagagccccagcggggagaccaggaagaagagcctgagccgggacaagggcctgcggcggcggcgcagcgccctgagccgggagatcctgaccaaggagcggcaccaggagtgcagcgactgtgggaagaccttctttgaccacagcagcctgaccaggcaccagaggacccacactggagagaagccctatgactgcagagaatgtgggaaggccttcagccacaggagcagcctgagccgccacctgatgagccacactggagagagcccctatgagtgcagcgtgtgcagcaaggccttctttgacaggagcagcctgactgtgcaccagaggatccacactggagagaagcccttccagtgcaatgaatgtgggaaggccttctttgacaggagcagcctgaccaggcaccagaggatccacactggagagagcccctatgagtgccaccagtgtgggaaggccttcagccagaagagcatcctgaccaggcaccagctgatccacacaggcaggaagccctatgagtgcaatgaatgtgggaaggccttctatggagtgagcagcctgaacagacaccagaaggcccacgccggggacccccgctaccagtgcaatgaatgtgggaaggccttctttgacaggagcagcctgacccagcaccagaagatccacactggagacaagccctatgagtgcagtgaatgtgggaaggccttcagccagcgctgccgcctgaccaggcaccagagggtgcacactggagagaagccctttgagtgcaccgtgtgtgggaaggtgttcagcagcaagagcagcgtcatccagcaccagaggagatatgccaagcagggcatcgactag

SEQ ID NO: 109813 - DNA, 1320 bp, Artificial Sequence
  derived and/or modified sequence
atggccgccgtgagccccaccacccggtgccaggagagcgtgacctttgaggacgtggccgttgttttcacggatgaagaatggagccgtctggtcccgatccagagagacctgtacaaggaggtcatgctagaaaattacaattccatcgtttccctgggcttgccggtgcctcagcccgatgtcatctttcagctaaagcggggcgacaagccttggatggtggacctacacggaagcgaagaacgagaatggccagagagtgtgtccttagctcaggaaaagaattgtatttgtttcttattcgtacctgattgggagacaaaaccagaaatccatgatgcctcagacaagaaaagtgagggcagtctgagagaatgcctcgggcgacaatctcctttgtgtcctaaatttgaagtgcacacacctaatggtcgcatgggcacagaaaagcagtccccttcaggtgagacacggaagaagtccttgagtcgggataaaggactgcgaaggcgtcgtagcgcactcagcagagaaatactgactaaagaaaggcaccaggagtgttcagactgcggaaagactttcttcgaccactcctccctcacgcgtcatcagaggacccataccggggagaaaccctatgactgccgagaatgcggcaaggctttcagccaccgttcctctctctcgagacacctgatgagccatacaggagagtccccttacgagtgttccgtgtgttcaaaggcatttttcgataggtctagcttgacagtacatcaaagaatccacacaggagagaagcctttccagtgtaatgaatgcggcaaggcatttttcgatcgctcctctttaacacgacatcagcgcatccacaccggggagagtccttatgagtgtcaccaatgtggtaaggctttctcccagaagtctattctgacacggcatcaactaatccataccgggcgtaagccttacgaatgcaacgaatgcggaaaagccttctacggggtaagtagcttgaaccgtcaccagaaagctcacgctggggacccacgatatcagtgcaatgaatgtggaaaggcttttttcgataggtcttctctgacgcagcatcagaagatacatactggcgacaagccttacgagtgttccgagtgtgggaaggccttctcccagagatgtcgtctcacccgccaccagagggtccataccggcgagaagccatttgagtgcacagtgtgtggcaaggtgtttagttccaagtcctcagtcattcagcatcaacggagatacgccaagcagggaattgactag

SEQ ID NO: 109814 - DNA, 1320 bp, Artificial Sequence
  derived and/or modified sequence
atggcagcagtgagtccaacaacccgttgccaggagagcgtcaccttcgaggatgttgcagtggtgtttacggacgaggagtggagccgcctggtaccaattcagcgagacctctacaaggaggtcatgctggagaactataacagtatcgtcagtctgggtctgccagtaccacagcccgatgtgatctttcagttaaaaaggggcgacaaaccttggatggtcgacctgcacggctctgaggaaagagagtggcccgagagtgtgtctttggcacaggagaaaaactgtatttgcttcctattcgtccccgactgggaaaccaagcccgaaattcatgatgcttccgacaaaaaatcagaaggctcccttcgtgaatgtctgggacggcaaagccctttgtgtcctaagttcgaagtacatacgcctaacgggcgaatgggtaccgagaaacaaagtccgagcggcgagacaagaaaaaagtctttatctcgagacaagggactccgtcgcagacggtctgccctgtcacgcgagatcctgaccaaagagcggcaccaggaatgtagcgattgcgggaagacattttttgatcacagctctctcacgcgccaccagcgaacccacactggcgaaaaaccctacgattgtagggaatgtgggaaggccttttcgcatagatcaagtttgagtcgacacctgatgtcacacactggcgaaagtccatatgagtgctcagtgtgttcaaaggccttcttcgataggtcatccctgacagttcaccagagaatccacacaggcgaaaagccctttcagtgtaacgaatgcggtaaagcatttttcgacagaagctcgttgacccgccaccagcgaatacacacaggagaatctccttacgaatgccaccaatgcgggaaggcctttagtcaaaaatcgatcttgacacggcaccagctgattcacaccggtcgaaagccatacgagtgtaatgaatgcggtaaagccttctacggagtcagctccctaaaccgacaccagaaagctcatgcgggagatcccaggtaccaatgcaatgagtgcgggaaagcttttttcgacaggtcatcattgacgcagcaccaaaaaattcacaccggcgacaagccttatgaatgcagcgaatgtggcaaagccttttcgcagcgatgtcgcttgactaggcatcagagggtgcatactggcgagaaacccttcgagtgtaccgtttgcgggaaggtattcagtagtaaaagcagcgtcattcaacaccaacgcaggtatgcaaaacaaggtatagactag

SEQ ID NO: 109815 - DNA, 1468 bp, Artificial Sequence
  derived and/or modified sequence
gaagaggcgccgtcttcccgggtcccgagcactctgtgccggaggactctgcccttgtccacaaggagagcacacaggagagaatggctgctgtgtctccgaccaccagatgccaggaatcagtgacattcgaagacgttgccgtggttttcacagatgaagagtggagtcgtctggtccccatacagagggacctctacaaggaggtgatgctggagaactataacagcattgtgtcattgggccttccagttcctcaacctgatgtgattttccaattgaagagaggggacaagccgtggatggtagatcttcatgggtctgaggagagagaatggccagagagtgtctctctagcccaggaaaaaaactgcatctgttttctgtttgttccagactgggaaactaagcctgagattcacgatgcttcagacaaaaaatcagaaggatcattgagggaatgccttggaaggcaaagtcctctgtgtcctaaatttgaagttcatacacccaatggcaggatgggaacagaaaagcaaagcccttcaggggagactcgtaagaaatccctctcccgggacaaaggcttgcggcggcgacggtcagccctgtccagggaaattctcactaaagagagacaccaggaatgcagtgactgtgggaagaccttttttgaccactcatccctcacccgccatcagaggactcacactggggagaagccctacgactgccgcgagtgtgggaaagccttcagccacaggagcagcctcagcagacatctgatgtcacacactggggagagcccctacgagtgcagtgtgtgctcaaaagccttctttgaccgttcgtccctaactgtccatcagcgaattcacactggagagaaaccctttcagtgcaacgagtgtggaaaagccttttttgaccgttcatcccttactcgacaccagagaattcacactggagaaagtccttatgaatgtcatcagtgtgggaaagcctttagccagaaaagtattcttactcgccatcagctaatccacactggcaggaagccttatgagtgtaacgagtgcgggaaagctttctatggtgtctcgtctctgaatagacatcagaaagctcatgctggggaccctcgctatcagtgtaacgagtgtggcaaagctttctttgaccgctcatcccttacacagcatcagaagatccacactggagacaagccatatgaatgcagcgaatgcgggaaagcctttagccagcggtgccggctcacgcggcatcagcgtgtccacacgggagagaagccctttgaatgcactgtgtgtgggaaagttttcagttcaaaatcttctgttattcaacatcaacggcgttacgccaaacagggaatagactgagttgggcaaaagcttgggtaggacaagaacttccatacaaatttgagatagatctcgcctgtctt

SEQ ID NO: 109816 - protein, 418 aa, Artificial Sequence
  derived and/or modified sequence
MSYYGSSYHIINADAKYPGYPPEHIIAEKRRARRRLLHKDGSCNVYFKHIFGEWGSYVVDIFTTLVDTKWRHMFVIFSLSYILSWLIFGSVFWLIAFHHGDLLNDPDITPCVDNVHSFTGAFLFSLETQTTIGYGYRCVTEECSVAVLMVILQSILSCIINTFIIGAALAKMATARKRAQTIRFSYFALIGMRDGKLCLMWRIGDFRPNHVVEGTVRAQLLRYTEDSEGRMTMAFKDLKLVNDQIILVTPVTIVHEIDHESPLYALDRKAVAKDNFEILVTFIYTGDSTGTSHQSRSSYVPREILWGHRFNDVLEVKRKYYKVNCLQFEGSVEVYAPFCSAKQLDWKDQQLHIEKAPPVRESCTSDTKARRRSFSAVAIVSSCENPEETTTSATHEYRETPYQKALLTLNRISVESQM

SEQ ID NO: 109817 - DNA, 3684 bp, Artificial Sequence
  derived and/or modified sequence
gagcattctctaccattgcccagctgaaagcacctagctcatagattctctgtggggagagtgaataaaggttctaactgaaaacccaaaccaagaaatagcaacaagtctagaattcttactactacaaaactcacctggatccctaagggcacagcaaagaatgagctattacggcagcagctatcatattatcaatgcggacgcaaaatacccaggctacccgccagagcacattatagctgagaagagaagagcaagaagacgattacttcacaaagatggcagctgtaatgtctacttcaagcacatttttggagaatggggaagctatgtggttgacatcttcaccactcttgtggacaccaagtggcgccatatgtttgtgatattttctttatcttatattctctcgtggttgatatttggctctgtcttttggctcatagcctttcatcatggcgatctattaaatgatccagacatcacaccttgtgttgacaacgtccattctttcacaggggcctttttgttctccctagagacccaaaccaccataggatatggttatcgctgtgttactgaagaatgttctgtggccgtgctcatggtgatcctccagtccatcttaagttgcatcataaatacctttatcattggagctgccttggccaaaatggcaactgctcgaaagagagcccaaaccattcgtttcagctactttgcacttataggtatgagagatgggaagctttgcctcatgtggcgcattggtgattttcggccaaaccacgtggtagaaggaacagttagagcccaacttctccgctatacagaagacagtgaagggaggatgacgatggcatttaaagacctcaaattagtcaacgaccaaatcatcctggtcaccccggtaactattgtccatgaaattgaccatgagagccctctgtatgcccttgaccgcaaagcagtagccaaagataactttgagattttggtgacatttatctatactggtgattccactggaacatctcaccaatctagaagctcctatgttccccgagaaattctctggggccataggtttaatgatgtcttggaagttaagaggaagtattacaaagtgaactgcttacagtttgaaggaagtgtggaagtatatgcccccttttgcagtgccaagcaattggactggaaagaccagcagctccacatagaaaaagcaccaccagttcgagaatcctgcacgtcggacaccaaggcgagacgaaggtcatttagtgcagttgccattgtcagcagctgtgaaaaccctgaggagaccaccacttccgccacacatgaatatagggaaacaccttatcagaaagctctcctgactttaaacagaatctctgtagaatcccaaatgtagtcctaaattgcaattatgagggctaccactgaatcattttatctttcagccaatcaagtcgttgtaaacgtggcttttttgaaagtgttatggctatgttttatgatgatgctgggtaagtagagtaagttaaacttggtaaaagataatctaaaaattccatagttctcagttattaaaatttttcttgttcgccaattttgtattaagaatgctattaagcctaattgattaaaatttatcttttttattatcttacatgcttgtatcttcagttggaggtgtagtattcaaaaacggggaatgaaggcaggaaggaggctggaataaataaaaataaaaatagacaagtaagacagcataaataatacatttttaaacatgtcaacattgataatacaatgaagatttaccataaaaagtatcatatctaaccaagatatgcaaaagatgcattcagtaagctgtaacgttgagaaatgtaactgtgaaatcagctcaccagttcaagtcactaggtttgccacttggaccgtcttggtttcagcgagcatagcgagtggctgtaagaaattgtccatgccaccaattccactgctacttgcccaggtagtgatcagtgagagttagaagcaattttttctctaaccgatgaggcagaagaaaagttaacagtatttaaagcagcatttctctcttaacgttcctgggagactccaacaaatggagaccagaaacaaggcaaccacgaccttgctaggttctctgaggaggggactttctatgttcacgtcccaccttcttcgaggacatgaccaagggacaggatcatacagatgaggtgaggggatggttagcagcgataaacattctcagacccttggagagaaaccgttgctagcttgctggtcccgaaagattgcaactttggctgctacagaaaggatagaacctttttggggggagggtggggagggagatatttatttgtgcccagaagcagttatgtatgcttcttgtcttggttactgtacaagatacaaatgactcgagttgtggattgcaagaaactcttttattaaacttggaacaaccatttaaatgaaggattttgtgagatagaattcaattaaagcgatttgaatgcacagtaagtggataatctgagtacaatgaaatttcttaagttttagaacatgagataaagttgtatactctactttcatgttaaaatgttaatcatgattactttaagcccacatccactgagtaaagagtcactttaaactttataaatcaaagagatattaggaacattcagaattatttgtgttttgtttttgttttacattgttgctgcactggcaataagtatgtggcactgtttttatttgtttatgttatttaaatacacacccagacacacacacacacagtttttgctttttctggaaaatctttctttctcttctctctccatgaaaattaaaacacacaagtgaatgaagtaattacatagtccaagattagaaatacaagtaaaatatataggtataggtagatagagtgcctttctgtttcttttcttttcttttttctttttttgttcttccttcctttcttccctcctccccctcatccttccctttctccttcttttcccttttttttttttttttgacctgggagtaataaagttactttttaaatgcacgtatgcaatcttttattcctcttgttttatggataagagatttgttcaggtcaaaagttgcaaaactgttctgaagcttaatattagagacccaagtaagattgtttttagtcttgcttgaggaatgcacactccatttaaaaaattgtgcgctctgtagatttggattttacagcagcaattacttggctaaattagagtactgcaatcttgtaagtagaaaacagccaccatgacaataaacaaaaacacttaaaaatatttttagcttgttttacctacatctagtttcatttcatcttgctttgctttgttgactctgctaccgctgatgtttgccttgtcaatatcagaataggggcatcagtgtcccgtgaaatacattttgttgtgctatgagcctctgtaatcaaatgcttgtactcagaagagagtgtaaaatcagcatttctatgtaacatatatctctaattatctgtgtaattttataacatactttgacaaccccagtgagttacttaataataaagatcttaaaataatgcaaaaa

SEQ ID NO: 109818 - DNA, 4002 bp, Artificial Sequence
  derived and/or modified sequence
tgtctggagcttttctttcctttattattaactaaagagcattctctaccattgcccagctgaaagcacctagctcatagattctctgtggggagagtgaataaagaatgggggattgaggcacagagtgttaaaatagtgagacacaggattctaactggcagactggcactttatctcaattcttaactgctgtgttgcctctcactttaaagacatccacattccaccctgggccttgcccgtctggtgagcccaatctctgctggtcagtcacgcagttgaggtcagggaaggagtaactcaagatgattttgatgttgcagttttaaatttcactttgacttgagctgggaaatcctttggcctattataccatggatgctaaaaatggttctaactgaaaacccaaaccaagaaatagcaacaagtctagaattcttactactacaaaactcacctggatccctaagggcacagcaaagaatgagctattacggcagcagctatcatattatcaatgcggacgcaaaatacccaggctacccgccagagcacattatagctgagaagagaagagcaagaagacgattacttcacaaagatggcagctgtaatgtctacttcaagcacatttttggagaatggggaagctatgtggttgacatcttcaccactcttgtggacaccaagtggcgccatatgtttgtgatattttctttatcttatattctctcgtggttgatatttggctctgtcttttggctcatagcctttcatcatggcgatctattaaatgatccagacatcacaccttgtgttgacaacgtccattctttcacaggggcctttttgttctccctagagacccaaaccaccataggatatggttatcgctgtgttactgaagaatgttctgtggccgtgctcatggtgatcctccagtccatcttaagttgcatcataaatacctttatcattggagctgccttggccaaaatggcaactgctcgaaagagagcccaaaccattcgtttcagctactttgcacttataggtatgagagatgggaagctttgcctcatgtggcgcattggtgattttcggccaaaccacgtggtagaaggaacagttagagcccaacttctccgctatacagaagacagtgaagggaggatgacgatggcatttaaagacctcaaattagtcaacgaccaaatcatcctggtcaccccggtaactattgtccatgaaattgaccatgagagccctctgtatgcccttgaccgcaaagcagtagccaaagataactttgagattttggtgacatttatctatactggtgattccactggaacatctcaccaatctagaagctcctatgttccccgagaaattctctggggccataggtttaatgatgtcttggaagttaagaggaagtattacaaagtgaactgcttacagtttgaaggaagtgtggaagtatatgcccccttttgcagtgccaagcaattggactggaaagaccagcagctccacatagaaaaagcaccaccagttcgagaatcctgcacgtcggacaccaaggcgagacgaaggtcatttagtgcagttgccattgtcagcagctgtgaaaaccctgaggagaccaccacttccgccacacatgaatatagggaaacaccttatcagaaagctctcctgactttaaacagaatctctgtagaatcccaaatgtagtcctaaattgcaattatgagggctaccactgaatcattttatctttcagccaatcaagtcgttgtaaacgtggcttttttgaaagtgttatggctatgttttatgatgatgctgggtaagtagagtaagttaaacttggtaaaagataatctaaaaattccatagttctcagttattaaaatttttcttgttcgccaattttgtattaagaatgctattaagcctaattgattaaaatttatcttttttattatcttacatgcttgtatcttcagttggaggtgtagtattcaaaaacggggaatgaaggcaggaaggaggctggaataaataaaaataaaaatagacaagtaagacagcataaataatacatttttaaacatgtcaacattgataatacaatgaagatttaccataaaaagtatcatatctaaccaagatatgcaaaagatgcattcagtaagctgtaacgttgagaaatgtaactgtgaaatcagctcaccagttcaagtcactaggtttgccacttggaccgtcttggtttcagcgagcatagcgagtggctgtaagaaattgtccatgccaccaattccactgctacttgcccaggtagtgatcagtgagagttagaagcaattttttctctaaccgatgaggcagaagaaaagttaacagtatttaaagcagcatttctctcttaacgttcctgggagactccaacaaatggagaccagaaacaaggcaaccacgaccttgctaggttctctgaggaggggactttctatgttcacgtcccaccttcttcgaggacatgaccaagggacaggatcatacagatgaggtgaggggatggttagcagcgataaacattctcagacccttggagagaaaccgttgctagcttgctggtcccgaaagattgcaactttggctgctacagaaaggatagaacctttttggggggagggtggggagggagatatttatttgtgcccagaagcagttatgtatgcttcttgtcttggttactgtacaagatacaaatgactcgagttgtggattgcaagaaactcttttattaaacttggaacaaccatttaaatgaaggattttgtgagatagaattcaattaaagcgatttgaatgcacagtaagtggataatctgagtacaatgaaatttcttaagttttagaacatgagataaagttgtatactctactttcatgttaaaatgttaatcatgattactttaagcccacatccactgagtaaagagtcactttaaactttataaatcaaagagatattaggaacattcagaattatttgtgttttgtttttgttttacattgttgctgcactggcaataagtatgtggcactgtttttatttgtttatgttatttaaatacacacccagacacacacacacacagtttttgctttttctggaaaatctttctttctcttctctctccatgaaaattaaaacacacaagtgaatgaagtaattacatagtccaagattagaaatacaagtaaaatatataggtataggtagatagagtgcctttctgtttcttttcttttcttttttctttttttgttcttccttcctttcttccctcctccccctcatccttccctttctccttcttttcccttttttttttttttttgacctgggagtaataaagttactttttaaatgcacgtatgcaatcttttattcctcttgttttatggataagagatttgttcaggtcaaaagttgcaaaactgttctgaagcttaatattagagacccaagtaagattgtttttagtcttgcttgaggaatgcacactccatttaaaaaattgtgcgctctgtagatttggattttacagcagcaattacttggctaaattagagtactgcaatcttgtaagtagaaaacagccaccatgacaataaacaaaaacacttaaaaatatttttagcttgttttacctacatctagtttcatttcatcttgctttgctttgttgactctgctaccgctgatgtttgccttgtcaatatcagaataggggcatcagtgtcccgtgaaatacattttgttgtgctatgagcctctgtaatcaaatgcttgtactcagaagagagtgtaaaatcagcatttctatgtaacatatatctctaattatctgtgtaattttataacatactttgacaaccccagtgagttacttaataataaagatcttaaaataatgc

SEQ ID NO: 109819 - DNA, 4009 bp, Artificial Sequence
  derived and/or modified sequence
gagaactcagtggcctttgtctgtggtgaatgtatccggaaaggcaaagaagagagagattctcctgtggggtttctcatctccatggcggtaggtgctgacagcttcagaagggtactaacagggccaagagaaaagggccctgagatgctcagctacggtgctcttacaagatgaaaaggacatggggttcagatctgcacttcatcatctttcactaagacatccacattccaccctgggccttgcccgtctggtgagcccaatctctgctggtcagtcacgcagttgaggtcagggaaggagtaactcaagatgattttgatgttgcagttttaaatttcactttgacttgagctgggaaatcctttggcctattataccatggatgctaaaaatggttctaactgaaaacccaaaccaagaaatagcaacaagtctagaattcttactactacaaaactcacctggatccctaagggcacagcaaagaatgagctattacggcagcagctatcatattatcaatgcggacgcaaaatacccaggctacccgccagagcacattatagctgagaagagaagagcaagaagacgattacttcacaaagatggcagctgtaatgtctacttcaagcacatttttggagaatggggaagctatgtggttgacatcttcaccactcttgtggacaccaagtggcgccatatgtttgtgatattttctttatcttatattctctcgtggttgatatttggctctgtcttttggctcatagcctttcatcatggcgatctattaaatgatccagacatcacaccttgtgttgacaacgtccattctttcacaggggcctttttgttctccctagagacccaaaccaccataggatatggttatcgctgtgttactgaagaatgttctgtggccgtgctcatggtgatcctccagtccatcttaagttgcatcataaatacctttatcattggagctgccttggccaaaatggcaactgctcgaaagagagcccaaaccattcgtttcagctactttgcacttataggtatgagagatgggaagctttgcctcatgtggcgcattggtgattttcggccaaaccacgtggtagaaggaacagttagagcccaacttctccgctatacagaagacagtgaagggaggatgacgatggcatttaaagacctcaaattagtcaacgaccaaatcatcctggtcaccccggtaactattgtccatgaaattgaccatgagagccctctgtatgcccttgaccgcaaagcagtagccaaagataactttgagattttggtgacatttatctatactggtgattccactggaacatctcaccaatctagaagctcctatgttccccgagaaattctctggggccataggtttaatgatgtcttggaagttaagaggaagtattacaaagtgaactgcttacagtttgaaggaagtgtggaagtatatgcccccttttgcagtgccaagcaattggactggaaagaccagcagctccacatagaaaaagcaccaccagttcgagaatcctgcacgtcggacaccaaggcgagacgaaggtcatttagtgcagttgccattgtcagcagctgtgaaaaccctgaggagaccaccacttccgccacacatgaatatagggaaacaccttatcagaaagctctcctgactttaaacagaatctctgtagaatcccaaatgtagtcctaaattgcaattatgagggctaccactgaatcattttatctttcagccaatcaagtcgttgtaaacgtggcttttttgaaagtgttatggctatgttttatgatgatgctgggtaagtagagtaagttaaacttggtaaaagataatctaaaaattccatagttctcagttattaaaatttttcttgttcgccaattttgtattaagaatgctattaagcctaattgattaaaatttatcttttttattatcttacatgcttgtatcttcagttggaggtgtagtattcaaaaacggggaatgaaggcaggaaggaggctggaataaataaaaataaaaatagacaagtaagacagcataaataatacatttttaaacatgtcaacattgataatacaatgaagatttaccataaaaagtatcatatctaaccaagatatgcaaaagatgcattcagtaagctgtaacgttgagaaatgtaactgtgaaatcagctcaccagttcaagtcactaggtttgccacttggaccgtcttggtttcagcgagcatagcgagtggctgtaagaaattgtccatgccaccaattccactgctacttgcccaggtagtgatcagtgagagttagaagcaattttttctctaaccgatgaggcagaagaaaagttaacagtatttaaagcagcatttctctcttaacgttcctgggagactccaacaaatggagaccagaaacaaggcaaccacgaccttgctaggttctctgaggaggggactttctatgttcacgtcccaccttcttcgaggacatgaccaagggacaggatcatacagatgaggtgaggggatggttagcagcgataaacattctcagacccttggagagaaaccgttgctagcttgctggtcccgaaagattgcaactttggctgctacagaaaggatagaacctttttggggggagggtggggagggagatatttatttgtgcccagaagcagttatgtatgcttcttgtcttggttactgtacaagatacaaatgactcgagttgtggattgcaagaaactcttttattaaacttggaacaaccatttaaatgaaggattttgtgagatagaattcaattaaagcgatttgaatgcacagtaagtggataatctgagtacaatgaaatttcttaagttttagaacatgagataaagttgtatactctactttcatgttaaaatgttaatcatgattactttaagcccacatccactgagtaaagagtcactttaaactttataaatcaaagagatattaggaacattcagaattatttgtgttttgtttttgttttacattgttgctgcactggcaataagtatgtggcactgtttttatttgtttatgttatttaaatacacacccagacacacacacacacagtttttgctttttctggaaaatctttctttctcttctctctccatgaaaattaaaacacacaagtgaatgaagtaattacatagtccaagattagaaatacaagtaaaatatataggtataggtagatagagtgcctttctgtttcttttcttttcttttttctttttttgttcttccttcctttcttccctcctccccctcatccttccctttctccttcttttcccttttttttttttttttgacctgggagtaataaagttactttttaaatgcacgtatgcaatcttttattcctcttgttttatggataagagatttgttcaggtcaaaagttgcaaaactgttctgaagcttaatattagagacccaagtaagattgtttttagtcttgcttgaggaatgcacactccatttaaaaaattgtgcgctctgtagatttggattttacagcagcaattacttggctaaattagagtactgcaatcttgtaagtagaaaacagccaccatgacaataaacaaaaacacttaaaaatatttttagcttgttttacctacatctagtttcatttcatcttgctttgctttgttgactctgctaccgctgatgtttgccttgtcaatatcagaataggggcatcagtgtcccgtgaaatacattttgttgtgctatgagcctctgtaatcaaatgcttgtactcagaagagagtgtaaaatcagcatttctatgtaacatatatctctaattatctgtgtaattttataacatactttgacaaccccagtgagttacttaataataaagatcttaaaataatgc

SEQ ID NO: 109820 - DNA, 3921 bp, Artificial Sequence
  derived and/or modified sequence
tgtctggagcttttctttcctttattattaactaaagagcattctctaccattgcccagctgaaagcacctagctcatagattctctgtggggagagtgaataaagaatgggggattgaggcacagagtgttaaaatagtgagacacaggattctaactggcagactggcactttatctcaattcttaactgctgtgttgcctctcactttaaaggagtaactcaagatgattttgatgttgcagttttaaatttcactttgacttgagctgggaaatcctttggcctattataccatggatgctaaaaatggttctaactgaaaacccaaaccaagaaatagcaacaagtctagaattcttactactacaaaactcacctggatccctaagggcacagcaaagaatgagctattacggcagcagctatcatattatcaatgcggacgcaaaatacccaggctacccgccagagcacattatagctgagaagagaagagcaagaagacgattacttcacaaagatggcagctgtaatgtctacttcaagcacatttttggagaatggggaagctatgtggttgacatcttcaccactcttgtggacaccaagtggcgccatatgtttgtgatattttctttatcttatattctctcgtggttgatatttggctctgtcttttggctcatagcctttcatcatggcgatctattaaatgatccagacatcacaccttgtgttgacaacgtccattctttcacaggggcctttttgttctccctagagacccaaaccaccataggatatggttatcgctgtgttactgaagaatgttctgtggccgtgctcatggtgatcctccagtccatcttaagttgcatcataaatacctttatcattggagctgccttggccaaaatggcaactgctcgaaagagagcccaaaccattcgtttcagctactttgcacttataggtatgagagatgggaagctttgcctcatgtggcgcattggtgattttcggccaaaccacgtggtagaaggaacagttagagcccaacttctccgctatacagaagacagtgaagggaggatgacgatggcatttaaagacctcaaattagtcaacgaccaaatcatcctggtcaccccggtaactattgtccatgaaattgaccatgagagccctctgtatgcccttgaccgcaaagcagtagccaaagataactttgagattttggtgacatttatctatactggtgattccactggaacatctcaccaatctagaagctcctatgttccccgagaaattctctggggccataggtttaatgatgtcttggaagttaagaggaagtattacaaagtgaactgcttacagtttgaaggaagtgtggaagtatatgcccccttttgcagtgccaagcaattggactggaaagaccagcagctccacatagaaaaagcaccaccagttcgagaatcctgcacgtcggacaccaaggcgagacgaaggtcatttagtgcagttgccattgtcagcagctgtgaaaaccctgaggagaccaccacttccgccacacatgaatatagggaaacaccttatcagaaagctctcctgactttaaacagaatctctgtagaatcccaaatgtagtcctaaattgcaattatgagggctaccactgaatcattttatctttcagccaatcaagtcgttgtaaacgtggcttttttgaaagtgttatggctatgttttatgatgatgctgggtaagtagagtaagttaaacttggtaaaagataatctaaaaattccatagttctcagttattaaaatttttcttgttcgccaattttgtattaagaatgctattaagcctaattgattaaaatttatcttttttattatcttacatgcttgtatcttcagttggaggtgtagtattcaaaaacggggaatgaaggcaggaaggaggctggaataaataaaaataaaaatagacaagtaagacagcataaataatacatttttaaacatgtcaacattgataatacaatgaagatttaccataaaaagtatcatatctaaccaagatatgcaaaagatgcattcagtaagctgtaacgttgagaaatgtaactgtgaaatcagctcaccagttcaagtcactaggtttgccacttggaccgtcttggtttcagcgagcatagcgagtggctgtaagaaattgtccatgccaccaattccactgctacttgcccaggtagtgatcagtgagagttagaagcaattttttctctaaccgatgaggcagaagaaaagttaacagtatttaaagcagcatttctctcttaacgttcctgggagactccaacaaatggagaccagaaacaaggcaaccacgaccttgctaggttctctgaggaggggactttctatgttcacgtcccaccttcttcgaggacatgaccaagggacaggatcatacagatgaggtgaggggatggttagcagcgataaacattctcagacccttggagagaaaccgttgctagcttgctggtcccgaaagattgcaactttggctgctacagaaaggatagaacctttttggggggagggtggggagggagatatttatttgtgcccagaagcagttatgtatgcttcttgtcttggttactgtacaagatacaaatgactcgagttgtggattgcaagaaactcttttattaaacttggaacaaccatttaaatgaaggattttgtgagatagaattcaattaaagcgatttgaatgcacagtaagtggataatctgagtacaatgaaatttcttaagttttagaacatgagataaagttgtatactctactttcatgttaaaatgttaatcatgattactttaagcccacatccactgagtaaagagtcactttaaactttataaatcaaagagatattaggaacattcagaattatttgtgttttgtttttgttttacattgttgctgcactggcaataagtatgtggcactgtttttatttgtttatgttatttaaatacacacccagacacacacacacacagtttttgctttttctggaaaatctttctttctcttctctctccatgaaaattaaaacacacaagtgaatgaagtaattacatagtccaagattagaaatacaagtaaaatatataggtataggtagatagagtgcctttctgtttcttttcttttcttttttctttttttgttcttccttcctttcttccctcctccccctcatccttccctttctccttcttttcccttttttttttttttttgacctgggagtaataaagttactttttaaatgcacgtatgcaatcttttattcctcttgttttatggataagagatttgttcaggtcaaaagttgcaaaactgttctgaagcttaatattagagacccaagtaagattgtttttagtcttgcttgaggaatgcacactccatttaaaaaattgtgcgctctgtagatttggattttacagcagcaattacttggctaaattagagtactgcaatcttgtaagtagaaaacagccaccatgacaataaacaaaaacacttaaaaatatttttagcttgttttacctacatctagtttcatttcatcttgctttgctttgttgactctgctaccgctgatgtttgccttgtcaatatcagaataggggcatcagtgtcccgtgaaatacattttgttgtgctatgagcctctgtaatcaaatgcttgtactcagaagagagtgtaaaatcagcatttctatgtaacatatatctctaattatctgtgtaattttataacatactttgacaaccccagtgagttacttaataataaagatcttaaaataatgc

SEQ ID NO: 109821 - protein, 1922 aa, Artificial Sequence
  derived and/or modified sequence
MKSPALQPLSMAGLQLMTPASSPMGPFFGLPWQQEAIHDNIYTPRKYQVELLEAALDHNTIVCLNTGSGKTFIAVLLTKELSYQIRGDFSRNGKRTVFLVNSANQVAQQVSAVRTHSDLKVGEYSNLEVNASWTKERWNQEFTKHQVLIMTCYVALNVLKNGYLSLSDINLLVFDECHLAILDHPYREIMKLCENCPSCPRILGLTASILNGKCDPEELEEKIQKLEKILKSNAETATDLVVLDRYTSQPCEIVVDCGPFTDRSGLYERLLMELEEALNFINDCNISVHSKERDSTLISKQILSDCRAVLVVLGPWCADKVAGMMVRELQKYIKHEQEELHRKFLLFTDTFLRKIHALCEEHFSPASLDLKFVTPKVIKLLEILRKYKPYERQQFESVEWYNNRNQDNYVSWSDSEDDDEDEEIEEKEKPETNFPSPFTNILCGIIFVERRYTAVVLNRLIKEAGKQDPELAYISSNFITGHGIGKNQPRNKQMEAEFRKQEEVLRKFRAHETNLLIATSIVEEGVDIPKCNLVVRFDLPTEYRSYVQSKGRARAPISNYIMLADTDKIKSFEEDLKTYKAIEKILRNKCSKSVDTGETDIDPVMDDDDVFPPYVLRPDDGGPRVTINTAIGHINRYCARLPSDPFTHLAPKCRTRELPDGTFYSTLYLPINSPLRASIVGPPMSCVRLAERVVALICCEKLHKIGELDDHLMPVGKETVKYEEELDLHDEEETSVPGRPGSTKRRQCYPKAIPECLRDSYPRPDQPCYLYVIGMVLTTPLPDELNFRRRKLYPPEDTTRCFGILTAKPIPQIPHFPVYTRSGEVTISIELKKSGFMLSLQMLELITRLHQYIFSHILRLEKPALEFKPTDADSAYCVLPLNVVNDSSTLDIDFKFMEDIEKSEARIGIPSTKYTKETPFVFKLEDYQDAVIIPRYRNFDQPHRFYVADVYTDLTPLSKFPSPEYETFAEYYKTKYNLDLTNLNQPLLDVDHTSSRLNLLTPRHLNQKGKALPLSSAEKRKAKWESLQNKQILVPELCAIHPIPASLWRKAVCLPSILYRLHCLLTAEELRAQTASDAGVGVRSLPADFRYPNLDFGWKKSIDSKSFISISNSSSAENDNYCKHSTIVPENAAHQGANRTSSLENHDQMSVNCRTLLSESPGKLHVEVSADLTAINGLSYNQNLANGSYDLANRDFCQGNQLNYYKQEIPVQPTTSYSIQNLYSYENQPQPSDECTLLSNKYLDGNANKSTSDGSPVMAVMPGTTDTIQVLKGRMDSEQSPSIGYSSRTLGPNPGLILQALTLSNASDGFNLERLEMLGDSFLKHAITTYLFCTYPDAHEGRLSYMRSKKVSNCNLYRLGKKKGLPSRMVVSIFDPPVNWLPPGYVVNQDKSNTDKWEKDEMTKDCMLANGKLDEDYEEEDEEEESLMWRAPKEEADYEDDFLEYDQEHIRFIDNMLMGSGAFVKKISLSPFSTTDSAYEWKMPKKSSLGSMPFSSDFEDFDYSSWDAMCYLDPSKAVEEDDFVVGFWNPSEENCGVDTGKQSISYDLHTEQCIADKSIADCVEALLGCYLTSCGERAAQLFLCSLGLKVLPVIKRTDREKALCPTRENFNSQQKNLSVSCAAASVASSRSSVLKDSEYGCLKIPPRCMFDHPDADKTLNHLISGFENFEKKINYRFKNKAYLLQAFTHASYHYNTITDCYQRLEFLGDAILDYLITKHLYEDPRQHSPGVLTDLRSALVNNTIFASLAVKYDYHKYFKAVSPELFHVIDDFVQFQLEKNEMQGMDSELRRSEEDEEKEEDIEVPKAMGDIFESLAGAIYMDSGMSLETVWQVYYPMMRPLIEKFSANVPRSPVRELLEMEPETAKFSPAERTYDGKVRVTVEVVGKGKFKGVGRSYRIAKSAAARRALRSLKANQPQVPNS

SEQ ID NO: 109822 - protein, 70 aa, Artificial Sequence
  derived and/or modified sequence
MKSPALQPLSMAGLQLMTPASSPMGPFFGLPWQQEAIHDNIYTPRKYQVELLEAALDHNTIVCLNTGSGK

SEQ ID NO: 109823 - DNA, 5769 bp, Artificial Sequence
  derived and/or modified sequence
atgaagtctcccgcgctgcaacccttgtccatggcgggactccagctgatgacgccagcttctagccccatggggcccttcttcgggctcccttggcagcaggaggcaatccatgacaacatctatactccacgaaagtaccaggtagagttattagaagcagctctggatcacaacactatagtttgtctgaacactggttctggcaagacatttatcgccgtacttctcacaaaagaattgagctaccaaattaggggcgattttagtcggaacgggaaacggaccgtgttcctggtcaactctgccaaccaggtagcccagcaggtgagtgctgtgaggacccattctgacctaaaagtgggggagtatagcaatcttgaagtaaacgcttcctggactaaagagcggtggaatcaagagttcactaagcatcaagtgctgattatgacatgttatgtggccctaaacgtcttaaaaaacgggtacctcagcctatccgatatcaacctgcttgtgttcgatgagtgccacctggccatcctggatcatccttatcgggagataatgaagttgtgcgagaactgtccgtcctgcccccgtattttgggactgaccgccagcatcctcaacggaaagtgtgatcccgaggagttggaggagaagattcagaagcttgagaagatcctgaagagcaatgctgaaaccgccaccgatctcgtggtcctggaccgatacacatcacaaccgtgcgagattgtggtagactgcggcccattcaccgatcgctccgggctctatgaaaggctcctgatggaactcgaggaggccctcaattttatcaatgactgtaacatcagcgtacactcaaaggaacgtgatagtaccctcatttccaaacagatcctgtcggactgccgagcggttctcgtggtcttggggccctggtgtgccgacaaggtggctgggatgatggtgagggaactgcaaaagtacatcaaacacgagcaggaggagcttcatcgtaaattcctgctattcacagacaccttcctgagaaaaatacatgctctctgtgaggaacatttttcccctgcatcgctggatcttaagtttgtgaccccaaaagtgataaagctgctcgagatcttgcggaagtacaaaccctacgaaaggcaacagttcgagtccgtggagtggtataacaacagaaaccaggataattacgtgtcatggagtgactccgaagacgatgatgaagatgaggaaatagaggaaaaggagaaacccgagacaaatttcccatcacccttcactaacatcctctgcgggataatctttgtggaacggaggtacactgccgtggtgttgaaccgccttatcaaggaagccggcaagcaggatccagaacttgcctacataagtagcaactttatcacagggcacggaattggcaagaatcagccccggaataaacagatggaggccgaatttagaaaacaggaagaggtgcttcgaaaattccgcgctcacgagacaaacctgctgatcgccacatctattgtggaggagggcgtcgatatccctaaatgcaacctcgtggtacgattcgaccttcctacagagtacagatcttacgtgcagtcaaagggacgtgcacgagcacccatcagtaattacatcatgttggcagacacagataagattaaaagtttcgaggaggacctgaagacatataaggcaatcgagaaaattctgagaaataaatgttcaaaaagcgttgacactggagaaaccgacatcgatcccgtcatggacgatgatgatgttttccccccctacgtgttaaggccagatgacggcgggcctcgggtaaccattaacaccgctatcggtcatatcaacagatattgcgctaggttgccctctgatccatttacacatttggccccaaagtgtagaactcgagaacttcctgacggaaccttttactcgacattgtaccttcctatcaatagcccactcagagcctccatcgtcggccccccgatgagttgcgtgagactggcagagagagtagttgctttgatatgctgcgagaaattgcacaagattggtgagctcgacgatcacctgatgccggtggggaaggagactgtaaaatatgaagaggagcttgatctgcatgatgaagaggaaacctccgtgcccgggcggcctgggtccacaaagcggagacagtgttaccccaaggctattcccgaatgcttacgcgacagttatccacgtcccgatcagccttgctatttgtacgtcattggtatggtgctgaccaccccattaccagatgaactgaattttcgaagacgcaaactgtacccacctgaggatacaacacgctgtttcggaattttgacagcgaaacccattcctcaaattcctcacttccctgtatacactaggagcggtgaggttacaatttccattgaactgaagaaatctgggtttatgctgagcctgcagatgcttgagctaattacgagactccatcagtacatcttttcccatatcctcagattggaaaagcccgcgctggaatttaagcccaccgacgcggatagcgcctattgtgttttgccgctgaatgtagtgaatgattcgtctaccttagacatcgattttaagtttatggaagatatcgagaaaagtgaggctcggattggcattccctcaactaagtataccaaggaaacaccattcgtgtttaagctcgaagattatcaggacgcagttattattcctaggtataggaatttcgatcagccacaccggttctacgtggctgatgtatatacagatctcacccccttgtccaaattcccttctcctgagtatgagacctttgccgaatattacaaaactaagtataatctagacctgacaaatcttaaccaacccctactggacgtggatcatacttcatctcggctcaacctacttactcctcgtcacctgaaccagaaaggcaaggccctgcctctgagtagcgcggaaaagcggaaggccaaatgggaatccctgcaaaacaagcagattttagttcccgagctctgcgccattcatcctatccccgcgtctttatggcgtaaagcagtctgcctcccgtccattctctatcggctccattgcctgctgaccgcagaagagctgcgcgcccagacggcctcggatgccggcgtgggcgtccgtagcttgccggctgactttcggtaccccaatttggatttcggttggaaaaagtccatcgattctaaaagctttatcagcattagtaattcctccagcgccgaaaacgacaactactgcaagcatagcacgatcgttcccgaaaatgcagcccatcagggagccaaccggacttccagcttggagaaccatgaccaaatgtcggtgaactgccggaccttgttaagtgagagcccagggaagctgcacgtggaggtcagtgccgatttgacagctatcaacggcctgagttacaatcagaacctggctaacgggagttacgatctagctaatagagacttctgtcagggaaaccaactgaactactacaagcaggaaatacccgtccaacccacgacgagctactcaattcaaaatttatacagttacgagaatcagccacagccatctgatgagtgtacactgctatcgaataagtacctggacgggaacgccaacaagtcgacaagtgacggttcgcctgtgatggcggtgatgccagggactaccgatactatacaagtcttgaaagggcgcatggacagtgagcaatccccaagcattgggtacagttccagaactctgggcccaaaccccggattgatcctgcaggctctgactctgtctaacgcctccgacgggtttaatctggagaggttagagatgctcggtgattccttcctcaagcacgctattacaacctatttattctgcacctatcccgacgctcacgagggaagactgagctacatgaggtcgaagaaagtgtctaactgcaacctgtaccgtctggggaagaaaaagggactgccatctaggatggtggtgagtatcttcgatccacccgtgaactggcttccacccggctatgtggtcaaccaggacaagtccaacactgacaagtgggagaaagacgagatgactaaagattgtatgctagcaaacgggaaattagatgaggattatgaggaagaagatgaagaggaggaatccctcatgtggagagcaccaaaggaagaggctgattatgaagacgattttctggagtatgaccaggaacatatcagattcatcgataacatgctcatgggttcaggtgcctttgtgaaaaaaataagcctctctcctttctctactactgactctgcctatgagtggaagatgcccaagaaaagtagtctgggaagcatgccattctctagcgattttgaggactttgactactcttcctgggatgcgatgtgttacctggacccctctaaggctgtggaggaggacgatttcgttgttggcttctggaatcccagtgaggaaaattgtggggttgatactgggaagcagtccattagttacgatctacatacagagcagtgtatcgcagacaaaagtatagccgattgcgtggaagctctgcttgggtgctacctcactagttgcggggagagggctgctcagctgttcctatgctccctgggtctgaaagttttgccagtcatcaagcgcaccgatcgagagaaagctctttgcccaacacgagagaacttcaattcccagcagaagaacctctcggtctcatgcgccgccgcctcagtggcgagtagccggagctcagttctgaaagacagcgagtacggttgtctcaagattcccccacgctgtatgttcgaccaccccgatgccgacaaaaccctgaatcacttgatatcaggcttcgagaactttgaaaagaagattaactaccgcttcaaaaacaaggcatatctgctgcaggcctttacccacgcaagctaccactataacactattacggactgctaccagagactagagttcctcggcgatgccatccttgactatctgattaccaagcacctttacgaggacccgcgtcagcattccccaggggtcctcacggatctacggtctgcgctggtgaataacactatctttgcttcgctggcagtgaagtatgactaccataagtacttcaaggcagtctccccagagctctttcacgtcattgacgattttgtgcagtttcagcttgagaaaaatgagatgcagggcatggattctgagttgcgacggagtgaagaagacgaggaaaaggaagaagatatcgaagtgccgaaagccatgggcgacatcttcgaatctctcgccggagctatttacatggattctggcatgagcctggaaactgtgtggcaggtttactaccccatgatgagacctctaatcgagaagttttctgctaatgtcccccggtctcccgtgagggaactcttagaaatggaacccgagactgccaagttctctcccgcggaacggacttacgacgggaaggtgagggtgacagtagaagtggttggcaagggcaaattcaagggcgttggaagatcataccggattgcaaaatccgctgccgcaagacgcgccctccggagcctaaaagctaatcagccccaggtcccaaattcttag

SEQ ID NO: 109824 - DNA, 5769 bp, Artificial Sequence
  derived and/or modified sequence
atgaagagtccggcccttcagccgctgagtatggcggggctgcagttgatgaccccagccagtagtcccatgggacctttctttggccttccctggcagcaggaggctatccatgataatatctacactccacggaaataccaggtagagctcctcgaggccgccctagaccataatactattgtctgcctcaataccgggtccggaaaaacatttattgccgttctcctcactaaggaactgagctatcagattcgtggggatttttctcgtaacggtaaaaggaccgttttcctggtaaatagcgctaaccaggtggctcaacaggtttccgccgtgcgcacacacagcgacctcaaggttggagagtatagcaatttggaagtcaacgcatcttggaccaaagagcgatggaatcaagagtttaccaaacaccaggtcttaatcatgacgtgctacgtggctcttaacgtcctaaaaaacggataccttagcttgtccgatataaacctgctcgtgtttgatgagtgccatttggcaatcttggaccatccctacagagagatcatgaagctgtgtgaaaattgcccatcctgtccacggatcctgggattgacagcgtccattctcaacgggaagtgtgatccggaagagcttgaggaaaagattcagaaattagaaaagatcctcaagtccaatgcagaaaccgcaactgacctggttgttctcgatcggtataccagtcaaccttgtgaaattgtggtggactgcggccccttcactgatcgctccggcttgtacgagcgactgctgatggaactcgaagaagccctgaatttcatcaacgactgtaacatcagcgtacacagtaaagagagggatagcactttgattagcaaacagatactaagcgattgcagggcagttcttgtcgttttaggtccctggtgcgccgacaaggtggctgggatgatggtgcgggagctgcagaaatatatcaaacatgagcaagaggaactgcacagaaagttccttctgttcacagacacctttctgcgaaagattcacgcattatgcgaggaacacttcagcccagccagcctcgacctgaaattcgtcacacccaaagtgataaaactgcttgaaatactgagaaagtataaaccctatgaaaggcagcagtttgagagtgtggaatggtacaacaatcgtaaccaagacaactatgtcagttggagcgactctgaagacgacgacgaagacgaggagatcgaggagaaggagaaacccgaaacgaacttcccaagtccttttacaaacattctatgcggcatcatatttgtggaaagacggtacactgctgtggtacttaacagactaatcaaggaggccggaaagcaagacccagagctggcctacataagtagcaatttcatcactggtcatgggatcggaaaaaaccagccaaggaacaaacaaatggaggctgaattcaggaaacaggaggaggtgctcaggaagttcagagctcacgagacgaacctgctgatagccaccagcatagtggaggaaggagtcgacatccctaaatgcaatctagttgttagatttgacctaccgaccgagtaccgaagttacgtgcagtctaaggggagagcccgggctcccatttctaactacatcatgttagctgacacggataagatcaaatcatttgaagaggatctcaagacttacaaggcaattgagaagatcctgagaaacaagtgctcaaaatccgtggacactggcgagactgatattgaccctgtcatggatgacgatgacgtgttcccaccatacgtgctccgaccggatgacggcggacccagagtgacaatcaacaccgcaatcggacatattaatagatactgcgcccggctcccctccgacccctttacgcacctggcacctaaatgccgtactagggaattgccagacggcactttctattcaaccctatatctgcctattaattctccactgcgggcatcaatagtgggtcctccgatgtcctgcgtgagattggctgaacgtgtggtggcactgatctgctgtgaaaagctccacaagatcggtgaactggacgatcacctcatgcccgtaggaaaggagaccgttaaatacgaagaggagcttgatctccacgacgaggaagagaccagtgtccctggcagaccagggtcgacaaagagacgacaatgctaccccaaagctatcccagagtgcctgcgtgattcttacccaaggccggaccaaccctgttatctgtacgtgataggtatggttttgacaactccactccccgatgagctcaacttccgtagacgcaagctctatcctcctgaggatacgacccgctgctttggcatcctcacggcaaagcccattccccagatccctcactttcctgtctacactaggagcggagaagtaaccatctcaatcgagctgaagaaaagcggtttcatgctgtcactacagatgcttgaactcatcacaagactgcaccagtacatcttctcccatatactacgtcttgaaaagccagcactggagttcaaacctaccgacgcagactccgcatactgcgtgttgcccctgaatgtcgtgaatgactcaagcactcttgacattgacttcaagttcatggaagatatagaaaaatcggaagccaggattggcattccgagcacaaaatatacaaaagaaacaccctttgtctttaagttggaagactaccaggacgccgtgatcattcccagataccgcaactttgaccagccccatcggttttacgtcgctgacgtgtatacggatttaacacctctaagtaaattcccatcccctgagtatgagacgttcgcagaatactataagaccaagtacaatctggatctcactaatttgaatcagcctctgctcgacgtggatcatacttcgtcaagactcaacctgctcacacccaggcacctcaaccagaagggcaaagcattgccactgtccagtgctgaaaagagaaaggccaaatgggagtcactgcaaaacaaacaaatcctagtgcccgagctttgtgctatccaccctattccagcctctctgtggagaaaggcagtatgcctgccatcaatcttgtatcgattgcattgcttgctcacagcagaggagctgcgagcccaaaccgcatctgacgctggcgtgggcgtacggtccctgcctgccgactttagataccccaacctggatttcggttggaagaaatccatagactctaagtcctttatctctatctcgaattcctcctctgctgaaaacgacaattactgcaaacactccacgattgttcctgagaatgcagctcatcagggagctaatcgaacttcatccctggagaaccacgatcagatgagtgttaactgtagaacacttctctcggagtctcctggcaaacttcatgtggaagtgtcagcggatctgactgctattaacggcctctcatataaccagaatctagcgaacgggagctatgatctcgcgaatagagacttctgccagggtaatcaactgaattactacaaacaagaaatccccgttcagccaaccacatcctactctatccagaacctttattcctacgagaatcaaccacagccttcagatgagtgcacactcctatctaacaaatatctcgacggaaacgcaaataagagcacctccgatggctctccagtcatggcagtgatgcccggtaccaccgacaccattcaggtgcttaaaggaaggatggattccgagcagagccctagtataggatattctagccgcacccttggccccaacccggggttaattttgcaggcactcactctttccaatgccagcgacggattcaacctcgagcgactggagatgctgggcgattcgttcttaaaacacgctatcacgacgtacctattttgtacttacccagatgctcatgaaggccggctgagctatatgagaagcaagaaagttagcaactgcaacctgtaccgactgggaaagaagaagggcttaccgtcccgaatggttgtgtctatctttgatccacctgtaaattggttgccacctggatacgtcgtcaaccaggataaatccaatacggataagtgggagaaggacgaaatgactaaggactgcatgctcgctaacgggaaattggacgaggactatgaagaagaggatgaggaagaggaatctctgatgtggagggcccccaaagaagaagccgactacgaagatgatttcctggagtacgatcaggaacacattcgtttcatcgacaatatgctgatgggctccggagcattcgtcaagaagatcagtttgtcacccttcagtactacagattccgcatacgagtggaagatgcctaagaaatcttccctcggtagtatgccattctctagtgatttcgaagacttcgattacagcagttgggatgctatgtgttacttggaccccagcaaagccgtggaagaggatgattttgtcgtaggattctggaatccttccgaagagaactgcggcgtggacaccggaaagcagtccatcagctatgacctgcacactgaacagtgcattgctgataagtctatagcggactgcgtggaggctctgctgggctgttacctcacatcttgtggcgagcgggctgctcagttgtttctctgttcactgggacttaaagtgcttcctgttatcaaacgcacggacagggagaaggccttgtgccctacgcgcgagaactttaattcacaacagaagaatctgtctgttagttgtgccgcagcatcagtggcgagtagccgtagctctgtgctgaaggattccgagtacgggtgtctcaagataccaccacgctgtatgttcgatcatcccgatgctgacaagacactcaaccacctgataagcggcttcgaaaatttcgagaagaagattaattatagattcaagaataaggcttatctgctgcaggcttttactcacgctagctaccactacaatactatcaccgactgttatcagagactggaattcctgggcgatgcaatcctggactatctgatcacaaaacacctgtatgaggatcccagacagcacagccccggtgtgcttaccgatctgagaagtgcactcgttaacaacactatcttcgccagcctggcagtaaaatacgactatcataagtatttcaaagccgtgtcaccagagctgttccatgttatcgacgacttcgtgcagtttcagctggagaagaacgaaatgcaaggaatggattccgagttacggcggagtgaggaagatgaggaaaaggaagaagacatagaggtccccaaggcgatgggggacatctttgagtcattggccggagccatatacatggattcgggcatgagccttgagaccgtttggcaagtctactacccgatgatgcggccgctgatagaaaagttttccgcaaatgtgccgcggagtcccgtccgtgaattgctggagatggaacccgagaccgccaagttcagtccagccgagaggacctacgacggcaaggtccgggtgacggtcgaggttgttggaaagggaaaattcaagggcgtcggccggagctataggattgccaagtcggcggcagcgcggagggccctccgaagtctgaaagccaatcagccacaggtgcccaattcttag

SEQ ID NO: 109825 - DNA, 5769 bp, Artificial Sequence
  derived and/or modified sequence
atgaagtctcctgccttgcagcctctgtccatggccggtttacagctaatgactcccgccagttcgccaatgggaccttttttcggcctaccatggcagcaagaggctatacacgacaacatctacacccctcggaaataccaggtcgaactgttggaggctgccctcgaccataacaccattgtgtgtttgaatacaggctccggaaagacattcatagctgtgctgctcaccaaggagctgagttatcagataagaggagacttctccaggaacgggaagaggaccgtgtttctggtgaactccgcaaatcaggttgcccagcaagtaagcgccgtacgaacgcacagcgacctgaaggtgggcgagtattcgaacctagaagtgaacgcctcctggacgaaagaacggtggaatcaggaatttaccaaacatcaagtcctgatcatgacatgctacgtggctctgaatgtactcaagaatgggtacctgtctttatccgacatcaaccttctggtcttcgatgagtgtcacttagcaatcttggaccatccttaccgcgagatcatgaaattgtgtgagaattgcccttcctgccccaggatcctgggcctcaccgcgtctattctgaatggcaagtgcgaccctgaagagctcgaagagaagatccagaagcttgagaagatcctcaaatccaatgctgagactgccactgacttggtggtactggataggtacacctcccagccctgtgagatcgtcgtcgactgcggcccattcactgaccgcagcggcctgtatgagagactgcttatggagcttgaggaggcactgaattttatcaacgattgtaacatttcagtgcacagcaaggaaagggactctaccctgattagtaaacagatcctcagtgactgcagagccgtcttggtggtcctaggaccctggtgcgccgacaaagtggccgggatgatggtgcgtgagctgcaaaagtatattaagcatgagcaggaagaactccaccggaagttcctgctgttcaccgacacatttctgagaaagattcacgccctgtgtgaagagcacttctcacctgcctcacttgacctcaagtttgtgacacctaaggtaattaaactcttggaaatattgagaaaatacaagccctacgaacggcagcagtttgaaagcgtggaatggtacaataaccgcaatcaagataactatgtctcttggtccgacagcgaagacgatgacgaggacgaggagattgaggaaaaagagaaaccagagactaattttccaagcccattcactaatatcctgtgcggcataattttcgtggagaggcgatataccgcagtggtcttgaaccgacttatcaaagaagctggcaaacaagaccctgagctggcatacatttcatcaaattttattactggccatgggatcggaaagaaccagccaagaaataagcagatggaagcagaatttagaaagcaggaagaggtattgagaaaattccgggcacacgaaaccaacttactgattgcaacaagcatagtcgaagaaggagtggatatccctaaatgcaaccttgtggttcggtttgatctgcccacagaatacaggtcctatgtgcaaagcaaaggccgtgctcgtgctcccatctctaactacattatgctagccgacaccgacaaaataaagtcttttgaagaagatttgaaaacttataaggccatcgagaagattcttcggaacaaatgctctaagtctgtggacacaggagagacggatatagacccagttatggatgacgatgacgtctttcccccttacgttctcaggccagatgacgggggcccacgcgtaaccattaacaccgcaataggccacatcaatcgatactgcgctaggttacccagtgacccatttacgcacttagccccaaagtgccgtacccgtgaactgcctgacggtacattctacagtactctgtacctgcctataaacagtccactccgtgcaagtatcgttggcccccctatgagctgcgtccggcttgccgaacgcgttgtggccctcatttgctgtgagaaacttcacaaaatcggagagttggatgatcacttgatgcccgttggcaaggaaacagttaagtacgaagaggagttagatctccacgatgaagaagagactagcgtaccgggacggcctggttccacaaaaaggcggcaatgctaccctaaggcaatccccgagtgtctgagggactcctacccacgacctgatcagccctgctacctctacgtcattggtatggttttaacaaccccgttgcccgacgagctcaattttagaaggcggaagctatatcccccagaagatacaacgaggtgctttgggatcctgaccgccaaaccaatccctcaaatcccacacttccccgtgtatactcggtccggagaagtgacaattagcatcgagctcaagaagagtgggtttatgctgtccttgcagatgttggagctcatcacgaggctgcaccagtacatcttttctcatatacttcgcctcgagaagccggcactggagtttaagcctactgacgccgactctgcgtactgcgtgctcccactgaacgttgtcaacgattccagcaccctagacattgacttcaagttcatggaggatattgagaagagcgaagcgcgcatagggataccttccactaagtatacaaaggagactcctttcgtattcaagctggaggattatcaggatgctgtgattatcccccggtaccggaacttcgatcagcctcaccgcttttacgttgcggatgtctatacagatttaacaccactttccaaattcccatcgccggaatatgagaccttcgcggaatattacaagaccaaatacaatctcgatcttaccaatttaaaccaacccctcctggacgtggatcacactagttcaaggctgaacttattgaccccaagacatctcaaccagaaggggaaagcacttcctctaagttccgccgaaaagagaaaagcaaaatgggagtcactacaaaacaagcagatcctagtgccagaattgtgcgcgatccaccctattccagccagcttatggagaaaggccgtctgcttaccttcaatcctgtaccggctccattgcttattgacggccgaggagctcagagcccagacggctagcgatgcgggagtgggggtgagaagccttcccgcagattttagataccccaatctagactttgggtggaaaaaaagcattgattccaagagcttcatcagcatctccaatagcagctctgccgaaaatgacaactactgcaaacactcaacaattgtgcctgagaacgcagcccaccagggcgctaaccgcacatcatccttggagaatcacgatcagatgtctgtaaattgcaggactcttctgagcgagtctccaggcaagttgcacgtggaggtctccgctgatctgaccgcaattaatggactatcatataatcagaatcttgcaaatggcagctacgaccttgccaatcgcgacttctgccaagggaaccaactcaactactacaaacaggaaatcccggtgcagccgaccaccagttactcgattcaaaatctttactcttacgagaaccaacctcaacccagcgacgagtgtaccctgctctccaataagtacctggatgggaacgcgaacaagagcacttcagacggtagcccagtgatggctgtgatgcctggtaccacagacacaattcaggtgctaaaaggccggatggattctgagcagagtccttccataggttatagtagcagaactctgggcccgaatcccggcctgattcttcaggcactgacgctgtccaacgcctccgacggatttaatcttgagcgtctggaaatgctgggagatagcttcctgaagcatgcaatcaccacatacctcttctgtacataccccgacgcccatgaggggcggctgtcatacatgaggagcaaaaaggtctctaattgcaatctgtatagactagggaagaagaaggggttgcccagccgaatggtggtctcaatcttcgaccctccagtgaattggctgccccctggctacgtcgtgaaccaggacaaatccaacaccgataaatgggagaaggacgagatgaccaaggattgcatgctggccaatggcaagcttgacgaggactatgaagaggaagacgaagaagaagaatcattgatgtggcgcgcaccaaaagaggaagcagattacgaggatgatttcttggagtatgaccaggagcacattcgctttattgataatatgctgatgggctctggcgcattcgtgaagaaaatctctttgagcccgttttcgaccacagactcggcctacgaatggaaaatgcctaagaagtcaagtctggggagtatgccattttcctcagattttgaagatttcgattactctagttgggatgctatgtgttatctggatcccagtaaagcagtagaagaggatgactttgtggtgggcttctggaatccaagcgaagagaactgcggagtcgacactggcaagcaatcaatttcctacgatctgcacaccgaacagtgtatcgcggataagagcattgcggattgcgtcgaggccctcctgggatgctatctgactagttgcggggaacgggcggcccagctgtttctatgcagcttaggtttaaaagtgcttcccgttatcaagcggactgacagggaaaaagctctgtgccctacccgagaaaattttaacagccaacaaaagaacctctccgtaagttgtgccgcggcaagcgttgcaagttcgcggtccagcgttctgaaggacagtgagtacggttgcctgaagatcccaccacgatgtatgttcgatcatccggatgctgataaaacacttaatcacctcattagcggtttcgaaaatttcgaaaagaagatcaactatcgcttcaagaataaggcttacctgctgcaggcattcactcacgcatcttatcattataacaccattactgattgttaccaacgcctggaatttctgggtgacgccatactggattacctgattacaaaacacctgtacgaggatccccgtcagcacagccctggggtgctcaccgatttgagatctgcacttgttaacaacacaatcttcgctagcctggcagtcaagtatgactatcacaaatactttaaagccgtttccccggaactattccatgtcattgacgatttcgtgcaattccagctcgaaaaaaacgagatgcaggggatggacagcgaactcaggaggtcagaagaagatgaagagaaggaagaggacatcgaagtgcctaaggcgatgggggacatcttcgagtccctagccggcgctatttacatggattctggaatgtctttggagacagtgtggcaggtctattatccaatgatgagaccactgatcgaaaaattcagtgccaacgttccccgcagtcctgtcagagagcttcttgaaatggagcccgagactgccaagttttcccctgctgagcgcacatacgatgggaaggtcagggtgactgtggaagtggtgggaaaagggaagtttaagggtgtcggtcgctcctaccggatcgctaaatctgccgcggcacgaagagcactgcggagcctgaaggccaaccaaccacaggtgccaaattcctag

SEQ ID NO: 109826 - DNA, 5769 bp, Artificial Sequence
  derived and/or modified sequence
atgaagtctcccgctctgcagcctctttccatggccgggctacagctcatgactcccgccagtagcccaatgggccctttctttggcctgccatggcaacaggaagctatacatgataacatatacacgccccgtaaataccaagtcgagttactggaagccgctctcgaccataacactatcgtgtgtctaaatactggaagcggaaagacattcatagccgtgctgttaactaaggagctgtcctaccagatccgaggggacttttcccgaaacggcaagaggactgtgtttctggtgaacagtgctaaccaagttgctcagcaagtgtccgcagtccggacgcattctgatttgaaggtgggagagtacagcaatctcgaagttaatgccagctggaccaaagagcggtggaaccaggaattcacgaagcaccaagttctaattatgacctgctacgtcgccctcaatgtgctcaagaacggatatctgtccttgtcagacatcaacctgcttgtattcgacgagtgccacttggcaattctcgaccacccgtatagggagatcatgaaactctgcgagaattgtccgagctgccctcgtattctgggactcacagccagtattctcaacgggaagtgtgatccggaggagctcgaagaaaaaatccagaagttggaaaaaatcctcaaaagtaatgctgagacggccactgacttggtggtgctggacaggtacacctctcagccttgtgaaatcgtcgttgattgtgggccatttactgatcgctccggcttgtacgagaggctcttgatggagttagaagaagcacttaatttcattaacgactgtaacattagcgtgcacagcaaagaaagggattctaccctgatttctaagcaaatactatccgattgccgggcagtgctggtagtcctgggcccatggtgcgccgataaggtggccggtatgatggtccgcgagttgcagaaatatatcaaacatgaacaggaggaacttcatagaaaattccttctgtttaccgacacatttttgaggaagatccacgccctgtgtgaagaacacttctcccctgcatctcttgatttgaagtttgttacccctaaagtgattaagttactggagatcctcagaaagtataagccttacgaaaggcaacaattcgagagcgttgagtggtacaataatcggaaccaagacaactacgtgtcatggagcgattctgaggatgatgatgaggacgaagagattgaggagaaagaaaaacctgagaccaatttcccctctccattcacaaacatcttgtgcggcatcattttcgtggaacggcgatataccgcagtggttcttaatcggctgatcaaggaggcggggaagcaggaccccgagttagcctacattagcagtaatttcattaccggacatggcattggcaaaaaccaacctcgcaataagcagatggaggccgagttcagaaagcaagaggaggtgctgaggaaattcagagcgcacgaaacaaacctgttaatcgccacatcaattgtggaagaaggggttgatataccgaagtgcaatctggtagtccgcttcgatctacccacagagtatcggtcatatgtccaatctaagggccgggctcgggcacctatctctaactatatcatgctagccgatacagataagatcaagtcctttgaagaggacctgaaaacatataaggccatcgaaaagattctgagaaacaaatgcagcaagtctgtagacaccggtgaaactgacattgacccagttatggatgacgacgatgtttttcctccatacgtcctcaggccagatgacggaggccctcgggtcaccatcaacactgccattggccacataaaccggtactgcgcccgcttgccttccgatccctttacacatctggccccgaagtgtcggactcgggagttgccagacgggaccttttatagcactttgtacctcccaatcaattccccactgagggcctccattgttggccctcctatgtcttgcgttcgattggccgaacgggttgtggcactgatttgctgcgaaaagctccacaaaattggagagcttgacgatcatctgatgcctgtcggcaaagagactgtaaagtatgaggaagagctcgacctacacgatgaggaagaaactagcgtgcccggtaggccaggatctacaaagcggaggcagtgctaccccaaagctatccccgaatgtctgcgagattcctacccgcgacctgaccaaccttgctatctttatgttataggcatggtgctgacaacccctctgccagacgaactcaacttcagaagacgtaagctgtaccccccagaagacacaaccagatgtttcgggattttgacggctaagcccatcccacagattccgcacttcccagtttacacgcggagcggagaggtgacaatctccatagaactaaaaaagagcggctttatgctatctctacagatgctggagctgatcactcgcttacaccaatacattttttcccatattctccgcctagaaaaacccgccctggagtttaagccaacggacgccgactccgcatattgtgtgctcccgttaaacgttgtgaatgatagcagcacactcgatatcgactttaaattcatggaggatattgaaaaaagcgaagctagaattgggatccccagcaccaagtatacaaaagagacacccttcgtatttaagctggaagattatcaggatgccgtgatcatcccccgttatcgaaactttgatcagccacaccggttctacgttgccgatgtttacactgatcttacgcctctgtcgaaatttccgagtcccgaatatgaaaccttcgccgaatactacaagaccaaatacaatttggatctgaccaaccttaaccagcccctgctcgatgtcgatcacacctcttcccggctcaatctcctgactcccagacatctgaaccagaagggcaaggcactccctctgagctccgcagaaaagcgtaaggccaaatgggagtctctgcagaacaagcaaattttagtaccagagctgtgtgcaattcaccccattcctgcatcactctggagaaaagctgtctgtctgccatctatcctctacaggttacattgtctgttgactgccgaggagctgagagcacagactgcttctgatgccggcgtgggtgtccggtctctacccgccgacttcaggtatcccaacctagatttcggctggaagaaatccattgatagcaaaagtttcataagcataagcaacagttcgtccgcagaaaacgataactattgtaaacacagtaccatcgtccccgagaatgctgcacaccagggggccaatcgcacatcttcacttgaaaaccacgaccagatgagtgttaattgccgcactctgctatccgaaagccccgggaaacttcacgttgaagtatccgctgatttgaccgccattaatggcctgtcttacaaccagaacctggccaatggcagctacgatctagccaaccgcgatttttgccaggggaaccagttaaattattacaaacaagaaatccccgttcagccgactacttcctattctatccagaacctgtactcctacgagaatcagccccagccctccgacgagtgtaccctgcttagtaacaagtacctcgacggtaacgccaataagtcaacatccgacggctcacctgtgatggccgtgatgccagggacaactgatacaatccaggtcttaaagggaagaatggactccgaacagagtccaagcataggctatagctcacggacgctgggaccgaatccaggactgattctccaggccctgacactgtcaaatgcatccgacggcttcaacctcgagcggctggagatgcttggggactccttccttaaacacgccatcaccacttatctcttttgtacctaccctgatgcacacgagggccggttaagctatatgcgttcgaagaaggttagcaactgcaacctttatagattgggaaagaaaaaaggactcccatcacggatggtcgtcagcatttttgaccctcctgtgaattggctgcctcccggctacgttgtgaatcaggataagtccaacactgacaagtgggaaaaagatgagatgacgaaggactgcatgctcgccaatgggaagctcgatgaagactacgaagaagaggatgaggaggaggaaagtttaatgtggcgagcgcctaaggaggaggctgattatgaggacgacttccttgagtacgaccaggaacatatccgattcattgataacatgcttatgggatctggggcttttgtgaagaagatctcactcagcccattctcaactaccgactccgcctacgagtggaaaatgcccaaaaagtcatctctggggtctatgccctttagttccgacttcgaggacttcgattatagcagctgggatgccatgtgctaccttgacccatcgaaggcagtggaggaagacgatttcgtggtcgggttttggaatccgagtgaggagaactgtggggtggatacagggaaacagtcgatcagctacgaccttcacactgaacagtgcatcgctgataaatctattgctgattgcgtcgaagcacttctaggctgttacctcacttcctgcggagagcgtgctgcgcaactgttcctgtgttccttaggattgaaggtcctgcctgtgattaaacgcaccgaccgggaaaaggcattatgccctacgcgtgagaattttaattcacagcagaaaaatctgagcgtctcttgtgccgcagcaagcgtcgcatcgtcccgtagtagcgtgttaaaagactcagaatatggatgcctcaagatcccccctcggtgtatgtttgatcatccagacgcagacaagactctgaatcacctcatatcggggttcgagaacttcgaaaagaagataaactacagatttaagaacaaggcgtacctgctacaggccttcacccatgcgtcctatcattataacaccattacagattgttaccagcggctggagttcttaggagacgctatcctggattatttgataacgaagcatctctatgaagatccgcggcaacatagccctggtgtgctgacggatttacgatccgctctggttaataacacaatattcgctagccttgcggtcaagtacgactaccacaaatatttcaaagctgtgtcccccgaattgtttcatgtcatagacgacttcgttcagtttcagcttgagaaaaatgagatgcagggcatggacagcgagctaaggcgatccgaagaagacgaagaaaaagaagaggatatagaagtcccaaaagccatgggcgatattttcgaatctctggccggggctatctacatggacagtggtatgagcctagaaaccgtatggcaagtctattaccccatgatgagacccctaatcgagaagttctctgctaatgtgcctaggagtcccgtcagagaactgctggagatggagccagagacggccaaattttctcccgcagaaagaacttacgacggaaaggtacgcgtcacggttgaggtggtcggcaaagggaagttcaagggtgtgggaagatcttaccgcattgctaaatctgcagctgcacggcgggcactgcggtcactgaaggccaatcagcctcaggttcccaactcctag

SEQ ID NO: 109827 - DNA, 213 bp, Artificial Sequence
  derived and/or modified sequence
atgaaatcaccagcactgcaaccgctttcaatggctggtctgcagctcatgacacccgcaagtagtccaatgggtccgttcttcggactcccttggcagcaagaagccatccatgataacatctacacccctagaaaataccaagtcgaactgctcgaagcggcactcgaccacaatacaatagtttgtctgaacaccggcagcggaaagtag

SEQ ID NO: 109828 - DNA, 213 bp, Artificial Sequence
  derived and/or modified sequence
atgaaaagccctgcattgcagccattatccatggctggactgcagttaatgacgcccgcgagctctcctatgggtccattcttcggactgccttggcagcaggaggccatacacgataacatatatactccacgaaaatatcaggtggaactcttagaagctgctctggaccataacactatcgtgtgcctcaacactggctctggtaagtag

SEQ ID NO: 109829 - DNA, 2463 bp, Artificial Sequence
  derived and/or modified sequence
atgctcgcttgggaatctgatcacttcctgcggatcctagctgagaacgataactattgtaaacattccaccatagtccccgaaaacgccgcgcatcagggggcgaatcgtacaagcagtctggaaaatcacgatcaaatgtccgtgaactgccggaccctactctcagagtccccaggcaagctgcatgtcgaagttagtgcagacttgactgcgattaacgggctgagctataatcagaacctggccaacgggagttatgatcttgccaatcgtgacttctgtcaaggaaatcagcttaattactacaaacaggaaatcccagttcagcctacaacgtcctattcaatccagaatctgtacagctatgagaaccagccccagccttccgatgagtgtaccttgctgtctaataagtatctggacggtaacgccaataaatctacaagcgacgggtctcccgtgatggccgtcatgcctgggaccacggacaccatccaggtgctgaaagggagaatggattctgaacagagtccatctattggatactcctcacggaccctggggcccaaccccggcctgatactgcaagccctcaccctctccaatgcctcggacggcttcaatttggaaagactcgaaatgcttggcgattccttcctcaagcatgcaatcacgacatacctgttctgtacctacccggacgcccacgaagggcggctgagttatatgcgctctaaaaaggtaagtaactgtaacttatatcgcttgggaaagaagaaaggacttccttctagaatggtagtctccatttttgatcctcccgtgaactggctgcccccgggatacgttgtgaatcaagacaaatctaacacggacaaatgggagaaagatgagatgaccaaagactgtatgctcgccaacggcaagctggacgaggactatgaggaagaagatgaggaagaggagagtctgatgtggcgggcccccaaagaggaagcagattacgaagacgacttcctggagtatgatcaagagcatatcaggtttattgataatatgcttatgggatctggcgcctttgtaaagaagatatccctgtcacctttctcaaccaccgacagtgcatatgagtggaagatgcccaagaagagttcattggggtccatgcccttttctagcgatttcgaagacttcgactattcctcgtgggacgccatgtgctacctggaccccagcaaagctgtcgaagaggacgacttcgtagtaggcttttggaatcccagtgaagaaaactgtggggtggataccggcaaacagagcatcagctatgatctacataccgagcaatgcatagccgataagagcattgcagattgtgtggaggccctcctgggatgttatctgacaagttgcggtgagagggcagcacagctgttcctgtgcagcctggggctcaaagtgcttccagtcatcaaaaggactgacagggagaaggctctgtgccccaccagggagaatttcaattcgcagcaaaaaaacctatcggttagctgtgctgccgcaagtgtggcttcaagcagaagctctgtgctgaaagattccgaatatggttgtctgaagattccccctcgctgcatgtttgatcacccagatgccgataaaaccctgaatcatctgatttctggcttcgaaaatttcgagaagaaaatcaattacaggtttaagaataaggcgtatctgctccaggctttcacccacgcctcttaccattacaacacaatcacagattgctatcagaggcttgaatttctgggagatgcgatattagactacttgataactaaacatttatacgaagaccctcggcaacactccccaggcgtgttgaccgacctgagatctgccctggtcaacaatacaatcttcgcctcccttgcagttaaatatgattatcacaagtatttcaaggccgtgagtccagagctattccacgtcatagatgactttgtgcagttccaattagagaagaacgaaatgcaggggatggactcggagctacggaggagcgaggaggatgaggagaaggaagaggacattgaggtccctaaagccatgggtgatattttcgaatcactggccggagccatttacatggacagcggcatgtccctggaaacagtttggcaggtttactaccctatgatgcgcccactaatcgagaagttctctgccaatgtgcccagatccccggtacgagagctcctcgaaatggagcccgagaccgctaagttctcccctgccgaaaggacttacgatggcaaagttcgcgtgactgtggaagttgtgggcaaagggaagttcaaaggcgtaggacgctcgtatcggatagccaaatctgctgcagctaggcgtgccctgcgctctcttaaggccaatcaaccacaagtgcccaattcgtag

SEQ ID NO: 109830 - DNA, 5769 bp, Artificial Sequence
  derived and/or modified sequence
atgaagagccctgccctgcagcccctgtccatggccggcctgcagctgatgaccccagccagcagccccatgggccccttcttcggcctgccctggcagcaggaggccatccatgacaacatctacacccccaggaagtaccaggtggagctgctggaggccgccctggaccacaacaccatcgtgtgcctgaacacaggcagcggcaagaccttcatcgctgtgctgctgaccaaggagctgagctaccagatccggggggacttcagcagaaatggcaagaggacagtgttcctggtgaacagcgccaaccaggtggcccagcaggtgtctgctgtgaggacccacagcgacctgaaggtgggggagtacagcaacctggaggtgaatgcctcctggaccaaggagcgctggaaccaggagttcaccaagcaccaggtgctgatcatgacctgctacgtggccctgaatgtgctgaagaatggctacctgagcctgagtgacatcaacctgctggtgtttgatgagtgccacctggccatcctggaccacccctaccgggagatcatgaagctgtgtgagaactgccccagctgcccccgcatcctgggcctgacagccagcatcctgaatggaaaatgtgaccctgaggagctggaggagaagatccagaagctggagaagatcctgaagagcaatgctgagacagccacagacctggtggtgctggaccgctacaccagccagccctgtgaaattgtggtggactgtggccccttcacagacaggagcggcctgtatgagcggctgctgatggagctggaggaggccctgaacttcatcaatgactgcaacatctctgtgcacagcaaggagcgggacagcaccctcatcagcaagcagatcctgagtgactgcagagctgtgctggtggtgctgggcccctggtgtgccgacaaggtggccggcatgatggtgcgggagctgcagaagtacatcaagcatgagcaggaggagctgcacaggaagttcctgctcttcacagacaccttcctgaggaagatccacgccctgtgtgaggagcacttctccccagccagcctggacctgaagtttgtgacccccaaggtgatcaagctgctggagatcctgaggaagtacaagccctatgaaaggcagcagtttgaatctgtggagtggtacaacaacagaaaccaggacaactacgtgtcctggagcgacagtgaagatgatgatgaagatgaggagattgaggagaaggagaagccagagaccaacttccccagccccttcaccaacatcctgtgtggcatcatctttgtggagcggcgctacacagctgtggtgctgaacagactcatcaaggaggccggcaagcaggaccctgagctggcctacatcagcagcaacttcatcaccggccacggcatcggcaagaaccagcccaggaacaagcagatggaggccgagttcaggaagcaggaggaggtgctgaggaagttccgggcccacgagaccaacctgctgattgccaccagcatcgtggaggagggcgtggacatccccaagtgcaacctggtggtgcgctttgacctgcccacagagtaccgctcctatgtgcagagcaagggccgggcccgggcccccatcagcaactacatcatgctggccgacacagacaagatcaagagctttgaggaggacctgaagacctacaaggccatcgagaagatcctgaggaacaagtgcagcaagtctgtggacaccggggagacagacattgatcctgtgatggatgatgatgatgtgttccccccctacgtgctgcggccagatgatggcggcccccgggtgaccatcaacacagccatcggccacatcaaccgctactgtgcccggctgcccagcgaccccttcacccacctggcccccaagtgcaggacccgggagctgcctgatggcaccttctacagcaccctgtacctgcccatcaacagccccctgcgggccagcatcgtgggcccccccatgagctgtgtgcggctggccgagcgggtggtggccctgatctgctgtgagaagctgcacaagattggagagctggatgaccacctgatgcctgtgggcaaggagaccgtgaagtatgaggaggagctggacctgcatgatgaggaggagacctctgtgcccggccggcccggcagcaccaagaggcggcagtgctaccccaaggccatcccagaatgtctgcgggacagctaccccaggccagaccagccctgctacctgtatgtgattggcatggtgctgaccacccccctgcctgatgagctgaacttcagaagaaggaagctgtacccacctgaggacaccacccgctgcttcggcatcctgacagccaagcccatcccccagatcccccacttccctgtgtacaccaggtctggagaggtgaccatcagcattgagctgaagaagagcggcttcatgctgagcctgcagatgctggagctgatcacccggctgcaccagtacatcttcagccacatcctgcggctggagaagccagccctggagttcaagcccacagatgctgacagcgcctactgtgtgctgcccctgaatgtggtgaatgacagcagcaccctggacatcgacttcaagttcatggaggacatcgagaagtctgaggccagaattggcatccccagcaccaagtacaccaaggagaccccatttgtgttcaagctggaggactaccaggatgctgtgatcatcccccgctacagaaactttgaccagccccaccgcttctacgtggctgatgtgtacacagacctgacccccctgagcaagttccccagcccagaatatgagacctttgctgagtactacaagaccaagtacaacctggacctgaccaacctgaaccagcccctgctggatgtggaccacaccagcagccggctgaacctgctgacccccaggcacctgaaccagaagggcaaggccctgcccctgagcagcgctgagaagaggaaggccaagtgggagagcctgcagaacaagcagatcctggtgcctgagctgtgtgccatccaccccatcccagccagcctgtggaggaaggctgtgtgcctgcccagcatcctgtaccgcctgcactgcctgctgacagctgaggagctgcgggcccagacagccagtgatgctggggtgggcgtgcgcagcctgcctgctgacttccgctaccccaacctggactttggctggaagaagagcattgacagcaagagcttcatcagcatcagcaacagcagcagcgcagaaaatgacaactactgcaagcacagcaccatcgtgcctgaaaatgctgcccaccagggcgccaacagaaccagcagcctggagaaccacgaccagatgtctgtgaactgcaggaccctgctgtctgagagccctgggaagctgcacgtggaggtgtctgctgacctgacagccatcaatggcctgagctacaaccagaacctggccaacggcagctatgacctggccaacagagacttctgccagggcaaccagctgaactactacaagcaggagatccctgtgcagcccaccaccagctacagcatccagaacctgtacagctatgagaaccagccccagcccagtgatgagtgcaccctgctgagcaacaagtacctggatggaaatgccaacaagagcaccagtgatggcagccctgtgatggctgtgatgcctggcaccacagacaccatccaggtgctgaagggccgcatggattctgagcagagccccagcatcggctacagcagcaggaccctgggccccaaccctggcctcatcctgcaggccctgaccctgagcaatgccagtgatggcttcaacctggagcggctggagatgctgggggacagcttcctgaagcacgccatcaccacctacctgttctgcacctacccagatgcccacgagggccgcctgagctacatgaggagcaagaaggtgagcaactgcaacctgtaccgcctgggcaagaagaagggcctgcccagcaggatggtggtgtccatctttgacccccctgtgaactggctgcccccaggctacgtggtgaaccaggacaagagcaacacagacaagtgggagaaggatgagatgaccaaggactgcatgctggccaacgggaagctggatgaagattatgaggaggaggatgaggaggaggagagcctgatgtggagggcccccaaggaggaggccgactatgaagatgacttcctggagtatgaccaggagcacatccgcttcatcgacaacatgctgatgggcagcggggcctttgtgaagaagatcagcctgagccccttcagcaccacagattctgcctatgagtggaagatgcccaagaagagcagcctgggctccatgcccttcagcagtgactttgaagattttgactacagctcctgggatgccatgtgctacctggaccccagcaaggctgtggaggaggatgactttgtggtgggcttctggaaccccagcgaggagaactgtggggtggacaccgggaagcagagcatctcctatgacctgcacacagagcagtgcatcgctgacaagagcattgctgactgtgtggaggccctgctgggctgctacctgaccagctgtggggagcgggccgcccagctgttcctgtgcagcctgggcctgaaggtgctgcccgtcatcaagaggacagaccgggagaaggccctgtgccccacccgggagaacttcaacagccagcagaagaacctgtctgtgtcctgtgccgccgcctctgtggccagcagccgcagctctgtgctgaaggacagtgaatatggctgcctgaagatccccccacgctgcatgtttgaccacccagatgctgacaagaccctgaaccacctgatcagcggctttgaaaattttgagaagaagatcaactaccgcttcaagaacaaggcctacctgctgcaggccttcacccacgccagctaccactacaacaccatcacagactgctaccagaggctggagttcctgggagatgccatcctggactacctgatcaccaagcacctgtatgaggacccccggcagcacagccctggggtgctgacagacctgcggagcgccctggtgaacaacaccatctttgccagcctggccgtgaagtatgactaccacaagtacttcaaggctgtgtccccagagctgttccacgtgattgatgactttgtgcagttccagctggagaagaatgagatgcagggcatggattctgagctgcggcgctctgaggaggatgaggagaaggaggaggacatcgaggtgcccaaggccatgggagacatctttgagagcctggccggggccatctacatggattctggcatgagcctggagaccgtgtggcaggtgtactaccccatgatgaggcccctcatcgagaagttcagcgccaacgtgcccaggagccctgtgcgggagctgctggagatggagcctgagacagccaagttctccccagctgagaggacctatgatggcaaggtgcgggtgacagtggaggtggtgggcaagggcaagttcaagggcgtgggccgcagctacagaattgccaagtctgctgctgcccggcgggccctgcggagcctgaaggccaaccagccccaggtgcccaacagctag

SEQ ID NO: 109831 - DNA, 213 bp, Artificial Sequence
  derived and/or modified sequence
atgaagagccctgccctgcagcccctgtccatggccggcctgcagctgatgaccccagccagcagccccatgggccccttcttcggcctgccctggcagcaggaggccatccatgacaacatctacacccccaggaagtaccaggtggagctgctggaggccgccctggaccacaacaccatcgtgtgcctgaacacaggcagcggcaagtag

SEQ ID NO: 109832 - DNA, 2463 bp, Artificial Sequence
  derived and/or modified sequence
atgctggcctgggagagtgaccacttcctgcgcatcctggctgaaaatgacaactactgcaagcacagcaccatcgtgcctgaaaatgctgcccaccagggcgccaacagaaccagcagcctggagaaccacgaccagatgtctgtgaactgcaggaccctgctgtctgagagccctgggaagctgcacgtggaggtgtctgctgacctgacagccatcaatggcctgagctacaaccagaacctggccaacggcagctatgacctggccaacagagacttctgccagggcaaccagctgaactactacaagcaggagatccctgtgcagcccaccaccagctacagcatccagaacctgtacagctatgagaaccagccccagcccagtgatgagtgcaccctgctgagcaacaagtacctggatggaaatgccaacaagagcaccagtgatggcagccctgtgatggctgtgatgcctggcaccacagacaccatccaggtgctgaagggccgcatggattctgagcagagccccagcatcggctacagcagcaggaccctgggccccaaccctggcctcatcctgcaggccctgaccctgagcaatgccagtgatggcttcaacctggagcggctggagatgctgggggacagcttcctgaagcacgccatcaccacctacctgttctgcacctacccagatgcccacgagggccgcctgagctacatgaggagcaagaaggtgagcaactgcaacctgtaccgcctgggcaagaagaagggcctgcccagcaggatggtggtgtccatctttgacccccctgtgaactggctgcccccaggctacgtggtgaaccaggacaagagcaacacagacaagtgggagaaggatgagatgaccaaggactgcatgctggccaacgggaagctggatgaagattatgaggaggaggatgaggaggaggagagcctgatgtggagggcccccaaggaggaggccgactatgaagatgacttcctggagtatgaccaggagcacatccgcttcatcgacaacatgctgatgggcagcggggcctttgtgaagaagatcagcctgagccccttcagcaccacagattctgcctatgagtggaagatgcccaagaagagcagcctgggctccatgcccttcagcagtgactttgaagattttgactacagctcctgggatgccatgtgctacctggaccccagcaaggctgtggaggaggatgactttgtggtgggcttctggaaccccagcgaggagaactgtggggtggacaccgggaagcagagcatctcctatgacctgcacacagagcagtgcatcgctgacaagagcattgctgactgtgtggaggccctgctgggctgctacctgaccagctgtggggagcgggccgcccagctgttcctgtgcagcctgggcctgaaggtgctgcccgtcatcaagaggacagaccgggagaaggccctgtgccccacccgggagaacttcaacagccagcagaagaacctgtctgtgtcctgtgccgccgcctctgtggccagcagccgcagctctgtgctgaaggacagtgaatatggctgcctgaagatccccccacgctgcatgtttgaccacccagatgctgacaagaccctgaaccacctgatcagcggctttgaaaattttgagaagaagatcaactaccgcttcaagaacaaggcctacctgctgcaggccttcacccacgccagctaccactacaacaccatcacagactgctaccagaggctggagttcctgggagatgccatcctggactacctgatcaccaagcacctgtatgaggacccccggcagcacagccctggggtgctgacagacctgcggagcgccctggtgaacaacaccatctttgccagcctggccgtgaagtatgactaccacaagtacttcaaggctgtgtccccagagctgttccacgtgattgatgactttgtgcagttccagctggagaagaatgagatgcagggcatggattctgagctgcggcgctctgaggaggatgaggagaaggaggaggacatcgaggtgcccaaggccatgggagacatctttgagagcctggccggggccatctacatggattctggcatgagcctggagaccgtgtggcaggtgtactaccccatgatgaggcccctcatcgagaagttcagcgccaacgtgcccaggagccctgtgcgggagctgctggagatggagcctgagacagccaagttctccccagctgagaggacctatgatggcaaggtgcgggtgacagtggaggtggtgggcaagggcaagttcaagggcgtgggccgcagctacagaattgccaagtctgctgctgcccggcgggccctgcggagcctgaaggccaaccagccccaggtgcccaacagctag

SEQ ID NO: 109833 - DNA, 5769 bp, Artificial Sequence
  derived and/or modified sequence
atgaagagccccgccctgcagcccctgagcatggccggcctgcagctcatgacccctgcttcttcgcctatgggacccttctttggtctcccttggcagcaggaggccatccacgataatatctatacaccgagaaaataccaggtcgagctcctcgaggctgcccttgaccataacacaattgtgtgcctgaacacgggtagtggcaagacttttatcgctgtgctgctgaccaaggaactgagctaccagatcagaggagacttcagccgcaatggaaaaagaacagtgttcctcgtcaatagcgctaaccaagtggcgcagcaggtatcagcggtgcgcacccacagcgatctgaaggtcggcgaatattcaaacctggaagtgaacgccagctggactaaggagcgatggaaccaagaattcaccaaacatcaggtgctgattatgacatgttatgtggcccttaacgtcctgaagaatggatacctatccctgtccgacatcaatttacttgtttttgatgagtgtcatctggctatactggaccacccatatagagagattatgaagctgtgtgaaaactgtccatcttgccctcgcattctgggcttaacggcttctatattaaatggaaagtgtgatcccgaagagttagaagagaagattcagaaactcgaaaaaatcttgaaaagcaacgcagagaccgcaacggatcttgtggtgctggataggtacacctctcaaccttgtgagatagtggtcgattgtggccccttcacagaccggtccgggctgtacgagcggctccttatggagcttgaggaggctctcaattttattaacgactgtaatatatcggttcactctaaagaacgcgattcaacgctcatttctaaacaaatccttagtgactgcagagccgtgctcgtagtgctggggccgtggtgtgcagacaaagtcgccggaatgatggttagagaattgcaaaagtatattaaacacgaacaagaggagctccacaggaagtttttgctttttactgacacttttctgcgcaagattcatgcactctgtgaggagcacttctcacctgcgtcactggacttgaagttcgttacacctaaggtgatcaagcttctggaaattttacggaagtataaaccttatgaaagacaacagttcgagagtgtcgaatggtataataaccggaaccaggataactacgtgtcatggtccgatagcgaagatgatgacgaagacgaagagatcgaggaaaaagaaaaaccagaaaccaacttccctagcccgtttactaatatcctgtgtggaataatcttcgtggaacggaggtatactgcagtcgtactgaatagattgattaaggaagccggtaagcaagaccccgaactggcatacatctcctctaatttcatcaccggacacgggattggcaagaaccagcccaggaacaagcagatggaggccgagtttcgcaagcaggaagaggtgctgcgaaagtttcgtgcacatgaaactaatttactcattgcaacatcgatcgttgaggagggggtggacattcccaaatgtaacctggtcgtgcggtttgatcttcccacggaatacagatcttatgtgcagtccaaaggaagagcgcgcgcgccaatctccaattacattatgctcgctgacacagacaagattaagagctttgaagaggacctgaagacatacaaggccatagagaaaatcttacggaacaagtgtagcaagagtgtcgatacgggggagacagacatcgatcccgtgatggacgacgatgacgtgttccccccctatgttctcaggccagatgacggcggtcccagagtgacaatcaacacagcaatcggtcatatcaacagatattgcgccaggctaccgtcagacccttttactcatctggctccaaaatgcagaacaagagagctgccggatggtacgttttactccacactgtacctccctatcaattcgccactgagggcgagcattgttggaccccctatgtcctgcgtgaggctcgccgagcgcgtcgttgcgcttatctgttgtgaaaagttgcacaaaatcggcgaattggacgatcacctgatgcccgtgggcaaggaaacagtcaaatacgaagaggagctagatttgcacgacgaagaggaaacatcagtcccaggaaggcctgggtccactaaaagacggcaatgctacccgaaggccatacctgagtgccttcgcgatagttatccgcgccctgatcagccttgttacctgtacgtgattggtatggtccttactaccccattgccagacgaattgaattttaggcgcagaaaactatacccgcctgaggataccactcgatgcttcggcattcttacggcaaagcccatcccacagataccccatttccccgtctatacccggtctggagaggttactatcagtattgaactgaagaagagtgggttcatgctgtctttacaaatgctcgaattgatcacccggctgcaccaatatatattcagccatatcctaagacttgagaagccagccttggagttcaaacctacagacgccgattcagcctactgtgttttgcccttgaacgtggtgaatgattcgagcactctggacattgattttaaattcatggaagacattgaaaaaagcgaggctcggatcggtatacccagcaccaaatacaccaaggagactcccttcgttttcaaactcgaggattaccaggacgcggtaataattcctcgctatcgaaacttcgaccaacctcataggttctatgtcgccgacgtctataccgatttaacccccctttcaaagtttccatccccggagtacgagacatttgcagaatactataaaactaaatacaatcttgacctgactaatttgaaccagcccttacttgatgtagaccatacttcatccaggttaaatctgcttactcccagacacttaaatcagaaggggaaggcgcttccactcagttccgcagaaaagcgcaaagctaagtgggaatctctgcagaataagcagatcctggtcccagaactttgtgccattcaccccatccctgccagcctgtggcgcaaggccgtctgccttccatctattctgtatcggctgcactgtttgctgactgcggaggagctgagagctcagacagcctctgatgccggtgtgggggttcgctcactaccagctgatttcagatacccaaacctggactttggatggaagaagtctattgattctaaatctttcatttccatttctaactccagctctgcggagaacgacaactactgtaaacactcaacaattgtccccgaaaacgctgctcatcagggtgcaaacaggacgagttccctcgagaatcacgaccagatgagtgtgaactgccgaacactgctttcagagagcccaggtaagctgcatgttgaggtttccgcagacttgacagccatcaatggactcagctataaccaaaatctggccaacggctcatacgacctcgccaatagggacttttgccaaggtaatcagctgaattattacaaacaggaaatccccgttcaacctaccacctcctattcgatccaaaatttgtattcctatgagaatcagccccaacctagcgacgaatgcactctcctctctaataagtacctagacggcaatgcaaacaaaagcacctcagacggttctcctgtgatggctgtgatgcctggcacaacggacactattcaggttctgaagggccggatggacagtgaacagagccctagcatcggttattctagtaggactctggggccgaacccaggcttgatcttgcaggctctgaccctgtcaaatgcctctgatggttttaatctggaacgcctcgagatgcttggcgattcatttttgaagcacgcaataactacttatttgttctgcacataccccgatgcgcacgagggccgcctgtcctacatgcggtcaaagaaagtctcaaactgcaatctgtaccgcttgggaaagaagaagggccttcccagtcgcatggtggtctctatattcgacccgcccgtcaattggcttccacccggctacgttgtgaaccaggacaagagcaacacagacaagtgggagaaggacgagatgactaaggactgcatgttggccaacggaaagctggacgaggattatgaggaggaggacgaagaagaggaatcactcatgtggagggctcctaaggaagaagctgactatgaggatgacttcctcgagtatgatcaagaacatattcgcttcatcgacaatatgctgatgggttccggcgcattcgtcaagaagatcagcctcagccctttctcaaccactgatagcgcctacgagtggaaaatgcccaagaaaagttcactcggcagcatgccattttcctctgacttcgaggatttcgattatagtagctgggatgcaatgtgctacctggatccaagcaaggccgtcgaagaggacgatttcgttgtaggcttctggaaccctagcgaggagaactgcggtgtggataccgggaaacagagtataagttatgacctccataccgaacagtgcattgcagataaatccatcgcagattgcgtggaggctctgcttgggtgctacctgacttcttgcggcgaacgggccgcccagctttttctgtgtagcctgggacttaaagtgctgccggtcattaagaggacagacagagagaaggctctgtgccccacccgagagaatttcaattcacaacaaaagaatctttccgtaagctgtgccgccgcgtccgtggcctcttcaaggagttccgttctgaaggacagtgaatatgggtgcctgaaaatcccccctcgatgcatgttcgaccaccccgatgccgacaagaccttaaaccaccttatctccggcttcgagaatttcgagaaaaagatcaactaccgctttaaaaacaaggcctacctgctgcaggcttttacacatgcctcctaccactacaacactatcacagactgttaccagagactcgaattcctgggggacgccatcctggactacctgataacgaaacatctgtatgaggatccgagacagcactcccctggagttctgaccgacctgcgtagcgcgttagtgaataacaccattttcgcctctctggcggttaagtacgactatcataaatattttaaagcagtgagtcccgagctctttcacgtaatagacgattttgtgcagtttcagctcgaaaagaatgagatgcaagggatggattccgaactgagacgaagtgaagaggatgaggaaaaggaggaagacatcgaagttccaaaagctatgggagacattttcgagtctctagccggcgccatctatatggactcagggatgagcctggagacagtctggcaagtgtattatcctatgatgcgccccttgatcgagaaatttagcgcgaacgtcccacggtctcccgtcagagagctactggagatggaaccagaaaccgctaaattttcgcccgccgagaggacctacgatggaaaggtgagagtcaccgttgaggtggtcggaaagggtaaatttaagggcgtggggcggtcctaccgaattgccaagtctgcagctgcaagaagggctctcagatcactcaaggccaaccaaccacaggtccctaattcctag

SEQ ID NO: 109834 - DNA, 5769 bp, Artificial Sequence
  derived and/or modified sequence
atgaagagccccgccctgcagcccctgagcatggccggcctgcagttaatgacccccgcctcttccccaatggggccattctttggcttgccctggcaacaggaagctatccatgacaatatctatacaccaagaaaataccaggtggagctccttgaggctgctttggaccacaacacgatcgtttgtctgaataccggcagcggaaagacctttattgcagtgctgttaaccaaggaactgtcctaccagatccgtggagacttcagtcggaacggaaagaggacagtgttcctagtaaacagcgctaaccaagtggcacagcaggtgtctgctgttcgtacacactcagacctgaaggtcggcgaatactccaacctggaagtgaatgcttcatggactaaggaacggtggaaccaggagttcactaagcaccaggtactcatcatgacatgctatgttgcactcaacgtgttgaagaatggctacctgtcactttcggacattaatctactggtttttgacgaatgccacctggccattctggaccacccctacagggagattatgaaattgtgcgaaaactgtccctcatgccccaggattctgggattgacagcgtccattcttaacgggaagtgtgatccagaagaactcgaggaaaaaattcagaagctggagaagatcctgaagtccaacgctgaaaccgcaactgacctggttgtcctggacaggtacacttcccagccttgcgaaattgttgttgactgcggtccatttaccgataggtccggcctgtacgagaggctgcttatggagcttgaggaagccctgaacttcatcaatgactgtaatatctctgttcacagcaaagagcgggacagcactcttattagtaaacagatccttagcgactgtagggcagtgctggtggtcttagggccttggtgcgccgataaggtggccgggatgatggtgcgagaactgcagaagtatataaagcacgagcaggaggaacttcacaggaaattcctcctgtttactgacacatttctgcgtaaaattcatgccctttgtgaagagcactttagtccggcgagcctggaccttaaattcgtcacccccaaggttatcaagctcttagagattctgagaaagtacaaaccatatgaaaggcaacagttcgagagtgtcgagtggtacaataacagaaatcaggacaattacgtcagttggagcgattccgaggatgacgatgaagatgaggagatcgaagagaaggagaaacccgaaacaaactttccaagcccttttaccaacatcctttgcggtattattttcgtggaacgtcgatacactgccgtcgtgctgaataggttgattaaggaggcaggcaagcaggaccctgaattagcctacattagttctaactttatcaccgggcacggcattggtaagaaccagcctaggaacaagcagatggaggctgagttccgcaaacaggaagaagtcttgcggaaatttcgagctcacgagactaacctgcttatagctacatccatcgttgaagaaggtgtggacatcccaaaatgtaatctggtggtgcggttcgatctgcccaccgagtacaggtcctacgtgcagtcgaagggcagggcaagagcccccatttccaactatatcatgctggcagacaccgataagattaaatcctttgaagaggacctcaagacttacaaggcaatcgagaagattttgagaaataaatgcagtaaatcagtggatactggagaaacagacatcgaccctgtgatggacgacgacgatgtgtttcctccttacgtccttagaccagacgacggaggaccccgggtgacaattaacacagctattggccatataaacagatattgcgctcgtttaccgagtgacccatttactcatcttgctcccaagtgccgcacccgggagctgccagatggcacgttttacagtacactctatctgccgatcaattctcccctgagggcaagcatcgtgggtcctcccatgagttgcgtgcggttggccgagcgggtggtggccctcatttgctgtgaaaagttacacaaaattggcgaactcgatgatcacctgatgcccgtaggtaaagagaccgtgaaatacgaggaggagcttgacctccacgacgaagaagagacatcagtccctggcaggcccggaagcacaaaacggaggcagtgctatcccaaggccatacctgagtgtctccgcgactcttatccacggcctgatcagccttgctatctgtatgtgattgggatggtcctgacaaccccactgccagacgaactgaacttccgaaggcgcaagctctatccccccgaagacacaacgagatgcttcggaatccttactgcaaagccgatcccccaaatcccccacttcccagtgtatacaagatccggtgaggttacaatttctatagaactgaaaaagtccgggttcatgcttagtctgcagatgctcgagctcattactcgcctgcatcaatacattttctcccatatcctgaggcttgaaaagcccgcattggagtttaagcccacagacgctgactccgcgtactgcgttctgcccctgaatgtagttaacgattcctccactctggacattgatttcaagttcatggaggatatcgagaagtccgaggctcgcatagggattcccagcactaaatacaccaaggagacacccttcgtcttcaagctggaagattatcaggacgccgtcatcatacccaggtaccggaatttcgaccagcctcataggttctatgttgcagatgtgtatactgacctgaccccattgtctaagtttccatctcccgagtacgagacgtttgcggagtattacaagactaagtacaacttggatctgacaaacctcaaccaaccattgctggatgtggaccacacaagctcccggctaaatctgcttaccccccgtcatttgaaccagaagggcaaagccttacctctctccagtgccgaaaaacgaaaggcgaagtgggagtcactccagaataaacagatcttggtgcccgaattatgcgccatacaccccatcccggccagtctgtggcgaaaagcagtatgtctgccctccattctgtatcgccttcactgcctcctgaccgcagaggagctgcgggcgcagacagcctccgacgctggggtgggcgtgagatcattacccgccgatttccggtatccaaatctggacttcggatggaagaagagtatcgacagtaaatcttttatctctatctccaatagctcctctgccgaaaacgataattactgtaaacacagcacaattgttccagaaaacgccgcccaccagggcgcgaatagaactagctctctggaaaaccatgaccagatgtcagtaaattgcaggacccttctctctgagtctccaggaaagctccatgtagaagtgagcgcagatcttacagcaatcaatggcctctcatacaaccagaatctggctaatggttcatatgatcttgccaaccgggacttctgccaggggaatcagctgaactactacaagcaggagatccccgtgcaaccaaccacctcttatagcatccagaacctgtactcctacgagaaccagccccagccatccgacgagtgcacacttttgtctaacaaatacttggacggaaacgccaataagtctacgtcagacggcagtccagtgatggcggtgatgcccggcacaactgacacaattcaggtcctgaagggccggatggactcagagcagtcaccttctatcggttattcttctaggactctgggccccaacccaggcctgatcctgcaagccctgactttaagtaacgcaagcgacggctttaacttagagcggttagagatgctaggtgattccttcttgaaacacgccatcacgacctacttgttctgtacctaccctgatgcacacgagggaagactaagctatatgaggagtaagaaggtgagtaattgcaacctttaccgacttgggaaaaagaaggggttaccatcaagaatggtcgttagcattttcgatccacccgttaattggcttcccccaggctatgtagtcaaccaagataagtccaatacagataaatgggagaaggatgagatgaccaaggattgcatgctcgcgaacggtaaactcgatgaagattatgaggaggaagacgaggaggaagagagtttgatgtggcgggcccctaaagaggaggcagattacgaggatgacttccttgagtacgatcaggaacatattaggtttatcgataacatgcttatgggcagtggagctttcgtgaaaaagatcagtctgtccccattctcaaccacggattccgcctacgagtggaaaatgccaaagaagagttcactggggagcatgcctttttcttctgacttcgaggacttcgactacagcagctgggatgcgatgtgttacctggatcccagcaaggccgtagaggaagacgatttcgttgtgggtttctggaatccttccgaagagaactgcggtgtggacacagggaagcagtccatttcctatgacctacataccgaacagtgtattgccgataagagcatagcggactgcgtagaggcactgctggggtgctacctgacgagttgcggagagcgggcggcccagctttttctctgttctctgggcctgaaagtgctccctgtaataaagagaacagacagggagaaggcactgtgcccaaccagagaaaactttaactcccagcagaagaatctgtctgtcagctgcgccgcagcctctgttgccagctcaaggagttctgtgttgaaagacagcgagtatgggtgcctaaagattcctccccgctgtatgttcgaccaccctgacgcagataaaactttgaatcacctgatctctgggttcgagaacttcgagaagaagataaactacaggtttaagaataaagcttacttacttcaggctttcacccatgccagctaccattataatacaatcaccgactgctaccagagactagagtttttgggcgacgccatcctggattatctgatcacaaagcatttgtatgaggacccccggcaacattccccgggggtactgacagatctgcggtccgctctcgtgaacaatacaatatttgcctctctcgctgtgaaatacgactaccacaaatattttaaagccgtgagcccggaactcttccatgtaattgatgactttgtgcaatttcagctcgaaaaaaacgagatgcagggaatggactccgaactgaggcggtcagaggaggacgaggagaaggaggaggatattgaagtacccaaagcgatgggggacatttttgagtccctggcaggagccatttacatggatagtgggatgtctttagagacagtgtggcaggtgtattaccctatgatgaggcctcttattgagaagttctctgcaaacgtccctagatccccagtgagggagctcctggaaatggaacccgagacggccaagttctcccccgcagaaagaacttacgacggcaaagtccgggtcactgtggaagtggtgggaaagggcaagttcaagggtgtgggcaggtcttataggattgctaaatctgccgctgcccggagggctttacgctccctgaaggccaatcaaccacaagtgcccaactcctag

SEQ ID NO: 109835 - DNA, 5769 bp, Artificial Sequence
  derived and/or modified sequence
atgaagagccccgccctgcagcccctgagcatggccggcctgcagctgatgactccagcttccagccccatgggaccttttttcggcctcccatggcagcaggaggctatccacgacaacatctacaccccgcgtaaataccaggtggaactgctggaagctgccctcgaccacaacactatcgtctgccttaatacgggatctggcaaaacgtttattgccgtattgctaactaaggaactgagctatcagattcgtggggattttagccgcaacggaaaacgcacagtttttcttgtaaattctgcaaatcaagtagcccagcaggtatccgccgtgcgaactcactccgacctcaaggtgggcgagtactccaacctggaggtaaatgcatcttggacaaaagagagatggaaccaggaattcactaagcatcaggtgttaataatgacttgctacgtcgccctgaacgtgctgaaaaacggctacctgagtctgtctgacattaacttgctggtgtttgacgagtgtcacctggccattctggaccatccttatagagagattatgaaactatgtgagaactgcccctcttgtccccgcattctcggattgacagcatctatcctgaacgggaaatgtgaccccgaagagctggaggaaaagatacaaaaactcgagaagattctcaagagcaatgcagaaacagcgacagacctggtggtgctggatcgatacacaagccagccatgtgagatcgtggtggactgcggcccattcacagaccgcagtggcctgtatgaacggcttctaatggaactggaggaggcactcaactttattaatgactgtaacatctcagtgcatagcaaggaacgagactccaccctcatttctaagcagattcttagtgattgccgagccgtgctggtggtgctggggccatggtgcgcagacaaggtggccggaatgatggtgcgggaattgcagaaatatataaaacacgagcaggaagagctgcaccgaaagtttctgctgtttacagacaccttcctgcgcaagatccacgcgctttgcgaagaacactttagcccagcatctctggacctgaagtttgttactcctaaagtcataaaactgctggagatattgcgcaaatataaaccctatgaaagacagcagtttgaaagtgtggagtggtataacaatcgtaaccaggacaattacgttagctggtcagattcagaggacgatgacgaggacgaggaaatcgaggagaaggagaaacccgagacaaatttcccctccccctttaccaacatcctctgtggaatcatcttcgtagaaaggcgctacacagcagtcgtcctcaatcggcttatcaaagaagccggcaagcaggatcctgagctggcatatatctcttccaattttatcactgggcatgggatcggcaagaatcagcctcgcaataaacaaatggaagcggagtttcgaaagcaagaagaggtgctccgcaagttccgggcacacgagaccaacctcctcatcgctactagtattgtggaggagggagttgatattccaaaatgtaatttagtagtcagattcgatctcccgacagagtaccgctcttatgtccaaagcaaaggacgcgcaagagcaccaatatcaaattatataatgctcgctgacacagataagattaaaagcttcgaggaggacctcaagacttacaaagctatcgaaaagatattgcggaataaatgttcaaagagtgtggacaccggagaaacagatatcgatcctgtaatggacgatgacgatgtgttccctccttatgtgttgcgccccgacgatggcgggcctcgcgttacaataaatactgcaatcggccacattaatcggtactgcgcccgtctgcccagtgacccttttacacacttagccccaaaatgtagaacacgtgaattgcccgacggcacattctactcaactttgtacctgcctattaactccccgctacgggcgtctatcgtggggccccccatgtcgtgtgtccgactggcagagcgtgtggtagcattgatctgctgcgaaaagctgcacaagataggagaacttgacgaccacctgatgcccgtcggaaaagagaccgtgaagtatgaggaagaactggatttgcacgatgaggaagaaacttcagttcctggccgccccggttcaaccaaacgcaggcaatgctatcctaaagccatcccagaatgcctccgcgattcctacccacggcccgaccagccatgttatttgtacgtgatcggtatggtgctgacaactcccctccccgacgaacttaattttcgcagaaggaaattgtacccccccgaggatacgaccaggtgctttggcatcctaactgcaaagcctatcccacagatcccacattttccagtgtacacacgaagcggcgaggtcacaatatctattgagttgaagaagtccgggttcatgttaagtttgcagatgctggaactgattacaaggctgcaccagtatatattcagccacattttacggttggagaagccagcgctggagttcaaaccgacagacgctgacagtgcctactgtgtgctacccctgaacgtggtcaatgattcaagcactctggatatcgactttaaattcatggaggatatcgagaaatcagaggcccggattggtattccctctacaaagtacaccaaggagactcccttcgtctttaagttggaggactatcaagacgcagttattataccgagatatagaaacttcgaccaaccccacagattttatgtcgcagacgtttatactgatcttacccccctgagcaaatttccgagcccagagtatgagacttttgcagaatattataagacgaagtacaacttagatcttactaacctcaatcaacccttgttagacgtggaccacacttcttccagacttaacttactgaccccccgtcatctcaatcaaaagggcaaagcccttcccctttccagcgctgaaaagaggaaggccaagtgggagtctttacaaaataagcagattctggtgccggagctgtgcgccattcaccccatcccagcgagtctctggaggaaggccgtgtgcctgccttctatcctgtatagactgcattgtctgcttacagcggaagagttgcgtgctcagactgcgtcagacgcgggtgttggcgtcagaagtctgcccgccgacttcaggtatccgaatcttgacttcggatggaagaagagcatcgactcgaagtcttttatctccatcagtaattcttccagtgcagagaacgacaactactgtaagcacagtacaatcgtaccggagaacgccgcgcatcagggcgctaacaggaccagctctctggagaatcacgaccagatgtccgttaactgtcgtacgctgttgtctgagtcaccgggaaaattgcatgtcgaagtcagcgctgaccttactgctataaatggactgtcctacaatcagaatctggcgaacggcagttatgacctggcaaaccgggatttttgtcagggcaaccagctcaattattacaagcaagagatccctgttcaacccacgaccagctacagcatccagaacctgtacagctatgagaatcaaccccagccaagcgatgaatgtacccttctgtctaataaatatctagacggcaatgcgaataaatctactagcgatggatcgccggtgatggcggtcatgcccggaactaccgacactattcaagttttgaagggacgcatggacagtgagcaaagcccaagtatcggctactcaagtcgaaccctggggccgaatcctgggctgattctacaggcccttactctgagtaatgcgtcagacgggttcaatctggagcgcctggagatgctcggggatagcttcctcaaacatgctataaccacttatcttttttgcacctatcctgacgcccacgagggtcggcttagttatatgaggtcaaagaaggtgagcaactgcaacctgtatcggcttggaaaaaaaaaaggcctcccatcacgtatggttgtttcaattttcgatccacctgtaaactggcttccaccaggctatgtagtcaatcaagataagagtaacactgataagtgggagaaagatgaaatgacaaaggattgtatgctggccaatgggaaattggacgaggactatgaggaagaggatgaagaagaagaatctctgatgtggagagcacccaaggaagaggccgattatgaagacgactttctagaatatgaccaagagcatatccggtttatcgataatatgttgatgggcagcggcgctttcgtgaaaaagatcagcctctcacccttcagcactaccgactcagcgtacgagtggaagatgcccaagaagagcagcctcggaagcatgcccttctcttcagattttgaggattttgattattcatcttgggacgcgatgtgctatctggacccatccaaagcagtggaggaagatgatttcgtggtaggcttctggaatccgtcagaggagaactgcggggttgacactgggaagcagtccatttcctacgaccttcacacagaacagtgtattgctgacaaaagtattgctgactgtgtcgaagctctgctcggctgctatctgacttcctgcggagagcgggccgcccagctattcctgtgcagcctgggtctgaaggtccttccagtgatcaaaaggacagatagagaaaaagctctgtgcccgacaagggagaacttcaactctcaacaaaagaacctgagcgtgagctgtgccgctgcctctgtggcctcgtcccgaagctcagttttgaaagactctgagtatggctgtcttaagatcccacctaggtgcatgtttgatcacccggatgcggacaagacactgaaccatttgataagtggattcgagaacttcgaaaaaaaaatcaactaccggttcaagaacaaggcgtatctgctccaggcctttactcacgcctcctatcactacaacacaatcaccgattgttatcagagattggagttcctgggcgacgctatccttgattacctaatcacaaaacacctgtatgaggacccaaggcagcattcacccggagtgctgactgatttgaggtctgctttagtgaacaatacaatctttgcctcactcgctgtgaagtatgactaccataagtactttaaggccgttagtccagagctctttcacgtaattgacgacttcgttcagtttcagctggaaaagaacgaaatgcaggggatggactcagaactgcggcggtccgaagaggacgaagagaaagaggaggacatcgaggtccccaaggctatgggggacatttttgagagcctggccggagccatctacatggacagcggtatgtctctggaaacagtttggcaggtctactacccgatgatgagaccactgatcgaaaaattcagcgctaatgtgcctagatcccctgtgcgagagctcctagaaatggagcctgagactgctaaattttctccggcagagcggacctacgatggcaaggtccgggtgactgtagaggtagtagggaagggaaagtttaaaggggtcggacgctcataccggatagccaagtctgccgccgccaggagggcattgagaagcctaaaggccaaccaaccacaggtccccaacagctag

SEQ ID NO: 109836 - DNA, 5769 bp, Artificial Sequence
  derived and/or modified sequence
atgaagagccccgccctgcagcccctgagcatggccggcctgcagctcatgacccctgctagctcccccatgggccctttctttgggctcccttggcagcaggaagccattcatgataatatctacacgcctcggaagtatcaagttgagttgttggaggccgccctggaccacaataccattgtttgtctgaatactgggtccggcaagacatttattgccgtgttgctgaccaaagagctttcctaccagattcgcggggacttcagtagaaacgggaaaagaacagtgtttcttgtgaacagtgctaatcaggtggcgcagcaggtgagcgctgttagaactcattcggacttgaaagtgggcgagtactccaacctggaagtgaacgcaagttggaccaaagagagatggaatcaggaatttacgaagcatcaggttctcattatgacatgctatgtggcactgaatgtgctcaagaacgggtatttaagtctgtcagatatcaacctcttggtgttcgacgagtgtcacctggccatcctggatcatccctaccgcgaaattatgaagctgtgcgagaattgtccgtcctgcccgagaatcctgggtcttacggcatctattctaaacggcaaatgtgaccctgaggagctggaagagaaaatccaaaagctggaaaagattcttaaatcaaatgcagagacagcgactgatctcgttgtgctggatagatataccagccagccatgtgagatcgtcgtagactgcggccccttcacggatagaagtggactttacgaaagactcctcatggagctggaggaggctcttaacttcatcaacgattgcaatattagtgtgcacagcaaagagagggatagtactctgatctccaaacaaattctaagcgattgcagagccgtgctggtggtgctaggcccgtggtgtgctgacaaggtggccggaatgatggtccgggagctgcagaagtacataaagcacgagcaagaggagctacatagaaaattccttctttttaccgacacatttttgaggaagatccacgccctctgtgaagaacatttttcgccggcctccctcgacctgaagtttgtaacccctaaggtgatcaagttgttggaaatactgcggaagtataaaccgtacgagaggcaacagtttgaaagcgttgaatggtacaataacaggaatcaggacaactacgtatcatggtcggactctgaggacgatgacgaagatgaggagattgaagagaaggagaaacccgaaaccaatttcccatcaccgttcactaacatcctctgcggcatcatctttgtcgagaggcgctacaccgccgtggtcctgaacaggctcattaaagaggcgggcaagcaggacccggaattggcctatattagttctaactttatcacaggtcatggcatcggtaagaaccagccccgcaataaacagatggaggctgagttccgaaagcaggaagaggttctaaggaaattccgagcacatgaaacaaatctcctgatcgccacaagtatcgtggaagaaggagtggacatccctaagtgtaacctcgttgttaggttcgacctacctaccgaatataggagctatgtgcaaagcaagggcagggcacgcgcacctatcagtaactacatcatgctggctgatactgacaaaatcaagtcctttgaggaagatttaaagacctataaggccattgaaaaaatcctgcggaataaatgcagtaagagtgtcgataccggggagaccgacatcgaccctgttatggacgatgatgatgtcttcccgccctacgttctgcgacccgacgacggtggccccagagtcacgattaacacagctattgggcacatcaatagatattgtgctcgtcttcccagcgaccccttcacccacctggcaccaaaatgccgtacacgggaactgcccgatggcaccttctatagcacactttaccttccaataaactctccacttagggcttcgattgtaggaccccctatgtcttgcgttcgcctggccgagcgagtggtagcgttgatttgctgcgagaagcttcacaaaattggggagctcgacgatcacctgatgccggttgggaaagagacagtgaaatacgaggaggaattagacttgcacgacgaagaagaaacgagtgtccccggtcgtccaggcagcaccaagcgaagacagtgttatccgaaagcgatcccagagtgcctgcgggattcctatcccaggcctgaccaaccctgctatctgtatgttattggcatggtgctaacgacgcccctcccggacgagctgaattttcgaaggcggaaactctacccacccgaggataccaccaggtgtttcggcattcttaccgccaaacccattcctcagatcccccactttccagtgtacaccagaagcggagaggtgactatttcaatagaactaaaaaaatcggggtttatgttgtccttacagatgctcgagcttattactcggctgcaccagtatatcttctctcacatactgaggttagaaaagccggcactggagtttaaacctacagacgccgactcagcttattgcgtcctacccctgaacgttgttaatgatagttctaccctggatatcgatttcaagttcatggaagacattgaaaagtcagaagcgcgtatcggaatcccaagtacaaaatatacgaaggagactccattcgttttcaaattagaagattaccaggacgccgtgataatacctcgttacagaaatttcgaccagccccatcgcttttacgttgcagatgtgtatacagatctgactcccctatcaaagttcccctccccggagtacgagacttttgcagaatactataaaactaaatataacttggatcttactaacctcaaccaaccgctgctcgacgtggatcataccagttccagacttaatttgcttactcctagacatctgaatcagaaaggcaaggccctccccctgtccagtgccgagaagcggaaagccaagtgggagtccctgcaaaacaaacaaatcctggttcccgagctgtgcgctattcatccaattcctgcctcactgtggcggaaagctgtgtgtttgccatctattctgtaccggctgcactgtttgctgaccgctgaggaactgcgtgcccagacggcaagcgacgcaggtgtgggagtgcgctcactccctgctgattttaggtatcctaaccttgatttcggctggaagaaaagtatagactcaaaatccttcatcagtatatcaaatagctcgagcgccgagaatgacaactattgcaaacatagcaccattgttcctgagaacgctgcccaccagggtgcaaataggacaagcagtctggaaaatcacgaccagatgagtgtcaattgccgcacactgctgtctgagtcccctggaaaattacacgtggaggtgagcgcagatctcaccgctattaatgggctttcgtataaccagaatttggctaacggctcctacgatctggccaaccgggatttctgtcaaggaaatcaactcaactactataagcaggaaattcccgtgcagcccactacatcatacagcatacaaaatttatactcctacgagaaccagccacagcctagcgatgagtgtactctgttgtctaataagtatcttgatggaaacgccaacaagagcacttcagacggcagcccagtcatggctgtgatgccagggaccactgacaccatacaggtcctgaagggaagaatggattctgagcagtcgcccagcatcggatactcctccaggacgctcggacccaatccagggcttatacttcaggcattgaccctgtcgaacgcctcagacggatttaatctagagcgcctagagatgctcggcgacagtttcctcaaacacgctattacaacctatttattctgtacttatccagatgcacacgagggcagactgagctacatgagaagcaagaaggtgagcaactgtaatctatatcggctgggcaagaagaaaggcctgccttcaaggatggtcgtttccatctttgatccccccgtcaattggttgcctcccggttacgtcgtgaaccaggataaaagcaataccgacaagtgggagaaagatgaaatgactaaagactgcatgttagccaatgggaaactggacgaagattacgaggaggaagatgaggaagaagagtccctgatgtggagagcccctaaggaggaggcggattatgaagatgattttttagagtatgaccaggagcatatccgattcatagacaatatgttaatgggaagtggagccttcgttaagaaaatctccttgagccctttctccactacagattcagcctacgagtggaaaatgccaaagaaaagctcgttgggctcaatgccattctcgtcagatttcgaggacttcgattactccagctgggatgctatgtgttatctggatcctagcaaagccgtggaggaagacgattttgtggtgggattttggaatccttcagaggaaaactgcggtgtagacactggaaagcaaagcatcagctacgacttacacacggaacaatgtattgcagataaaagcattgcagactgcgtggaagcgctgttgggctgctaccttaccagctgcggggagagagcggcacagctgttcctttgttctcttggtctgaaggtactccccgtaataaaacggacggaccgcgagaaagctctttgtccaactagagaaaactttaactcccagcagaagaacctgtccgtttcatgtgccgctgcttctgtggcttccagccggtcctctgttctgaaggattcagaatacggatgtctcaagattccaccaaggtgcatgttcgatcaccctgatgccgacaaaacccttaaccatcttatcagcgggttcgagaacttcgagaaaaagatcaactaccggtttaagaataaggcctatctcctgcaagcgttcactcatgcctcataccactataacacaattactgactgctatcagaggctggagtttctcggcgacgctatcctggattatctcatcacaaagcacctttatgaggacccccgccaacatagcccaggagttctgactgacctgcggtccgcgttggtcaataacaccatcttcgcgtcactggctgtcaaatacgactatcacaagtatttcaaggcagtgtcaccagagctcttccacgtgatcgacgacttcgtgcagtttcagcttgagaagaacgaaatgcagggcatggactccgaactgagaaggagcgaagaagacgaggaaaaagaggaggacatagaggtgccgaaagcaatgggggacatctttgaatccttagcaggggccatctacatggactcgggaatgagcctggaaacggtgtggcaagtatattacccgatgatgcgtcccctaatcgaaaaatttagcgccaacgtgccaaggtcacctgtgagagagctcctggagatggagcccgagactgctaaatttagtcccgctgaacgcacatatgatggcaaggtgcgagtaacagtggaagttgtcgggaagggcaagtttaaaggggtcggccggtcctaccgtatcgccaaatctgcagccgcacggcgggccctgaggtctcttaaagccaaccagccacaggttcccaatagttag

SEQ ID NO: 109837 - DNA, 213 bp, Artificial Sequence
  derived and/or modified sequence
atgaagagccccgccctgcagcccctgagcatggccggcctgcagcttatgactcctgcttcctctccaatgggcccattcttcggcctgccctggcaacaggaggctatccacgacaacatctacactccaaggaagtatcaggtggagctgctagaagctgcactggaccataacactatagtttgcttgaacaccgggagcggaaagtag

SEQ ID NO: 109838 - DNA, 213 bp, Artificial Sequence
  derived and/or modified sequence
atgaagagccccgccctgcagcccctgagcatggccggcctgcagctcatgacacccgcgagcagtcccatgggtccttttttcggtctgccttggcaacaagaggccattcacgacaatatttacacaccgagaaagtaccaggttgaactgctcgaggcagccctggatcataacaccatcgtatgtctgaacacaggctcaggcaagtag

SEQ ID NO: 109839 - DNA, 2463 bp, Artificial Sequence
  derived and/or modified sequence
atgctggcctgggagagcgaccacttcctgcggatcctggccgagaatgacaattattgcaagcacagtactatagtgccggaaaacgctgcccatcagggagctaaccgaacctccagcctggagaatcatgaccagatgagcgtgaattgccggaccctactgtcggagagtcccgggaagttgcatgttgaggtgtcagcagatctgactgccattaacggattgagttataaccagaacctagcaaacggtagttatgatcttgccaatagggacttttgccagggcaatcagctgaactactacaaacaggagatccctgttcagcctactacctcctactccattcaaaatctgtattcctacgaaaaccagccacaaccctcagacgagtgtaccttattgagcaataagtacctggacggcaatgcaaataagagcacgagcgatgggtcaccggtcatggcggtcatgccaggaacgaccgacaccatacaggtccttaagggtaggatggactctgaacagtccccctccatcggatacagttcccggaccctcggcccgaaccctggattgatcctccaggcactcactctgtctaatgcttcagacgggtttaacctggagaggctcgagatgctgggcgatagctttctcaagcacgccatcaccacgtacctgttctgtacttatccagacgcacacgagggacgtctgtcgtacatgcggtccaaaaaggtttcaaactgcaacctgtatagactgggtaaaaaaaaggggctaccatcaagaatggtggtctccatattcgatccccctgttaattggctgccaccaggttatgtcgtgaatcaagacaagtcgaacaccgacaaatgggaaaaggacgaaatgaccaaggactgcatgctcgccaatggcaaactagacgaggactacgaggaggaggatgaggaggaagaatccctgatgtggagagctccgaaggaggaggcagactacgaggatgattttcttgaatacgaccaggagcacatcagattcatagacaacatgttaatgggttctggggcatttgtgaagaaaattagcctgagccctttttcaactacagacagtgcctacgagtggaagatgccaaagaagagcagtctcggtagcatgcctttttcatccgactttgaggactttgactattctagctgggatgctatgtgctacctcgatccgtcaaaagccgtggaggaagatgactttgttgtgggcttttggaatccgtctgaggagaattgcggagtggataccgggaagcagagcatcagctatgacctccacaccgaacagtgcattgctgataaatcaattgctgattgcgtggaggctttactggggtgctatcttacttcttgcggtgaacgggccgcccaactgtttttgtgttctttgggcctcaaggtgctgcccgttatcaagcgaacagaccgagaaaaggcactttgtcccaccagagagaacttcaactcacagcagaaaaacctaagcgtgtcttgcgcagccgcctccgtcgcaagcagcaggtcctcagttcttaaggattcagaatatggttgtctgaaaatacctcctaggtgtatgttcgatcaccccgatgctgataagactctgaatcatctgatctccgggttcgaaaatttcgagaaaaaaattaactatcggtttaagaacaaggcatatctgttgcaggctttcactcacgcgagctaccactataacacaatcaccgactgctaccagaggcttgaattcctgggagatgccattctcgattaccttattacaaagcatctttatgaagacccaaggcagcacagtcccggcgtgttaacggatctccgctccgctctggtgaacaatacaatcttcgcttcactggctgtcaagtatgactaccataaatatttcaaggccgtctccccggagctgtttcatgtgatcgatgactttgtccagtttcagcttgagaaaaatgagatgcagggaatggactcggagctccgccgcagcgaggaggacgaggagaaagaggaagacatcgaggtgcccaaagctatgggcgatattttcgaatccttggcgggtgcaatctatatggacagcgggatgtcattggaaactgtctggcaggtatattatcctatgatgcggcccctgatcgagaaattctctgccaatgtgcctcggagtccagtgagggagctgctggaaatggaacccgaaactgctaagttttcccccgcggagcggacctacgatgggaaggtccgggtaaccgtggaggtggtcggcaagggaaaattcaagggcgtgggaagatcctatcggatagcaaagtccgcggctgcgaggagagccctgcgctcgctaaaggcgaaccaacctcaggtaccaaatagctag

SEQ ID NO: 109840 - DNA, 5768 bp, Artificial Sequence
  derived and/or modified sequence
atgaaatcccccgctctgcagccactcagcatggctggcctacagctcatgaccccggcaagctcacccatgggacccttttttggcctcccctggcaacaggaagccatccacgataacatttacacccccagaaagtaccaagtggagctcctggaggcagccttggaccacaatacaatcgtttgcctcaacaccgggagcggaaagacatttatcgccgttctgctcacgaaagaacttagctatcagatccgaggggacttttcacgcaacggaaagaggaccgtgtttctggttaactccgctaaccaggttgcacaacaggtgtcagccgttcgcacacacagtgatctgaaggtgggagagtactcgaacctagaggttaatgcatcctggacaaaggagcgatggaatcaggagtttacaaaacaccaagtactgatcatgacctgttacgttgccttgaatgtgctgaagaatggttaccttagcctgtctgatatcaaccttctagtgttcgacgagtgtcacctcgccatcctggatcatccctatagggagatcatgaaactgtgcgagaattgcccaagttgccccagaatcttgggcctcaccgctagtatactgaacgggaagtgcgatccggaagagctggaggagaaaattcagaagctggaaaaaattttgaagtccaatgccgaaactgccacagaccttgtggtgctcgataggtatacgtctcaaccctgtgaaatcgttgtggattgtggtccatttactgaccgttcaggactttacgagcgtctgcttatggagctcgaggaagccctgaatttcataaacgactgcaacatctcagttcatagcaaggagcgcgactctacactcatttccaagcagattctgtcggactgtcgagcagtcctcgtggtgctagggccatggtgcgcggataaagtcgcaggcatgatggttagagagctccagaaatatattaagcacgagcaggaagaattgcatagaaagtttctgctcttcaccgacacctttttgcgaaaaatccacgccttgtgtgaggagcacttcagcccagctagccttgacctcaagtttgtcacccccaaggtgatcaagctattagaaattctccggaaatacaagccttatgagcgtcagcaatttgaaagtgtcgagtggtataataacagaaaccaggacaactatgtttcatggagtgattccgaggacgatgacgaagatgaggagattgaagagaaagagaaacccgaaacaaatttcccttcgccgttcacgaatatactgtgcggcataatctttgttgaaaggagatatacagcagtcgtcttgaacagactgattaaggaggctggcaagcaggaccccgagctagcatacatcagctccaacttcatcacaggtcacggcatcggcaagaaccagcccagaaacaagcaaatggaagcagaatttcggaaacaggaggaggtgctgcgaaaatttagggctcatgagactaacctcctcattgctactagcattgtcgaggaaggggttgacattcccaagtgcaatctcgtggtcaggttcgatcttccaactgaataccggtcctatgtgcagagcaaaggcagggccagagcccctattagtaactatattatgctcgcagacacggataaaattaagtcatttgaggaagatctgaagacatacaaggctatcgagaagattctgcgaaataaatgttccaagagtgtggatacgggggagacagatatcgatccagtgatggacgacgacgacgtctttcctccctacgtcctgaggcccgacgacggcggacccagggtcacgatcaatactgctatcggacatatcaatcgctactgcgctagactgccttccgacccatttactcacctcgcccctaaatgtcgcacgcgagaactcccagatggcacattctactccacattgtatttacccatcaactctcctctccgggctagtatcgttggcccaccgatgagctgcgttaggcttgctgagagggtcgtggcactgatatgctgtgagaagttgcataagattggtgagcttgacgaccatcttatgcctgtcggaaaagagaccgtcaagtacgaggaagaactcgatttgcacgatgaggaggaaacctcagtcccagggcgacctggtagcaccaaaagaaggcagtgctatccaaaggccattcccgaatgtctgcgcgattcgtatcccaggcccgaccaaccatgctatctgtatgtcatcggaatggtgcttacaacacctttgccagatgagctgaactttcgtaggcgcaaattgtacccacctgaggacacaaccagatgctttggtatcttgactgctaaaccaatcccgcaaataccccactttcctgtttacactagatctggcgaggtgaccatttcaatcgagctcaagaagagtggtttcatgctctcacttcagatgttggagctgataacacgtcttcaccagtacatcttttcgcatatcctgcgactagaaaagccagccctggagttcaagcccacggatgccgactcagcctactgcgttctgccactgaatgtggtgaacgactcctccacactggatattgactttaagttcatggaagacattgaaaagtcagaggcacggatcggaataccatctacaaaatataccaaggaaactccctttgtgttcaaactggaggactaccaggatgccgtcattatccccaggtacaggaatttcgatcagccgcatcgtttctacgtggcagatgtgtatactgatcttacaccactgtcaaaattcccatcacccgagtacgagacgttcgccgaatattataaaactaaatacaatctagatctaaccaatctcaatcagcccctactggacgtggatcatactagctctcggctgaatctgttaacacccaggcacctcaatcaaaaagggaaggccctgcctttgagttcagcagaaaaacgtaaggccaagtgggaatcactgcagaataagcagattttggtcccagagctttgtgccatacacccaattcctgcatctttgtggcggaaagccgtgtgtctccctagcattctctacaggctccactgtctcctcaccgctgaagagctccgggctcagactgcgagcgatgctggtgtgggagtcagaagtctgcccgctgatttcagatatcccaaccttgattttggatggaaaaagtctatcgattccaaaagctttatctctatatcaaactctagttctgcagagaacgacaattactgcaagcattctactatcgtgccagagaatgcagcccaccagggggctaatcggacttcttcgctggagaaccacgatcaaatgagcgtgaactgtcgcacactcttgtctgagtcgccaggcaagctgcatgtggaagtaagcgcagatttgactgctatcaatggcctctcctataaccagaatctggcaaacggaagttatgatctcgccaacagggacttttgtcagggcaatcaactgaactattacaagcaggagatccctgtgcagccgaccactagctattccatccagaacttatattcctatgaaaatcaaccacagccatcggatgagtgcaccttgctctcaaacaagtatctggacggtaatgccaataagtctacttcagacggctcaccagtaatggccgtgatgcctggaaccaccgataccattcaggtgctaaaaggcaggatggattctgagcagtccccctctatcggatatagcagtcggacactcggaccaaatcccggtctcattttgcaggccttaaccctcagtaatgcctcagacggcttcaacctggagagacttgagatgctcggtgactcattcttgaaacacgccatcacgacctacttgttctgcacatatccggatgctcatgaaggcagactgtcttatatgcgctccaaaaaggttagcaactgtaacctgtaccggctggggaaaaagaaggggctcccaagtcgcatggtggtctctatcttcgatcctccggttaactggttacctccaggctacgttgttaatcaagataaatctaacacagacaagtgggaaaaagatgaaatgactaaggactgtatgcttgccaatggtaagctagatgaggattacgaagaagaagatgaggaggaggagtccctgatgtggagagcgcctaaggaagaggccgactatgaggatgacttcctggaatatgatcaagaacacatcagatttatcgataatatgctgatggggtccggggctttcgttaagaaaatctcgctcagtccattttcaaccaccgattccgcatacgaatggaagatgccaaagaaaagctccctcgggtcaatgcctttctcctcagacttcgaggatttcgactactcttcttgggacgccatgtgttacctcgacccctccaaagccgttgaagaggacgattttgtcgtcggtttctggaaccccagtgaggagaattgcggtgttgacaccggcaaacagagcatttcatacgaccttcacactgaacagtgcatcgctgacaagtcaatcgctgattgtgttgaagcactcctggggtgctaccttacttcttgtggtgagagggccgctcagctgttcctctgcagtctgggcttgaaggtcctgcccgtaatcaaacgcactgatcgtgagaaagcactctgccctacgcgcgaaaacttcaattcccagcagaaaaatctgagtgtgagctgtgccgcagcatcagtcgcctctagtaggtcaagcgtgctgaaggatagcgaatacggatgccttaaaattccccctcgctgcatgttcgaccaccctgatgccgacaaaaccctgaaccatctgatttccggattcgaaaactttgaaaagaaaatcaattacaggtttaagaataaagcatacctattgcaggccttcacccacgcctcttaccactataatactataaccgattgctatcaacgccttgagttcctgggcgatgccattttagattatctgataaccaaacacttatacgaagatccccgacaacacagccctggtgtcctgaccgaccttagaagtgccctcgtgaataatacaattttcgcctctttagccgtgaagtacgactatcataaatatttcaaagcagtgagtcctgagctgttccatgtcattgacgattttgtgcagttccagctggaaaaaaacgaaatgcagggaatggactctgaattgcgcaggagtgaagaggacgaggaaaaagaggaggacattgaggtgccaaaggcaatgggagatatcttcgaatccctggctggggctatctacatggactcaggcatgtcactcgaaactgtctggcaggtttactatcctatgatgcgcccactgatagagaagtttagcgctaacgtaccacgctccccggttagggaactcctggaaatggagcccgaaaccgcgaagttcagcccagccgagcggacttatgacggcaaagttagagtaactgtggaagtggtcggcaaaggtaagttcaagggcgtaggaagatcataccggatcgccaaatcagccgctgcgaggcgggcactgaggagtctgaaagctaaccagccgcaggtgcctaatagcta

SEQ ID NO: 109841 - DNA, 5768 bp, Artificial Sequence
  derived and/or modified sequence
atgaagtcccctgctctgcagccactgtccatggcaggcctgcaattgatgacacctgcatcaagcccgatgggcccattcttcggccttccttggcagcaagaggcaatccacgataatatctacaccccacgaaaatatcaggtcgagcttctggaggctgcactggatcataacacgatcgtatgcttgaacaccggtagtggaaaaaccttcattgcagtgctgctcaccaaggaactctcttaccaaattcggggagacttttccaggaatggaaagcgaaccgtgttccttgtcaacagcgctaatcaggtggcccagcaggtgagcgctgtaagaacccacagtgacctgaaagtcggggaatactcaaacctcgaagtaaatgccagttggaccaaagaacgatggaatcaggaattcactaaacatcaagtcctcattatgacgtgttacgttgcactgaatgtactgaagaacggatacctttctctgagcgatatcaacctccttgtgttcgacgaatgtcacctggctatccttgaccacccctatagggaaattatgaagctgtgcgagaactgtccctcttgtcccagaatactgggactgacggcaagtattcttaacggcaaatgtgacccggaagagctcgaagagaaaatacagaaactagagaaaatccttaagtccaacgctgaaacggcgacggacttagtggtgctcgaccgctatacctcacaaccctgtgagatcgtagtggattgcgggccattcactgatcgtagtggactgtatgagcgccttctgatggagttagaggaggctctgaactttattaacgattgtaacatttctgtccactccaaagagagggattcgactctcatttcaaagcagattttgagtgactgccgcgctgtcctcgtggtccttggcccatggtgcgcagataaagtcgccggtatgatggtccgcgaactccagaagtatatcaagcatgagcaggaggagctgcatcgcaagtttctgctgttcactgatactttcctcagaaagatccacgctctgtgcgaagaacatttcagcccagctagcttagacctgaagttcgtgacacccaaagtgataaagctcctggaaatcctaagaaaatataagccctatgagcgccagcagtttgagtctgtggagtggtacaacaaccgtaaccaggataattatgtgtcctggtccgactctgaagatgatgatgaggacgaggaaatcgaagagaaggagaagcctgagaccaacttccctagtccattcaccaacatactctgtggcattattttcgtggaaagacgttacactgccgttgtgttaaacagactgatcaaggaagcaggaaaacaagaccccgagctggcctatatctcctccaactttattacaggacatggcatcggcaaaaatcagccacgcaacaaacaaatggaggccgaattcaggaaacaggaggaagtgctgcggaagtttcgagcccacgaaacaaacctgcttattgctacttccatcgtcgaagaaggtgtggacattcctaagtgcaacttggtggtccgcttcgatctgccgactgaatatagatcctacgtgcagtctaaagggcgtgctagggctcctatttcgaactacatcatgctggcggatactgacaaaattaagagtttcgaggaggacttgaagacctacaaggcaatcgagaaaattctgaggaacaagtgttcaaagagtgttgacactggcgaaacagacatcgaccctgtgatggacgacgacgacgtatttcctccatatgtcctccgccctgacgacggcggaccaagagtgactataaatacggccatcggacatatcaaccggtactgtgcacgtttgcccagtgatccatttacccatctcgcccctaagtgcagaacacgcgagcttcccgacggcacattttactctacactgtatcttccaattaactctcccttacgggcatctattgtgggtcctccaatgtcgtgcgtcagactagccgagcgcgttgtagctttgatttgctgcgaaaagcttcataagatcggggagctggacgaccacctgatgcccgtcggaaaagagacagtgaaatatgaagaagagctggatctgcacgacgaggaggagacttccgttcccggacgtcccggttccactaaacgacggcagtgctatccaaaagccatccctgaatgcctgcgggacagctacccaagaccggaccagccttgttacttatatgtcatcggtatggtcctaaccaccccccttccagatgagctgaacttcagacgaaggaagttgtacccaccagaagacactactcgttgttttggtattctcactgcaaagcccattccccaaataccacatttcccagtgtacactcggtcaggagaggtcaccatctccattgaattgaagaaatccgggtttatgctcagccttcagatgctggaactgattacccgcctccaccagtatattttctcccacatcctcaggctagagaagccggcattggagttcaagccaaccgacgcagattctgcctactgcgtgctgcccctgaacgtcgtgaacgacagctctaccctcgacattgactttaagttcatggaggatattgaaaagagcgaggctagaatcgggatcccatcgactaaatataccaaggaaactcctttcgtgtttaaacttgaagactatcaagacgcagtcataatcccaagatatcggaattttgatcagccccaccgtttttacgtcgccgacgtgtacaccgatcttacgccactttccaaattcccatcacctgagtacgagacatttgccgagtattataaaaccaaatacaatcttgaccttacgaacctaaatcaaccactgctggatgtggaccacacatcctcccggctgaatctactgactccgagacatctgaatcagaaaggtaaggcactgccgctgagcagtgcagagaagagaaaggcaaagtgggagagcctgcaaaataagcagattcttgtccctgagttgtgcgccattcaccctatacccgctagcctctggcggaaggcagtctgcctccctagcattctgtacaggttgcattgcttacttaccgctgaagagttaagagcccaaactgcctctgatgctggcgttggggttagaagtctaccagctgacttcagatatccaaacctggacttcgggtggaagaaaagcattgatagtaaatcattcatctcaatctctaactccagttccgccgaaaacgacaactactgtaagcacagtacgattgttccagaaaatgctgcccatcaaggtgccaatcgcacttcttcacttgagaatcacgatcagatgtccgtcaactgtaggacccttctgagtgagtccccagggaaactgcacgtggaagtctccgctgacttaaccgccatcaatggactgtcttataaccagaacctagcgaatgggtcctacgatctcgccaacagagacttctgccagggtaaccaactcaattactacaagcaggaaatccccgtgcagccgacaacaagctacagcattcaaaacttatattcatatgaaaatcaacctcagccgagcgatgaatgcactttattatccaacaaatatctggatggcaacgctaacaagtctacctcagatgggtcaccggtcatggctgttatgcctgggactacggacacgatacaggtattgaagggaagaatggacagtgaacagtctccaagtatcggttattctagtcgcaccctgggccctaaccccggtctgatcttgcaggccctgacactgagcaatgcctcagacggctttaacctggagcgcttggagatgttgggggacagctttcttaagcatgcgataaccacctatcttttctgtacgtaccccgacgctcatgagggacgtctgagctacatgcgatccaaaaaggtgtctaattgcaatttgtaccggcttggcaaaaagaagggtctcccctccaggatggtggtcagtattttcgatccgcctgtcaattggcttccaccagggtatgtggttaaccaggataagtccaatacagataaatgggaaaaggatgaaatgactaaagactgcatgctggctaacggtaagttagacgaagactacgaagaagaagatgaggaagaggaatctctgatgtggcgcgcaccaaaagaggaggccgactacgaggacgactttctggaatacgaccaggaacatatcagatttattgacaatatgcttatggggtctggagcattcgtgaagaagattagcctgtcccctttttccacaaccgactctgcttatgaatggaagatgcccaagaaaagttctctgggttcaatgccattcagctctgacttcgaggattttgactacagctcgtgggacgcgatgtgttatctcgacccctccaaggcagttgaagaagacgactttgttgtcggtttttggaacccttctgaggaaaattgcggagtggacacaggtaagcaatccatctcgtacgatctgcacaccgaacagtgtatagccgacaaaagtatcgcagattgtgtagaggccttactcggatgctatctgacctcgtgcggcgaacgagccgctcagctattcttgtgctcattggggttgaaggtgctgccggtcatcaagcgaaccgatagagagaaggctttgtgccctacgcgagaaaattttaattcccagcagaagaatttgagtgtctcatgcgctgctgcctctgtagccagctctagatctagtgtgctgaaggatagtgagtacgggtgtctgaaaatacccccaagatgcatgttcgaccatccagacgcagataagactttaaaccatctcatttcaggcttcgagaattttgagaaaaaaattaattatagattcaaaaataaggcctatctgcttcaggctttcacccacgcctcataccactataatactattaccgactgttaccagagactagagttcttgggagatgctatcctggattacctgattactaagcacctgtatgaggatccacgacaacacagccctggagttctcaccgacctgaggagcgctcttgtcaacaatactattttcgcttcacttgccgtgaagtacgactaccacaaatattttaaagctgtctcccccgagttgttccacgttatagatgacttcgtacagttccaactggaaaagaacgagatgcaaggaatggatagcgaactgaggaggagcgaagaggacgaggaaaaggaagaggatattgaggtgcccaaggcaatgggggacatttttgaatcgctggcgggagctatatatatggatagcggaatgtccttggagacagtatggcaggtatattaccctatgatgaggcccctgattgaaaaattcagcgctaacgtgccaagaagccccgttcgcgagctgttagaaatggagcctgaaacggcgaaattcagtccagccgagagaacatatgatggcaaagtgagggttaccgtggaggtcgtcggaaagggcaaatttaagggcgtgggccgatcttaccggatcgccaagtcagcagccgctagacgtgccctgagatcgctgaaggccaaccagccacaggtgccgaactccta

SEQ ID NO: 109842 - DNA, 5768 bp, Artificial Sequence
  derived and/or modified sequence
atgaagtcaccagcactccagcctttgtccatggccggactccagctcatgacaccagcctcaagtccaatggggccattctttggcttgccatggcaacaagaagccatccatgataacatttacactcctcgcaaatatcaggtcgaacttttggaggcagctttggatcataatacaatcgtgtgcctcaacacagggagtggaaaaacctttattgccgtgctcctcaccaaggagctgtcataccagattcgcggtgacttctccagaaacggtaagagaactgtttttctggtaaactctgcgaaccaggtagcacaacaggtttcagctgttcggacgcacagtgacctcaaggtaggcgagtacagcaatcttgaggtgaacgcctcctggaccaaagagagatggaaccaagaattcacaaagcatcaagtgctgatcatgacctgctacgtagctctgaatgtgcttaagaatgggtacctcagcctctccgatatcaatcttctggtatttgacgagtgtcacttagcaattctggatcacccatacagagaaataatgaaactctgtgagaattgccctagctgtccgaggatcctgggactgaccgcaagtatcctgaatggaaaatgcgaccctgaagagcttgaagaaaagatccaaaagctggagaagattctgaagtctaatgccgagactgcaactgatctcgtggttttggatagatatacatcccaaccctgtgaaatagtcgttgattgtggtccgttcaccgatcgctctggtctttatgaaaggctgctaatggagctggaggaggcattaaactttataaatgactgtaacatctctgtgcacagcaaagaacgagatagcacccttatttctaagcagattcttagcgactgccgagctgtactggtggtcctgggcccatggtgcgccgacaaggttgctggcatgatggtgagggaattgcagaagtacattaagcatgagcaagaagaactgcataggaagttcttgctattcacggacactttcctgcggaaaattcatgcactgtgtgaggagcacttcagtcctgcctctctggacttgaaattcgtcacacccaaggtgataaagctcctagagatccttcggaagtacaaaccgtacgagagacaacagttcgagagtgtggagtggtacaataacaggaatcaggacaattatgtgtcctggagcgatagcgaagacgacgacgaggacgaggaaattgaagagaaagagaagcccgaaacaaactttccctcgcctttcacgaatatcctttgcggcattatattcgtggaaagaagatacactgctgtggttcttaaccggctgatcaaagaagccggtaagcaggacccagaactggcttacatttcgagcaactttatcacggggcacggaattgggaagaatcaaccacgcaataagcaaatggaggcagaattcaggaagcaagaggaagtcctcagaaaatttcgcgctcacgaaaccaatctcttaatcgctacctcaatcgttgaggagggagtagatatcccaaagtgcaatttggtggtgcggtttgatctccctaccgagtatcgctcatatgttcagagtaagggaagagctcgtgctccaatatccaactacattatgctagccgacactgacaagataaagagcttcgaggaagacctgaagacatataaagctatagagaagattctgcgaaacaaatgttccaaatctgtcgatactggggagacggacattgaccccgtgatggatgatgatgatgttttccccccttacgtgctgcggccagatgatggcggaccacgcgttaccatcaataccgccatcgggcacatcaaccgctactgcgccagattacctagcgacccatttacccacctcgccccaaagtgccgcacaagggaattgcccgacggcaccttctacagtacactgtatctgcctatcaactccccactaagggcttccatcgttggcccacctatgtcatgcgtgagactggctgaacgtgtggtggccctcatctgttgcgagaagctccataagatcggcgaactggatgatcacctcatgcccgtgggaaaagagacagtgaaatatgaagaggagttggacctacatgatgaggaagagaccagcgtgcctgggagacccggttctacgaagcgccgacagtgttaccccaaagccatcccagaatgcttacgggatagttaccctcgcccagaccagccgtgttatctgtatgtaataggcatggtgctcaccacccctctgcccgatgaactgaacttcagacggaggaagctgtacccaccagaagacacgacgcgctgttttggcatcctcaccgccaagccaattccgcagattccacacttccccgtctataccagaagcggagaggtgacgattagcatagaactgaagaagagcggattcatgcttagcctacagatgttggagttgataacacgcctgcatcagtatatattctcccatatcctcaggctcgaaaagccagctttggagtttaaacccactgacgccgatagcgcttattgcgtgctccctcttaatgtggtcaatgacagctccactcttgacatagacttcaaatttatggaagatattgagaaaagcgaagcccgtatcgggattcctagcacgaagtatactaaagagacaccatttgtgttcaaattagaggattatcaggatgctgtgattatcccccgatacagaaatttcgatcagccgcatcggttctacgtagctgacgtgtacactgacctgacacccttgtccaagtttccatccccggaatacgaaacgtttgctgagtattataagacgaaatataacctagatctcaccaacctcaaccaaccattactcgatgtggatcacacctctagccgcctgaacttgctgaccccaaggcacctgaatcagaagggtaaggcgctcccactgagcagcgccgagaaacggaaggctaagtgggagtccctccagaataagcagattttggtacctgaattgtgcgccatccatcctatcccggcaagcctttggagaaaagcagtctgcctgcctagcattctctaccggctacattgcctactgacagctgaggaactgagggcccagactgcttccgatgcaggcgtgggcgtccggtcgctcccagccgattttagatatcccaacctggactttggttggaaaaaatccatcgacagtaagtcctttatctctatttcaaatagctcgtccgcagagaatgataattactgtaaacacagtaccatcgttcctgagaatgccgctcaccaaggagctaaccgtacaagcagtctcgaaaaccatgaccagatgagcgtgaactgcagaactctactcagcgagagccctggaaaactgcacgtggaagtctctgcggatctcactgccatcaatggactgtcgtacaaccagaacttagcgaatggttcctatgacttagccaatcgagacttttgtcagggaaaccagcttaattactacaaacaggagattccagttcagccgactacatcatattccatccagaatctgtattcctacgaaaaccagccacagccctccgacgaatgtactctgctgagtaacaagtatttggatggcaacgccaataagagtacctccgacggcagcccagtaatggctgtgatgcccggtaccacggatacaattcaggtgctgaagggccgtatggactctgaacaatccccaagcattgggtacagttctcgtacactgggtcccaatccgggactgattctgcaggcactcaccttaagcaacgcctccgatggattcaatcttgagcggcttgagatgcttggggattcgttccttaagcacgccatcacgacctacttgttctgtacttatcctgacgcccatgaaggaagactgtcgtatatgcggagtaagaaagtgtcaaattgtaacctgtacagactgggtaaaaagaaggggctgccgagccggatggtcgtcagcatctttgatccacctgtcaattggctgcccccaggatatgtggtcaaccaggacaaaagcaacaccgacaaatgggaaaaggatgagatgacgaaagactgtatgctggcgaatggcaagctagacgaggattatgaggaagaggacgaggaggaagaatcactgatgtggagagctcccaaggaggaggctgattatgaggacgattttttagagtacgatcaagagcatatccgctttatcgataatatgctcatggggtccggtgcatttgtcaagaagatcagcctcagtcctttctccaccactgattccgcctatgaatggaaaatgccaaaaaaatcctcgctcggctccatgccctttagctccgacttcgaggattttgactattcatcctgggatgccatgtgctatctcgatccttctaaggccgttgaagaagacgattttgttgtagggttttggaacccctctgaggagaactgcggcgttgatacaggtaagcagtccattagttacgatcttcacactgagcagtgtatcgccgacaagtctattgcggattgcgtcgaggcgctgttggggtgttatttgaccagttgtggggaaagagcagctcagctcttcctctgttctctcggtttgaaggttcttccggtaatcaagaggacagaccgcgagaaggcgctgtgtccgacccgcgaaaatttcaattcccagcagaagaatctgtctgtgagttgcgcagccgctagtgtggcatcctcacgatcctctgtgctgaaggactcagagtatgggtgtctgaaaattcctccccgatgtatgtttgaccatcctgacgctgacaagactctgaatcacctcatcagcggttttgaaaactttgagaagaaaatcaactatagattcaaaaataaagcgtacctgttacaagcttttacacacgcgagttaccactacaacacaataactgattgctatcagcgcctggagtttctgggagatgcgatcttagactacttgataactaaacacctctatgaggatcccagacagcattcccccggagtgcttacggatctgaggtctgctctggtgaacaatacaatcttcgcctctctggccgtgaagtatgactaccacaaatatttcaaggccgtgagtcccgaactgttccacgtgatcgatgacttcgtgcagtttcagttagagaagaatgagatgcaggggatggactctgagctgaggagatctgaggaggatgaggagaaggaagaggacattgaggtcccgaaggcaatgggagatatcttcgaaagcctcgctggtgccatctacatggacagtggcatgtctctcgagactgtctggcaggtgtactacccgatgatgcgacccctcattgagaagttctccgctaatgtgcccagatccccagtgagagaactgcttgaaatggagccggaaactgctaagttcagtcctgcagaacggacatacgatggaaaagtccgggtgaccgtcgaagtcgtgggcaaaggcaagtttaagggcgtgggcagatcgtaccgcatcgctaagagcgcggctgctagacgcgctctgcggtcactaaaagccaaccagcctcaggtccctaattcata

SEQ ID NO: 109843 - DNA, 5768 bp, Artificial Sequence
  derived and/or modified sequence
atgaagtcacctgcacttcagccactgagtatggccggactgcagctgatgactcctgcctccagtccgatgggccctttttttggtctaccctggcagcaggaagctattcacgataacatttacacccctaggaaatatcaggttgagcttttggaagccgcacttgaccacaacactattgtctgcttaaatacagggtcaggcaagacgttcattgccgtgctgttgaccaaagagctgtcttaccaaattcgcggagatttttcacggaatggaaaacgcaccgttttcctggtcaatagcgccaaccaagtcgctcagcaggtgtcagctgtacgaactcattccgacttgaaggttggtgagtactctaacctcgaagtgaacgcttcttggaccaaagaacgatggaatcaggagttcactaaacatcaggtgctcattatgacctgttatgttgccttaaatgtcctcaagaacggatacctcagcttgtctgacattaacttactggtattcgacgagtgccacctggccatcctcgaccacccataccgggagattatgaagttgtgcgaaaattgcccatcatgcccgagaatccttggcctaactgctagcatattgaatggcaagtgtgatccagaggagctggaagagaagatccaaaagctcgagaaaatcctcaagtccaacgctgagaccgcaacggatctggtggtgctagataggtacacctctcagccctgcgagatcgtggttgactgcggtcctttcaccgaccggtcaggcctatacgagcgcctgctcatggagctggaggaggcgcttaactttattaatgactgcaacatctctgtccactctaaagagcgcgattccacactcataagtaagcagattctttctgattgtcgtgcggttttggtcgttctcgggccatggtgcgcggacaaggtggctggaatgatggtcagggaactccaaaaatacattaaacatgaacaagaagaactccaccggaagtttctccttttcacagacacatttctgagaaagattcatgccctgtgtgaagaacacttttcccctgcttctctcgatcttaagtttgtgacaccaaaggtcatcaaactgctggagattctccgtaagtacaagccatatgagagacagcagttcgagtcggtggagtggtacaacaatcgaaatcaagataactacgtgagttggtctgatagcgaggatgatgatgaagatgaggaaatcgaggaaaaggaaaaacctgagactaacttcccttcgcctttcactaacatcctctgtgggatcatttttgttgaacgccgttacacggcggtggtgctcaatcgactgattaaggaggctgggaagcaagaccccgagctagcctacatcagttcgaattttataacaggccatggaatagggaagaatcaacccaggaacaaacagatggaagcagaatttaggaaacaggaggaagtcctacgcaagttcagagctcatgaaaccaatcttctaatagccactagcattgttgaagaaggagtcgacattccgaagtgcaatcttgtcgtcaggtttgacctgcctaccgagtataggtcgtacgtgcagagcaaaggacgcgctagagcacctatctccaattatatcatgctggctgacaccgacaaaattaagtcctttgaggaggacctgaaaacctataaggccattgaaaagattttacgcaataagtgttcaaaatccgttgataccggggagactgacatcgatcctgtgatggatgacgacgatgtgttccccccatacgtcctgaggcccgacgacggcggaccccgagtcactataaatacagctatcggccacatcaacaggtattgcgctcggctaccatctgacccctttactcatctcgccccaaagtgcagaaccagggaactcccagacggaacattttatagcacactttatctgcccatcaattcccccctacgggcttctattgtaggccctccaatgagctgcgtacgactggccgaacgcgtggtggccctgatctgctgcgaaaaactccataagatcggtgaacttgacgatcatttaatgccagtgggtaaggagaccgtgaaatatgaagaggaactggatctgcatgacgaggaagagacatctgtgcccggaaggcccggttctacgaagcgacgccagtgttaccctaaggctattcctgaatgcttaagggactcctaccctcggccagatcagccctgttatctgtacgtaataggaatggttctgacaacccccctgcccgatgagctaaacttccggagaaggaagctttacccaccagaagacactacccggtgttttggtattctgaccgccaagcctatccctcagattcctcatttcccggtttacacgcgctctggtgaagtgacaattagtattgagctcaaaaagtcaggtttcatgttaagcctgcaaatgttagagcttattacccgcctgcaccagtacatcttctcccatatcctgagactggaaaagccagctctggagttcaagcctactgatgccgactcagcctactgcgtgttacccctaaacgtggtgaatgatagctctacactcgacatcgattttaagtttatggaagacattgaaaagagtgaggcgcgtattgggattccaagcacaaagtacacgaaggagactccatttgtgtttaaacttgaggattatcaagatgccgtgatcattccgaggtaccgaaattttgaccagccccacagattctacgtcgcagacgtctatactgacctcaccccactttccaaatttccatcccctgaatacgaaaccttcgctgagtattacaagaccaaatataacctggatctaaccaaccttaatcagcctctcctggacgtggaccatacatcctcccggctcaacctcctgaccccaaggcaccttaatcaaaaaggcaaagctcttcccctcagcagcgctgaaaaacgcaaagccaaatgggagtccctgcagaataagcagatcctcgtgcctgagctgtgcgccatccatcctataccggcatcactgtggcgcaaggccgtttgtcttcccagtattctgtacaggcttcattgtctcctcaccgcagaagagttgagagcgcagactgcgagcgatgctggagtcggtgtgagaagcttaccagcggattttcggtaccctaacctcgatttcggttggaagaaaagcattgacagcaagtcctttattagcatttccaactcttcgtccgcagagaatgataattactgcaaacatagcaccatcgttcccgaaaatgcagcgcaccagggggcaaacagaacgtcatcgttggagaaccacgatcagatgtcagttaactgtcggaccttgctcagtgagagtcctggcaagcttcacgtcgaggtttcagccgacctaaccgcaatcaatgggctgtcttataatcaaaatttggcgaatggaagttacgatctcgcgaatcgagatttttgtcaaggtaaccagctcaactactataagcaggagattccagtgcagcctacaactagctattctatccagaacctctacagctacgaaaaccagccgcagccttccgatgagtgtacactgctgagtaacaaatacctggatgggaatgctaataaatcaacatctgacggatcaccggtcatggcagtgatgcccggaacaacagacaccattcaagtgctgaaaggcagaatggactcagagcaaagcccaagcatcggctattcctcacgcacccttggacccaatccaggtttgattttgcaggccctgaccctgagcaacgccagcgacggttttaacctagaaaggctcgaaatgctcggtgactcctttctgaagcacgccatcacaacctacctattctgcacgtaccctgacgctcacgaaggcagattaagttacatgagatctaagaaggtgtccaactgcaatttgtaccgcctggggaagaaaaagggactaccatcaagaatggttgtgagcatcttcgacccaccagttaattggctaccccctggatacgttgtgaatcaggacaagagcaataccgacaaatgggagaaggatgaaatgactaaagactgtatgctggctaatggaaagctagacgaggactatgaagaagaagatgaagaagaagagtcactgatgtggcgagcaccaaaggaagaggcagattacgaggacgattttctagaatatgaccaggaacatattcgcttcattgacaacatgctcatgggaagtggggcatttgttaaaaagattagcctgtcccctttttccaccacagatagcgcttacgaatggaaaatgcctaagaagtcttcactggggtccatgcctttctctagcgatttcgaggacttcgattacagttcgtgggacgccatgtgctacctggacccaagcaaggccgttgaagaagacgacttcgtcgttggcttttggaatccgtcagaagagaattgtggcgttgataccggcaaacaatctatttcctacgatcttcacactgagcagtgtatcgctgataaatcaatcgccgattgtgtggaggccctgctcggttgctacctgactagttgcggcgagcgtgccgctcaacttttcctttgctcactgggcctgaaggttttacccgtgattaagcggaccgatagagagaaggccctgtgtcccacacgtgaaaacttcaactcccagcaaaagaatctgtcagttagttgcgctgccgcaagcgtggcaagcagccgttcttcggtgttgaaagatagtgaatacggttgtctgaagatccctcccaggtgtatgtttgaccatcccgacgcagacaagacactgaatcatttaattagcgggtttgagaattttgagaagaaaattaactatcggttcaaaaataaggcgtatctattacaggccttcacgcatgctagttatcactataacacaattaccgattgctaccagcgactggaattcctgggggatgcgattctcgattacttgataactaagcatctgtatgaggaccctcggcagcattcccccggagttctgaccgatctgcgtagcgcacttgtaaacaacactatttttgcgtctttggctgtaaagtatgattaccacaaatacttcaaggccgtgagccccgagttatttcacgtgatcgacgatttcgtgcaattccagctggaaaagaatgaaatgcagggaatggatagcgagttaagacggtcagaagaggatgaggaaaaggaagaggacattgaggtacctaaagccatgggagacatctttgaatctctagccggtgcaatctatatggactccggtatgtctttggagaccgtgtggcaagtgtactatccaatgatgaggcccctgattgaaaaattttctgccaacgtcccgagatctcccgtacgggaactactcgagatggaacctgagacagccaaattctcccccgctgaacggacctacgacggtaaagttcgagtgactgtagaagtggtcggcaaggggaagttcaaaggggtcggaagaagctaccgcatcgcgaaatcagcagctgcccgtcgtgcactcagatcactgaaggcaaaccaaccccaggtccccaacagtta

SEQ ID NO: 109844 - DNA, 213 bp, Artificial Sequence
  derived and/or modified sequence
atgaaatccccagccctccaacccctaagcatggctgggctgcagttgatgacccctgcttcctccccaatgggtcccttcttcggactgccgtggcagcaggaagccattcacgacaacatctataccccacggaagtaccaggtcgaactcctggaggcagctctagatcacaatacaattgtctgtctcaacaccggttccgggaaatag

SEQ ID NO: 109845 - DNA, 213 bp, Artificial Sequence
  derived and/or modified sequence
atgaaatcccctgccctacaacccctgagcatggcgggactgcagctgatgactcctgcgtcttctccaatgggtcctttttttggtctgccgtggcaacaggaggccattcatgacaatatttacacaccgaggaagtaccaagtggagctcctggaggccgctctggatcacaacacgattgtgtgtcttaataccggatctggtaaatag

SEQ ID NO: 109846 - DNA, 2463 bp, Artificial Sequence
  derived and/or modified sequence
atgctcgcttgggaatctgaccactttctgagaatcctcgctgaaaacgataactactgtaaacatagcacgatcgtcccagagaatgcagcccatcagggcgcaaatagaacttcctccctggagaaccacgaccagatgagcgtgaattgccggacactcctcagcgagtctcctgggaaattgcacgtagaagtgagtgccgatcttactgctattaacggcctgtcatacaatcaaaatttagcaaatggctcttatgatctggctaatcgtgacttttgtcagggcaatcagttgaactactataaacaggaaataccagtgcagcctacaacttcatattcaattcagaacctgtacagctatgagaatcagccccagcctagtgacgagtgcacccttctaagcaacaagtaccttgacggaaatgcgaacaagtccacgagtgatggatctcccgttatggctgtgatgccagggaccaccgacacaatccaagttctgaagggtcggatggatagtgaacaaagtccctccataggatactcatcaaggaccctggggccaaatcctggcctgattcttcaagcgcttacactgtctaacgctagcgatgggttcaacctcgaaaggctggaaatgctgggggactcatttctgaagcacgccatcaccacgtatctgttctgtacttatccggatgctcacgagggcaggctgtcttacatgcgctctaaaaaggtctctaactgcaacctgtataggctgggaaaaaaaaagggcttgccctctcgaatggtcgtctccatctttgatcctccagtaaattggctgcccccaggttacgtggtcaatcaggacaagagtaacaccgacaagtgggagaaggatgagatgacgaaagattgcatgttggctaatggaaaactagatgaggactacgaggaggaagacgaagaggaggagtccctcatgtggagagctccaaaggaggaggctgactatgaggatgatttcttggagtacgaccaagaacacatacggtttatcgacaatatgctcatggggagtggcgctttcgttaaaaaaatcagccttagtccgttttccaccactgactcggcttacgagtggaagatgcccaagaaatcctcccttggctcaatgcccttttcgagcgatttcgaggacttcgattatagttcttgggacgccatgtgctatctagatccttccaaggccgtagaagaagacgatttcgtagtggggttttggaatccatcagaggagaattgtggggtggacaccggcaaacagagtattagttatgatcttcacaccgagcaatgtatcgccgacaaatccatcgccgattgtgtcgaggcactgctgggctgctacctgacgagttgtggagagcgtgctgcccagttgttcctatgcagcttaggactcaaagttctccctgtgattaaaaggacagaccgcgaaaaggcgctgtgccccacccgcgaaaatttcaactctcaacagaaaaacctgtcagtgagttgcgctgctgcatcggttgccagcagtagaagtagtgtgctgaaggactccgaatacgggtgcctgaagatccctccccgttgtatgtttgatcacccagatgcagataaaacccttaaccaccttatctcaggcttcgaaaatttcgaaaagaagatcaattatcgctttaagaacaaggcttacctgttacaggcgttcacccacgcttcatatcactacaatacaatcaccgactgctaccagcgactcgagttcctgggcgacgccattcttgactatctgataaccaaacatctgtatgaggatcctagacaacatagcccaggtgtccttacagacctccggtcagcactggtgaataacaccatcttcgccagcctcgctgtgaaatacgactaccacaaatacttcaaggccgtgtcaccagagctgttccatgtcatcgacgacttcgtgcagtttcagctggagaagaatgagatgcaagggatggatagcgagctgaggcgatcagaggaagacgaggagaaggaggaggatattgaagttccaaaggctatgggtgacattttcgagtccctggcaggagctatctacatggacagcggcatgtccctggagacagtgtggcaagtgtactaccctatgatgcgcccactcatcgagaagttctctgccaatgtgcctaggtctcccgtacgagaactgctagagatggaacctgagactgccaaattctcgcctgccgaaaggacttacgacggaaaggtcagggtcacggtggaggtggtgggcaagggtaagttcaagggtgtcggccgttcttatagaattgcaaaatcggccgcagctcgaagggccctccgctcgctcaaggccaatcagccgcaggtgcctaacagctag

SEQ ID NO: 109847 - DNA, 5769 bp, Artificial Sequence
  derived and/or modified sequence
atgaagagccccgccctgcagcccctgagcatggccggcctgcagctgatgacccccgccagcagccccatgggccccttcttcggcctgccctggcagcaggaggccatccacgacaacatctacacccccagaaagtaccaggtggagctgctggaggccgccctggaccacaacaccatcgtgtgcctgaacaccggcagcggcaagaccttcatcgccgtgctgctgaccaaggagctgagctaccagatcagaggcgacttcagcagaaacggcaagagaaccgtgttcctggtgaacagcgccaaccaggtggcccagcaggtgagcgccgtgagaacccacagcgacctgaaggtgggcgagtacagcaacctggaggtgaacgccagctggaccaaggagagatggaaccaggagttcaccaagcaccaggtgctgatcatgacctgctacgtggccctgaacgtgctgaagaacggctacctgagcctgagcgacatcaacctgctggtgttcgacgagtgccacctggccatcctggaccacccctacagagagatcatgaagctgtgcgagaactgccccagctgccccagaatcctgggcctgaccgccagcatcctgaacggcaagtgcgaccccgaggagctggaggagaagatccagaagctggagaagatcctgaagagcaacgccgagaccgccaccgacctggtggtgctggacagatacaccagccagccctgcgagatcgtggtggactgcggccccttcaccgacagaagcggcctgtacgagagactgctgatggagctggaggaggccctgaacttcatcaacgactgcaacatcagcgtgcacagcaaggagagagacagcaccctgatcagcaagcagatcctgagcgactgcagagccgtgctggtggtgctgggcccctggtgcgccgacaaggtggccggcatgatggtgagagagctgcagaagtacatcaagcacgagcaggaggagctgcacagaaagttcctgctgttcaccgacaccttcctgagaaagatccacgccctgtgcgaggagcacttcagccccgccagcctggacctgaagttcgtgacccccaaggtgatcaagctgctggagatcctgagaaagtacaagccctacgagagacagcagttcgagagcgtggagtggtacaacaacagaaaccaggacaactacgtgagctggagcgacagcgaggacgacgacgaggacgaggagatcgaggagaaggagaagcccgagaccaacttccccagccccttcaccaacatcctgtgcggcatcatcttcgtggagagaagatacaccgccgtggtgctgaacagactgatcaaggaggccggcaagcaggaccccgagctggcctacatcagcagcaacttcatcaccggccacggcatcggcaagaaccagcccagaaacaagcagatggaggccgagttcagaaagcaggaggaggtgctgagaaagttcagagcccacgagaccaacctgctgatcgccaccagcatcgtggaggagggcgtggacatccccaagtgcaacctggtggtgagattcgacctgcccaccgagtacagaagctacgtgcagagcaagggcagagccagagcccccatcagcaactacatcatgctggccgacaccgacaagatcaagagcttcgaggaggacctgaagacctacaaggccatcgagaagatcctgagaaacaagtgcagcaagagcgtggacaccggcgagaccgacatcgaccccgtgatggacgacgacgacgtgttccccccctacgtgctgagacccgacgacggcggccccagagtgaccatcaacaccgccatcggccacatcaacagatactgcgccagactgcccagcgaccccttcacccacctggcccccaagtgcagaaccagagagctgcccgacggcaccttctacagcaccctgtacctgcccatcaacagccccctgagagccagcatcgtgggcccccccatgagctgcgtgagactggccgagagagtggtggccctgatctgctgcgagaagctgcacaagatcggcgagctggacgaccacctgatgcccgtgggcaaggagaccgtgaagtacgaggaggagctggacctgcacgacgaggaggagaccagcgtgcccggcagacccggcagcaccaagagaagacagtgctaccccaaggccatccccgagtgcctgagagacagctaccccagacccgaccagccctgctacctgtacgtgatcggcatggtgctgaccacccccctgcccgacgagctgaacttcagaagaagaaagctgtacccccccgaggacaccaccagatgcttcggcatcctgaccgccaagcccatcccccagatcccccacttccccgtgtacaccagaagcggcgaggtgaccatcagcatcgagctgaagaagagcggcttcatgctgagcctgcagatgctggagctgatcaccagactgcaccagtacatcttcagccacatcctgagactggagaagcccgccctggagttcaagcccaccgacgccgacagcgcctactgcgtgctgcccctgaacgtggtgaacgacagcagcaccctggacatcgacttcaagttcatggaggacatcgagaagagcgaggccagaatcggcatccccagcaccaagtacaccaaggagacccccttcgtgttcaagctggaggactaccaggacgccgtgatcatccccagatacagaaacttcgaccagccccacagattctacgtggccgacgtgtacaccgacctgacccccctgagcaagttccccagccccgagtacgagaccttcgccgagtactacaagaccaagtacaacctggacctgaccaacctgaaccagcccctgctggacgtggaccacaccagcagcagactgaacctgctgacccccagacacctgaaccagaagggcaaggccctgcccctgagcagcgccgagaagagaaaggccaagtgggagagcctgcagaacaagcagatcctggtgcccgagctgtgcgccatccaccccatccccgccagcctgtggagaaaggccgtgtgcctgcccagcatcctgtacagactgcactgcctgctgaccgccgaggagctgagagcccagaccgccagcgacgccggcgtgggcgtgagaagcctgcccgccgacttcagataccccaacctggacttcggctggaagaagagcatcgacagcaagagcttcatcagcatcagcaacagcagcagcgccgagaacgacaactactgcaagcacagcaccatcgtgcccgagaacgccgcccaccagggcgccaacagaaccagcagcctggagaaccacgaccagatgagcgtgaactgcagaaccctgctgagcgagagccccggcaagctgcacgtggaggtgagcgccgacctgaccgccatcaacggcctgagctacaaccagaacctggccaacggcagctacgacctggccaacagagacttctgccagggcaaccagctgaactactacaagcaggagatccccgtgcagcccaccaccagctacagcatccagaacctgtacagctacgagaaccagccccagcccagcgacgagtgcaccctgctgagcaacaagtacctggacggcaacgccaacaagagcaccagcgacggcagccccgtgatggccgtgatgcccggcaccaccgacaccatccaggtgctgaagggcagaatggacagcgagcagagccccagcatcggctacagcagcagaaccctgggccccaaccccggcctgatcctgcaggccctgaccctgagcaacgccagcgacggcttcaacctggagagactggagatgctgggcgacagcttcctgaagcacgccatcaccacctacctgttctgcacctaccccgacgcccacgagggcagactgagctacatgagaagcaagaaggtgagcaactgcaacctgtacagactgggcaagaagaagggcctgcccagcagaatggtggtgagcatcttcgacccccccgtgaactggctgccccccggctacgtggtgaaccaggacaagagcaacaccgacaagtgggagaaggacgagatgaccaaggactgcatgctggccaacggcaagctggacgaggactacgaggaggaggacgaggaggaggagagcctgatgtggagagcccccaaggaggaggccgactacgaggacgacttcctggagtacgaccaggagcacatcagattcatcgacaacatgctgatgggcagcggcgccttcgtgaagaagatcagcctgagccccttcagcaccaccgacagcgcctacgagtggaagatgcccaagaagagcagcctgggcagcatgcccttcagcagcgacttcgaggacttcgactacagcagctgggacgccatgtgctacctggaccccagcaaggccgtggaggaggacgacttcgtggtgggcttctggaaccccagcgaggagaactgcggcgtggacaccggcaagcagagcatcagctacgacctgcacaccgagcagtgcatcgccgacaagagcatcgccgactgcgtggaggccctgctgggctgctacctgaccagctgcggcgagagagccgcccagctgttcctgtgcagcctgggcctgaaggtgctgcccgtgatcaagagaaccgacagagagaaggccctgtgccccaccagagagaacttcaacagccagcagaagaacctgagcgtgagctgcgccgccgccagcgtggccagcagcagaagcagcgtgctgaaggacagcgagtacggctgcctgaagatcccccccagatgcatgttcgaccaccccgacgccgacaagaccctgaaccacctgatcagcggcttcgagaacttcgagaagaagatcaactacagattcaagaacaaggcctacctgctgcaggccttcacccacgccagctaccactacaacaccatcaccgactgctaccagagactggagttcctgggcgacgccatcctggactacctgatcaccaagcacctgtacgaggaccccagacagcacagccccggcgtgctgaccgacctgagaagcgccctggtgaacaacaccatcttcgccagcctggccgtgaagtacgactaccacaagtacttcaaggccgtgagccccgagctgttccacgtgatcgacgacttcgtgcagttccagctggagaagaacgagatgcagggcatggacagcgagctgagaagaagcgaggaggacgaggagaaggaggaggacatcgaggtgcccaaggccatgggcgacatcttcgagagcctggccggcgccatctacatggacagcggcatgagcctggagaccgtgtggcaggtgtactaccccatgatgagacccctgatcgagaagttcagcgccaacgtgcccagaagccccgtgagagagctgctggagatggagcccgagaccgccaagttcagccccgccgagagaacctacgacggcaaggtgagagtgaccgtggaggtggtgggcaagggcaagttcaagggcgtgggcagaagctacagaatcgccaagagcgccgccgccagaagagccctgagaagcctgaaggccaaccagccccaggtgcccaacagctag

SEQ ID NO: 109848 - DNA, 213 bp, Artificial Sequence
  derived and/or modified sequence
atgaagagccccgccctgcagcccctgagcatggccggcctgcagctgatgacccccgccagcagccccatgggccccttcttcggcctgccctggcagcaggaggccatccacgacaacatctacacccccagaaagtaccaggtggagctgctggaggccgccctggaccacaacaccatcgtgtgcctgaacaccggcagcggcaagtag

SEQ ID NO: 109849 - DNA, 2463 bp, Artificial Sequence
  derived and/or modified sequence
atgctggcctgggagagcgaccacttcctgagaatcctggccgagaacgacaactactgcaagcacagcaccatcgtgcccgagaacgccgcccaccagggcgccaacagaaccagcagcctggagaaccacgaccagatgagcgtgaactgcagaaccctgctgagcgagagccccggcaagctgcacgtggaggtgagcgccgacctgaccgccatcaacggcctgagctacaaccagaacctggccaacggcagctacgacctggccaacagagacttctgccagggcaaccagctgaactactacaagcaggagatccccgtgcagcccaccaccagctacagcatccagaacctgtacagctacgagaaccagccccagcccagcgacgagtgcaccctgctgagcaacaagtacctggacggcaacgccaacaagagcaccagcgacggcagccccgtgatggccgtgatgcccggcaccaccgacaccatccaggtgctgaagggcagaatggacagcgagcagagccccagcatcggctacagcagcagaaccctgggccccaaccccggcctgatcctgcaggccctgaccctgagcaacgccagcgacggcttcaacctggagagactggagatgctgggcgacagcttcctgaagcacgccatcaccacctacctgttctgcacctaccccgacgcccacgagggcagactgagctacatgagaagcaagaaggtgagcaactgcaacctgtacagactgggcaagaagaagggcctgcccagcagaatggtggtgagcatcttcgacccccccgtgaactggctgccccccggctacgtggtgaaccaggacaagagcaacaccgacaagtgggagaaggacgagatgaccaaggactgcatgctggccaacggcaagctggacgaggactacgaggaggaggacgaggaggaggagagcctgatgtggagagcccccaaggaggaggccgactacgaggacgacttcctggagtacgaccaggagcacatcagattcatcgacaacatgctgatgggcagcggcgccttcgtgaagaagatcagcctgagccccttcagcaccaccgacagcgcctacgagtggaagatgcccaagaagagcagcctgggcagcatgcccttcagcagcgacttcgaggacttcgactacagcagctgggacgccatgtgctacctggaccccagcaaggccgtggaggaggacgacttcgtggtgggcttctggaaccccagcgaggagaactgcggcgtggacaccggcaagcagagcatcagctacgacctgcacaccgagcagtgcatcgccgacaagagcatcgccgactgcgtggaggccctgctgggctgctacctgaccagctgcggcgagagagccgcccagctgttcctgtgcagcctgggcctgaaggtgctgcccgtgatcaagagaaccgacagagagaaggccctgtgccccaccagagagaacttcaacagccagcagaagaacctgagcgtgagctgcgccgccgccagcgtggccagcagcagaagcagcgtgctgaaggacagcgagtacggctgcctgaagatcccccccagatgcatgttcgaccaccccgacgccgacaagaccctgaaccacctgatcagcggcttcgagaacttcgagaagaagatcaactacagattcaagaacaaggcctacctgctgcaggccttcacccacgccagctaccactacaacaccatcaccgactgctaccagagactggagttcctgggcgacgccatcctggactacctgatcaccaagcacctgtacgaggaccccagacagcacagccccggcgtgctgaccgacctgagaagcgccctggtgaacaacaccatcttcgccagcctggccgtgaagtacgactaccacaagtacttcaaggccgtgagccccgagctgttccacgtgatcgacgacttcgtgcagttccagctggagaagaacgagatgcagggcatggacagcgagctgagaagaagcgaggaggacgaggagaaggaggaggacatcgaggtgcccaaggccatgggcgacatcttcgagagcctggccggcgccatctacatggacagcggcatgagcctggagaccgtgtggcaggtgtactaccccatgatgagacccctgatcgagaagttcagcgccaacgtgcccagaagccccgtgagagagctgctggagatggagcccgagaccgccaagttcagccccgccgagagaacctacgacggcaaggtgagagtgaccgtggaggtggtgggcaagggcaagttcaagggcgtgggcagaagctacagaatcgccaagagcgccgccgccagaagagccctgagaagcctgaaggccaaccagccccaggtgcccaacagctag

SEQ ID NO: 109850 - DNA, 10277 bp, Artificial Sequence
  derived and/or modified sequence
cggaggcgcggcgcaggctgctgcaggcccaggtgaatggagtaacctgacagcggggacgaggcgacggcgagcgcgaggaaatggcggcgggggcggcggcgccgggcggctccgggaggcctgggctgtgacgcgcgcgccggagcggggtccgatggttctcgaaggcccgcggcgccccgtgctgcagtaagctgtgctagaacaaaaatgcaatgaaagaaacactggatgaatgaaaagccctgctttgcaacccctcagcatggcaggcctgcagctcatgacccctgcttcctcaccaatgggtcctttctttggactgccatggcaacaagaagcaattcatgataacatttatacgccaagaaaatatcaggttgaactgcttgaagcagctctggatcataataccatcgtctgtttaaacactggctcagggaagacatttattgcagtactactcactaaagagctgtcctatcagatcaggggagacttcagcagaaatggaaaaaggacggtgttcttggtcaactctgcaaaccaggttgctcaacaagtgtcagctgtcagaactcattcagatctcaaggttggggaatactcaaacctagaagtaaatgcatcttggacaaaagagagatggaaccaagagtttactaagcaccaggttctcattatgacttgctatgtcgccttgaatgttttgaaaaatggttacttatcactgtcagacattaaccttttggtgtttgatgagtgtcatcttgcaatcctagaccacccctatcgagaaattatgaagctctgtgaaaattgtccatcatgtcctcgcattttgggactaactgcttccattttaaatgggaaatgtgatccagaggaattggaagaaaagattcagaaactagagaaaattcttaagagtaatgctgaaactgcaactgacctggtggtcttagacaggtatacttctcagccatgtgagattgtggtggattgtggaccatttactgacagaagtgggctttatgaaagactgctgatggaattagaagaagcacttaattttatcaatgattgtaatatatctgtacattcaaaagaaagagattctactttaatttcgaaacagatactatcagactgtcgtgccgtattggtagttctgggaccctggtgtgcagataaagtagctggaatgatggtaagagaactacagaaatacatcaaacatgagcaagaggagctgcacaggaaatttttattgtttacagacactttcctaaggaaaatacatgcactatgtgaagagcacttctcacctgcctcacttgacctgaaatttgtaactcctaaagtaatcaaactgctcgaaatcttacgcaaatataaaccatatgagcgacagcagtttgaaagcgttgagtggtataataatagaaatcaggataattatgtgtcatggagtgattctgaggatgatgatgaggatgaagaaattgaagaaaaagagaagccagagacaaattttccttctccttttaccaacattttgtgcggaattatttttgtggaaagaagatacacagcagttgtcttaaacagattgataaaggaagctggcaaacaagatccagagctggcttatatcagtagcaatttcataactggacatggcattgggaagaatcagcctcgcaacaaacagatggaagcagaattcagaaaacaggaagaggtacttaggaaatttcgagcacatgagaccaacctgcttattgcaacaagtattgtagaagagggtgttgatataccaaaatgcaacttggtggttcgttttgatttgcccacagaatatcgatcctatgttcaatctaaaggaagagcaagggcacccatctctaattatataatgttagcggatacagacaaaataaaaagttttgaagaagaccttaaaacctacaaagctattgaaaagatcttgagaaacaagtgttccaagtcggttgatactggtgagactgacattgatcctgtcatggatgatgatgacgttttcccaccatatgtgttgaggcctgacgatggtggtccacgagtcacaatcaacacggccattggacacatcaatagatactgtgctagattaccaagtgatccgtttactcatctagctcctaaatgcagaacccgagagttgcctgatggtacattttattcaactctttatctgccaattaactcacctcttcgagcctccattgttggtccaccaatgagctgtgtacgattggctgaaagagttgtagctctcatttgctgtgagaaactgcacaaaattggcgaactggatgaccatttgatgccagttgggaaagagactgttaaatatgaagaggagcttgatttgcatgatgaagaagagaccagtgttccaggaagaccaggttccacgaaacgaaggcagtgctacccaaaagcaattccagagtgtttgagggatagttatcccagacctgatcagccctgttacctgtatgtgataggaatggttttaactacacctttacctgatgaactcaactttagaaggcggaagctctatcctcctgaagataccacaagatgctttggaatactgacggccaaacccatacctcagattccacactttcctgtgtacacacgctctggagaggttaccatatccattgagttgaagaagtctggtttcatgttgtctctacaaatgcttgagttgattacaagacttcaccagtatatattctcacatattcttcggcttgaaaaacctgcactagaatttaaacctacagacgctgattcagcatactgtgttctacctcttaatgttgttaatgactccagcactttggatattgactttaaattcatggaagatattgagaagtctgaagctcgcataggcattcccagtacaaagtatacaaaagaaacaccctttgtttttaaattagaagattaccaagatgccgttatcattccaagatatcgcaattttgatcagcctcatcgattttatgtagctgatgtgtacactgatcttaccccactcagtaaatttccttcccctgagtatgaaacttttgcagaatattataaaacaaagtacaaccttgacctaaccaatctcaaccagccactgctggatgtggaccacacatcttcaagacttaatcttttgacacctcgacatttgaatcagaaggggaaagcgcttcctttaagcagtgctgagaagaggaaagccaaatgggaaagtctgcagaataaacagatactggttccagaactctgtgctatacatccaattccagcatcactgtggagaaaagctgtttgtctccccagcatactttatcgccttcactgccttttgactgcagaggagctaagagcccagactgccagcgatgctggcgtgggagtcagatcacttcctgcggattttagataccctaacttagacttcgggtggaaaaaatctattgacagcaaatctttcatctcaatttctaactcctcttcagctgaaaatgataattactgtaagcacagcacaattgtccctgaaaatgctgcacatcaaggtgctaatagaacctcctctctagaaaatcatgaccaaatgtctgtgaactgcagaacgttgctcagcgagtcccctggtaagctccacgttgaagtttcagcagatcttacagcaattaatggtctttcttacaatcaaaatctcgccaatggcagttatgatttagctaacagagacttttgccaaggaaatcagctaaattactacaagcaggaaatacccgtgcaaccaactacctcatattccattcagaatttatacagttacgagaaccagccccagcccagcgatgaatgtactctcctgagtaataaataccttgatggaaatgctaacaaatctacctcagatggaagtcctgtgatggccgtaatgcctggtacgacagacactattcaagtgctcaagggcaggatggattctgagcagagcccttctattgggtactcctcaaggactcttggccccaatcctggacttattcttcaggctttgactctgtcaaacgctagtgatggatttaacctggagcggcttgaaatgcttggcgactcctttttaaagcatgccatcaccacatatctattttgcacttaccctgatgcgcatgagggccgcctttcatatatgagaagcaaaaaggtcagcaactgtaatctgtatcgccttggaaaaaagaagggactacccagccgcatggtggtgtcaatatttgatccccctgtgaattggcttcctcctggttatgtagtaaatcaagacaaaagcaacacagataaatgggaaaaagatgaaatgacaaaagactgcatgctggcgaatggcaaactggatgaggattacgaggaggaggatgaggaggaggagagcctgatgtggagggctccgaaggaagaggctgactatgaagatgatttcctggagtatgatcaggaacatatcagatttatagataatatgttaatggggtcaggagcttttgtaaagaaaatctctctttctcctttttcaaccactgattctgcatatgaatggaaaatgcccaaaaaatcctccttaggtagtatgccattttcatcagattttgaggattttgactacagctcttgggatgcaatgtgctatctggatcctagcaaagctgttgaagaagatgactttgtggtggggttctggaatccatcagaagaaaactgtggtgttgacacgggaaagcagtccatttcttacgacttgcacactgagcagtgtattgctgacaaaagcatagcggactgtgtggaagccctgctgggctgctatttaaccagctgtggggagagggctgctcagcttttcctctgttcactggggctgaaggtgctcccggtaattaaaaggactgatcgggaaaaggccctgtgccctactcgggagaatttcaacagccaacaaaagaacctttcagtgagctgtgctgctgcttctgtggccagttcacgctcttctgtattgaaagactcggaatatggttgtttgaagattccaccaagatgtatgtttgatcatccagatgcagataaaacactgaatcaccttatatcggggtttgaaaattttgaaaagaaaatcaactacagattcaagaataaggcttaccttctccaggcttttacacatgcctcctaccactacaatactatcactgattgttaccagcgcttagaattcctgggagatgcgattttggactacctcataaccaagcacctttatgaagacccgcggcagcactccccgggggtcctgacagacctgcggtctgccctggtcaacaacaccatctttgcatcgctggctgtaaagtacgactaccacaagtacttcaaagctgtctctcctgagctcttccatgtcattgatgactttgtgcagtttcagcttgagaagaatgaaatgcaaggaatggattctgagcttaggagatctgaggaggatgaagagaaagaagaggatattgaagttccaaaggccatgggggatatttttgagtcgcttgctggtgccatttacatggatagtgggatgtcactggagacagtctggcaggtgtactatcccatgatgcggccactaatagaaaagttttctgcaaatgtaccccgttcccctgtgcgagaattgcttgaaatggaaccagaaactgccaaatttagcccggctgagagaacttacgacgggaaggtcagagtcactgtggaagtagtaggaaaggggaaatttaaaggtgttggtcgaagttacaggattgccaaatctgcagcagcaagaagagccctccgaagcctcaaagctaatcaacctcaggttcccaatagctgaaaccgctttttaaaattcaaaacaagaaacaaaacaaaaaaaattaaggggaaaattatttaaatcggaaaggaagacttaaagttgttagtgagtggaatgaattgaaggcagaatttaaagtttggttgataacaggatagataacagaataaaacatttaacatatgtataaaattttggaactaattgtagttttagttttttgcgcaaacacaatcttatcttctttcctcacttctgctttgtttaaatcacaagagtgctttaatgatgacatttagcaagtgctcaaaataattgacaggttttgtttttttttttttgagtttatgtcagctttgcttagtgttagaaggccatggagcttaaacctccagcagtccctaggatgatgtagattcttctccatctctccgtgtgtgcagtagtgccagtcctgcagtagttgataagctgaatagaaagataaggttttcgagaggagaagtgcgccaatgttgtcttttctttccacgttatactgtgtaaggtgatgttcccggtcgctgttgcacctgatagtaagggacagatttttaatgaacattggctggcatgttggtgaatcacattttagttttctgatgccacatagtcttgcataaaaaagggttcttgccttaaaagtgaaaccttcatggatagtctttaatctctgatctttttggaacaaactgttttacattcctttcattttattatgcattagacgttgagacagcgtgatacttacaactcactagtatagttgtaacttattacaggatcatactaaaatttctgtcatatgtatactgaagacattttaaaaaccagaatatgtagtctacggatattttttatcataaaaatgatctttggctaaacaccccattttactaaagtcctcctgccaggtagttcccactgatggaaatgtttatggcaaataattttgccttctaggctgttgctctaacaaaataaaccttagacatatcacacctaaaatatgctgcagattttataattgattggttacttatttaagaagcaaaacacagcacctttacccttagtctcctcacataaatttcttactatacttttcataatgttgcatgcatatttcacctaccaaagctgtgctgttaatgccgtgaaagtttaacgtttgcgataaactgccgtaattttgatacatctgtgatttaggtcattaatttagataaactagctcattatttccatctttggaaaaggaaaaaaaaaaaaacttctttaggcatttgcctaagtttctttaattagacttgtaggcactcttcacttaaatacctcagttcttcttttcttttgcatgcatttttcccctgtttggtgctatgtttatgtattatgcttgaaattttaatttttttttttttgcactgtaactataatacctcttaatttacctttttaaaagctgtgggtcagtcttgcactcccatcaacataccagtagaggtttgctgcaatttgccccgttaattatgcttgaagtttaagaaagctgagcagaggtgtctcatatttcccagcacatgattctgaacttgatgcttcgtggaatgctgcatttatatgtaagtgacatttgaatactgtccttcctgctttatctgcatcatccacccacagagaaatgcctctgtgcgagtgcaccgacagaaaactgtcagctctgctttctaaggaaccctgagtgaggggggtattaagcttctccagtgttttttgttgtctccaatcttaaacttaaattgagatctaaattattaaacgagtttttgagcaaattaggtgacttgttttaaaaatatttaattccgatttggaaccttagatgtctatttgattttttaaaaaaccttaatgtaagatatgaccagttaaaacaaagcaattcttgaattatataactgtaaaagtgtgcagttaacaaggctggatgtgaattttattctgagggtgatttgtgatcaagtttaatcacaaatctcttaatatttataaactacctgatgccaggagcttagggctttgcattgtgtctaatacattgatcccagtgttacgggattctcttgattcctggcaccaaaatcagattgttttcacagttatgattcccagtgggagaaaaatgcctcaatatatttgtaaccttaagaagagtatttttttgttaatactaagatgttcaaacttagacatgattaggtcatacattctcaggggttcaaatttccttctaccattcaaatgttttatcaacagcaaacttcagccgtttcactttttgttggagaaaaatagtagattttaatttgactcacagtttgaagcattctgtgatcccctggttactgagttaaaaaataaaaaagtacgagttagacatatgaaatggttatgaacgcttttgtgctgctgatttttaatgctgtaaagttttcctgtgtttagcttgttgaaatgttttgcatctgtcaattaaggaaaaaaaaaatcactctatgttgccccactttagagccctgtgtgccaccctgtgttcctgtgattgcaatgtgagaccgaatgtaatatggaaaacctaccagtggggtgtggttgtgccctgagcacgtgtgtaaaggactggggaggcgtgtcttgaaaaagcaactgcagaaattccttatgatgattgtgtgcaagttagttaacatgaaccttcatttgtaaattttttaaaatttcttttataatatgctttccgcagtcctaactatgctgcgttttataatagctttttcccttctgttctgttcatgtagcacagataagcattgcacttggtaccatgctttacctcatttcaagaaaatatgcttaacagagaggaaaaaaatgtggtttggccttgctgctgttttgatttatggaatttgaaaaagataattataatgcctgcaatgtgtcatatactcgcacaacttaaataggtcatttttgtctgtggcatttttactgtttgtgaaagtatgaaacagatttgttaactgaactcttaattatgtttttaaaatgtttgttatatttcttttcttttttcttttatattacgtgaagtgatgaaatttagaatgacctctaacactcctgtaattgtcttttaaaatactgatatttttatttgttaataatactttgccctcagaaagattctgataccctgccttgacaacatgaaacttgaggctgctttggttcatgaatccaggtgttcccccggcagtcggcttcttcagtcgctccctggaggcaggtgggcactgcagaggatcactggaatccagatcgagcgcagttcatgcacaaggccccgttgatttaaaatattggatcttgctctgttagggtgtctaatccctttacacaagattgaagccaccaaactgagaccttgatacctttttttaactgcatctgaaattatgttaagagtctttaacccatttgcattatctgcagaagagaaactcatgtcatgtttattacctatatggttgttttaattacatttgaataattatatttttccaaccactgattacttttcaggaatttaattatttccagataaatttctttattttatattgtacatgaaaagttttaaagatatgtttaagaccaagactattaaaatgatttttaaagttgttggagacgccaatagcaatatctaggaaatttgcattgagaccattgtattttccactagcagtgaaaatgatttttcacaactaacttgtaaatatattttaatcattacttctttttttctagtccatttttatttggacatcaaccacagacaatttaaattttatagatgcactaagaattcactgcagcagcaggttacatagcaaaaatgcaaaggtgaacaggaagtaaatttctggcttttctgctgtaaatagtgaaggaaaattactaaaatcaagtaaaactaatgcatattatttgattgacaataaaatatttaccatcacatgctgcagctgttttttaaggaacatgatgtcattcattcatacagtaatcatgctgcagaaatttgcagtctgcaccttatggatcacaattacctttagttgttttttttgtaataattgtagccaagtaaatctccaataaagttatcgtctgttca

SEQ ID NO: 109851 - DNA, 10220 bp, Artificial Sequence
  derived and/or modified sequence
ggaaactctgaaagaacttagaatcagcattttgagagcagaagcttgggcatgctgtgattttccaataaactgctatcacaatgtcaaaatgcagttcagacaagagcaacacagagatctcaaacattaaaacgtaagctgtgctagaacaaaaatgcaatgaaagaaacactggatgaatgaaaagccctgctttgcaacccctcagcatggcaggcctgcagctcatgacccctgcttcctcaccaatgggtcctttctttggactgccatggcaacaagaagcaattcatgataacatttatacgccaagaaaatatcaggttgaactgcttgaagcagctctggatcataataccatcgtctgtttaaacactggctcagggaagacatttattgcagtactactcactaaagagctgtcctatcagatcaggggagacttcagcagaaatggaaaaaggacggtgttcttggtcaactctgcaaaccaggttgctcaacaagtgtcagctgtcagaactcattcagatctcaaggttggggaatactcaaacctagaagtaaatgcatcttggacaaaagagagatggaaccaagagtttactaagcaccaggttctcattatgacttgctatgtcgccttgaatgttttgaaaaatggttacttatcactgtcagacattaaccttttggtgtttgatgagtgtcatcttgcaatcctagaccacccctatcgagaaattatgaagctctgtgaaaattgtccatcatgtcctcgcattttgggactaactgcttccattttaaatgggaaatgtgatccagaggaattggaagaaaagattcagaaactagagaaaattcttaagagtaatgctgaaactgcaactgacctggtggtcttagacaggtatacttctcagccatgtgagattgtggtggattgtggaccatttactgacagaagtgggctttatgaaagactgctgatggaattagaagaagcacttaattttatcaatgattgtaatatatctgtacattcaaaagaaagagattctactttaatttcgaaacagatactatcagactgtcgtgccgtattggtagttctgggaccctggtgtgcagataaagtagctggaatgatggtaagagaactacagaaatacatcaaacatgagcaagaggagctgcacaggaaatttttattgtttacagacactttcctaaggaaaatacatgcactatgtgaagagcacttctcacctgcctcacttgacctgaaatttgtaactcctaaagtaatcaaactgctcgaaatcttacgcaaatataaaccatatgagcgacagcagtttgaaagcgttgagtggtataataatagaaatcaggataattatgtgtcatggagtgattctgaggatgatgatgaggatgaagaaattgaagaaaaagagaagccagagacaaattttccttctccttttaccaacattttgtgcggaattatttttgtggaaagaagatacacagcagttgtcttaaacagattgataaaggaagctggcaaacaagatccagagctggcttatatcagtagcaatttcataactggacatggcattgggaagaatcagcctcgcaacaaacagatggaagcagaattcagaaaacaggaagaggtacttaggaaatttcgagcacatgagaccaacctgcttattgcaacaagtattgtagaagagggtgttgatataccaaaatgcaacttggtggttcgttttgatttgcccacagaatatcgatcctatgttcaatctaaaggaagagcaagggcacccatctctaattatataatgttagcggatacagacaaaataaaaagttttgaagaagaccttaaaacctacaaagctattgaaaagatcttgagaaacaagtgttccaagtcggttgatactggtgagactgacattgatcctgtcatggatgatgatgacgttttcccaccatatgtgttgaggcctgacgatggtggtccacgagtcacaatcaacacggccattggacacatcaatagatactgtgctagattaccaagtgatccgtttactcatctagctcctaaatgcagaacccgagagttgcctgatggtacattttattcaactctttatctgccaattaactcacctcttcgagcctccattgttggtccaccaatgagctgtgtacgattggctgaaagagttgtagctctcatttgctgtgagaaactgcacaaaattggcgaactggatgaccatttgatgccagttgggaaagagactgttaaatatgaagaggagcttgatttgcatgatgaagaagagaccagtgttccaggaagaccaggttccacgaaacgaaggcagtgctacccaaaagcaattccagagtgtttgagggatagttatcccagacctgatcagccctgttacctgtatgtgataggaatggttttaactacacctttacctgatgaactcaactttagaaggcggaagctctatcctcctgaagataccacaagatgctttggaatactgacggccaaacccatacctcagattccacactttcctgtgtacacacgctctggagaggttaccatatccattgagttgaagaagtctggtttcatgttgtctctacaaatgcttgagttgattacaagacttcaccagtatatattctcacatattcttcggcttgaaaaacctgcactagaatttaaacctacagacgctgattcagcatactgtgttctacctcttaatgttgttaatgactccagcactttggatattgactttaaattcatggaagatattgagaagtctgaagctcgcataggcattcccagtacaaagtatacaaaagaaacaccctttgtttttaaattagaagattaccaagatgccgttatcattccaagatatcgcaattttgatcagcctcatcgattttatgtagctgatgtgtacactgatcttaccccactcagtaaatttccttcccctgagtatgaaacttttgcagaatattataaaacaaagtacaaccttgacctaaccaatctcaaccagccactgctggatgtggaccacacatcttcaagacttaatcttttgacacctcgacatttgaatcagaaggggaaagcgcttcctttaagcagtgctgagaagaggaaagccaaatgggaaagtctgcagaataaacagatactggttccagaactctgtgctatacatccaattccagcatcactgtggagaaaagctgtttgtctccccagcatactttatcgccttcactgccttttgactgcagaggagctaagagcccagactgccagcgatgctggcgtgggagtcagatcacttcctgcggattttagataccctaacttagacttcgggtggaaaaaatctattgacagcaaatctttcatctcaatttctaactcctcttcagctgaaaatgataattactgtaagcacagcacaattgtccctgaaaatgctgcacatcaaggtgctaatagaacctcctctctagaaaatcatgaccaaatgtctgtgaactgcagaacgttgctcagcgagtcccctggtaagctccacgttgaagtttcagcagatcttacagcaattaatggtctttcttacaatcaaaatctcgccaatggcagttatgatttagctaacagagacttttgccaaggaaatcagctaaattactacaagcaggaaatacccgtgcaaccaactacctcatattccattcagaatttatacagttacgagaaccagccccagcccagcgatgaatgtactctcctgagtaataaataccttgatggaaatgctaacaaatctacctcagatggaagtcctgtgatggccgtaatgcctggtacgacagacactattcaagtgctcaagggcaggatggattctgagcagagcccttctattgggtactcctcaaggactcttggccccaatcctggacttattcttcaggctttgactctgtcaaacgctagtgatggatttaacctggagcggcttgaaatgcttggcgactcctttttaaagcatgccatcaccacatatctattttgcacttaccctgatgcgcatgagggccgcctttcatatatgagaagcaaaaaggtcagcaactgtaatctgtatcgccttggaaaaaagaagggactacccagccgcatggtggtgtcaatatttgatccccctgtgaattggcttcctcctggttatgtagtaaatcaagacaaaagcaacacagataaatgggaaaaagatgaaatgacaaaagactgcatgctggcgaatggcaaactggatgaggattacgaggaggaggatgaggaggaggagagcctgatgtggagggctccgaaggaagaggctgactatgaagatgatttcctggagtatgatcaggaacatatcagatttatagataatatgttaatggggtcaggagcttttgtaaagaaaatctctctttctcctttttcaaccactgattctgcatatgaatggaaaatgcccaaaaaatcctccttaggtagtatgccattttcatcagattttgaggattttgactacagctcttgggatgcaatgtgctatctggatcctagcaaagctgttgaagaagatgactttgtggtggggttctggaatccatcagaagaaaactgtggtgttgacacgggaaagcagtccatttcttacgacttgcacactgagcagtgtattgctgacaaaagcatagcggactgtgtggaagccctgctgggctgctatttaaccagctgtggggagagggctgctcagcttttcctctgttcactggggctgaaggtgctcccggtaattaaaaggactgatcgggaaaaggccctgtgccctactcgggagaatttcaacagccaacaaaagaacctttcagtgagctgtgctgctgcttctgtggccagttcacgctcttctgtattgaaagactcggaatatggttgtttgaagattccaccaagatgtatgtttgatcatccagatgcagataaaacactgaatcaccttatatcggggtttgaaaattttgaaaagaaaatcaactacagattcaagaataaggcttaccttctccaggcttttacacatgcctcctaccactacaatactatcactgattgttaccagcgcttagaattcctgggagatgcgattttggactacctcataaccaagcacctttatgaagacccgcggcagcactccccgggggtcctgacagacctgcggtctgccctggtcaacaacaccatctttgcatcgctggctgtaaagtacgactaccacaagtacttcaaagctgtctctcctgagctcttccatgtcattgatgactttgtgcagtttcagcttgagaagaatgaaatgcaaggaatggattctgagcttaggagatctgaggaggatgaagagaaagaagaggatattgaagttccaaaggccatgggggatatttttgagtcgcttgctggtgccatttacatggatagtgggatgtcactggagacagtctggcaggtgtactatcccatgatgcggccactaatagaaaagttttctgcaaatgtaccccgttcccctgtgcgagaattgcttgaaatggaaccagaaactgccaaatttagcccggctgagagaacttacgacgggaaggtcagagtcactgtggaagtagtaggaaaggggaaatttaaaggtgttggtcgaagttacaggattgccaaatctgcagcagcaagaagagccctccgaagcctcaaagctaatcaacctcaggttcccaatagctgaaaccgctttttaaaattcaaaacaagaaacaaaacaaaaaaaattaaggggaaaattatttaaatcggaaaggaagacttaaagttgttagtgagtggaatgaattgaaggcagaatttaaagtttggttgataacaggatagataacagaataaaacatttaacatatgtataaaattttggaactaattgtagttttagttttttgcgcaaacacaatcttatcttctttcctcacttctgctttgtttaaatcacaagagtgctttaatgatgacatttagcaagtgctcaaaataattgacaggttttgtttttttttttttgagtttatgtcagctttgcttagtgttagaaggccatggagcttaaacctccagcagtccctaggatgatgtagattcttctccatctctccgtgtgtgcagtagtgccagtcctgcagtagttgataagctgaatagaaagataaggttttcgagaggagaagtgcgccaatgttgtcttttctttccacgttatactgtgtaaggtgatgttcccggtcgctgttgcacctgatagtaagggacagatttttaatgaacattggctggcatgttggtgaatcacattttagttttctgatgccacatagtcttgcataaaaaagggttcttgccttaaaagtgaaaccttcatggatagtctttaatctctgatctttttggaacaaactgttttacattcctttcattttattatgcattagacgttgagacagcgtgatacttacaactcactagtatagttgtaacttattacaggatcatactaaaatttctgtcatatgtatactgaagacattttaaaaaccagaatatgtagtctacggatattttttatcataaaaatgatctttggctaaacaccccattttactaaagtcctcctgccaggtagttcccactgatggaaatgtttatggcaaataattttgccttctaggctgttgctctaacaaaataaaccttagacatatcacacctaaaatatgctgcagattttataattgattggttacttatttaagaagcaaaacacagcacctttacccttagtctcctcacataaatttcttactatacttttcataatgttgcatgcatatttcacctaccaaagctgtgctgttaatgccgtgaaagtttaacgtttgcgataaactgccgtaattttgatacatctgtgatttaggtcattaatttagataaactagctcattatttccatctttggaaaaggaaaaaaaaaaaaacttctttaggcatttgcctaagtttctttaattagacttgtaggcactcttcacttaaatacctcagttcttcttttcttttgcatgcatttttcccctgtttggtgctatgtttatgtattatgcttgaaattttaatttttttttttttgcactgtaactataatacctcttaatttacctttttaaaagctgtgggtcagtcttgcactcccatcaacataccagtagaggtttgctgcaatttgccccgttaattatgcttgaagtttaagaaagctgagcagaggtgtctcatatttcccagcacatgattctgaacttgatgcttcgtggaatgctgcatttatatgtaagtgacatttgaatactgtccttcctgctttatctgcatcatccacccacagagaaatgcctctgtgcgagtgcaccgacagaaaactgtcagctctgctttctaaggaaccctgagtgaggggggtattaagcttctccagtgttttttgttgtctccaatcttaaacttaaattgagatctaaattattaaacgagtttttgagcaaattaggtgacttgttttaaaaatatttaattccgatttggaaccttagatgtctatttgattttttaaaaaaccttaatgtaagatatgaccagttaaaacaaagcaattcttgaattatataactgtaaaagtgtgcagttaacaaggctggatgtgaattttattctgagggtgatttgtgatcaagtttaatcacaaatctcttaatatttataaactacctgatgccaggagcttagggctttgcattgtgtctaatacattgatcccagtgttacgggattctcttgattcctggcaccaaaatcagattgttttcacagttatgattcccagtgggagaaaaatgcctcaatatatttgtaaccttaagaagagtatttttttgttaatactaagatgttcaaacttagacatgattaggtcatacattctcaggggttcaaatttccttctaccattcaaatgttttatcaacagcaaacttcagccgtttcactttttgttggagaaaaatagtagattttaatttgactcacagtttgaagcattctgtgatcccctggttactgagttaaaaaataaaaaagtacgagttagacatatgaaatggttatgaacgcttttgtgctgctgatttttaatgctgtaaagttttcctgtgtttagcttgttgaaatgttttgcatctgtcaattaaggaaaaaaaaaatcactctatgttgccccactttagagccctgtgtgccaccctgtgttcctgtgattgcaatgtgagaccgaatgtaatatggaaaacctaccagtggggtgtggttgtgccctgagcacgtgtgtaaaggactggggaggcgtgtcttgaaaaagcaactgcagaaattccttatgatgattgtgtgcaagttagttaacatgaaccttcatttgtaaattttttaaaatttcttttataatatgctttccgcagtcctaactatgctgcgttttataatagctttttcccttctgttctgttcatgtagcacagataagcattgcacttggtaccatgctttacctcatttcaagaaaatatgcttaacagagaggaaaaaaatgtggtttggccttgctgctgttttgatttatggaatttgaaaaagataattataatgcctgcaatgtgtcatatactcgcacaacttaaataggtcatttttgtctgtggcatttttactgtttgtgaaagtatgaaacagatttgttaactgaactcttaattatgtttttaaaatgtttgttatatttcttttcttttttcttttatattacgtgaagtgatgaaatttagaatgacctctaacactcctgtaattgtcttttaaaatactgatatttttatttgttaataatactttgccctcagaaagattctgataccctgccttgacaacatgaaacttgaggctgctttggttcatgaatccaggtgttcccccggcagtcggcttcttcagtcgctccctggaggcaggtgggcactgcagaggatcactggaatccagatcgagcgcagttcatgcacaaggccccgttgatttaaaatattggatcttgctctgttagggtgtctaatccctttacacaagattgaagccaccaaactgagaccttgatacctttttttaactgcatctgaaattatgttaagagtctttaacccatttgcattatctgcagaagagaaactcatgtcatgtttattacctatatggttgttttaattacatttgaataattatatttttccaaccactgattacttttcaggaatttaattatttccagataaatttctttattttatattgtacatgaaaagttttaaagatatgtttaagaccaagactattaaaatgatttttaaagttgttggagacgccaatagcaatatctaggaaatttgcattgagaccattgtattttccactagcagtgaaaatgatttttcacaactaacttgtaaatatattttaatcattacttctttttttctagtccatttttatttggacatcaaccacagacaatttaaattttatagatgcactaagaattcactgcagcagcaggttacatagcaaaaatgcaaaggtgaacaggaagtaaatttctggcttttctgctgtaaatagtgaaggaaaattactaaaatcaagtaaaactaatgcatattatttgattgacaataaaatatttaccatcacatgctgcagctgttttttaaggaacatgatgtcattcattcatacagtaatcatgctgcagaaatttgcagtctgcaccttatggatcacaattacctttagttgttttttttgtaataattgtagccaagtaaatctccaataaagttatcgtctgttc

SEQ ID NO: 109852 - DNA, 10331 bp, Artificial Sequence
  derived and/or modified sequence
gcggaagtgggtgtttgttatttccccaaatgcggaggcccctgcaccactaacgcgaggaaacgcaggcgagtgggaaggttacctagggtatgaattaatacagacttggaaactctgaaagaacttagaatcagcattttgagagcagaagcttgggcatgctgtgattttccaataaactgctatcacaatgtcaaaatgcagttcagacaagagcaacacagagatctcaaacattaaaacgtaagctgtgctagaacaaaaatgcaatgaaagaaacactggatgaatgaaaagccctgctttgcaacccctcagcatggcaggcctgcagctcatgacccctgcttcctcaccaatgggtcctttctttggactgccatggcaacaagaagcaattcatgataacatttatacgccaagaaaatatcaggttgaactgcttgaagcagctctggatcataataccatcgtctgtttaaacactggctcagggaagacatttattgcagtactactcactaaagagctgtcctatcagatcaggggagacttcagcagaaatggaaaaaggacggtgttcttggtcaactctgcaaaccaggttgctcaacaagtgtcagctgtcagaactcattcagatctcaaggttggggaatactcaaacctagaagtaaatgcatcttggacaaaagagagatggaaccaagagtttactaagcaccaggttctcattatgacttgctatgtcgccttgaatgttttgaaaaatggttacttatcactgtcagacattaaccttttggtgtttgatgagtgtcatcttgcaatcctagaccacccctatcgagaaattatgaagctctgtgaaaattgtccatcatgtcctcgcattttgggactaactgcttccattttaaatgggaaatgtgatccagaggaattggaagaaaagattcagaaactagagaaaattcttaagagtaatgctgaaactgcaactgacctggtggtcttagacaggtatacttctcagccatgtgagattgtggtggattgtggaccatttactgacagaagtgggctttatgaaagactgctgatggaattagaagaagcacttaattttatcaatgattgtaatatatctgtacattcaaaagaaagagattctactttaatttcgaaacagatactatcagactgtcgtgccgtattggtagttctgggaccctggtgtgcagataaagtagctggaatgatggtaagagaactacagaaatacatcaaacatgagcaagaggagctgcacaggaaatttttattgtttacagacactttcctaaggaaaatacatgcactatgtgaagagcacttctcacctgcctcacttgacctgaaatttgtaactcctaaagtaatcaaactgctcgaaatcttacgcaaatataaaccatatgagcgacagcagtttgaaagcgttgagtggtataataatagaaatcaggataattatgtgtcatggagtgattctgaggatgatgatgaggatgaagaaattgaagaaaaagagaagccagagacaaattttccttctccttttaccaacattttgtgcggaattatttttgtggaaagaagatacacagcagttgtcttaaacagattgataaaggaagctggcaaacaagatccagagctggcttatatcagtagcaatttcataactggacatggcattgggaagaatcagcctcgcaacaaacagatggaagcagaattcagaaaacaggaagaggtacttaggaaatttcgagcacatgagaccaacctgcttattgcaacaagtattgtagaagagggtgttgatataccaaaatgcaacttggtggttcgttttgatttgcccacagaatatcgatcctatgttcaatctaaaggaagagcaagggcacccatctctaattatataatgttagcggatacagacaaaataaaaagttttgaagaagaccttaaaacctacaaagctattgaaaagatcttgagaaacaagtgttccaagtcggttgatactggtgagactgacattgatcctgtcatggatgatgatgacgttttcccaccatatgtgttgaggcctgacgatggtggtccacgagtcacaatcaacacggccattggacacatcaatagatactgtgctagattaccaagtgatccgtttactcatctagctcctaaatgcagaacccgagagttgcctgatggtacattttattcaactctttatctgccaattaactcacctcttcgagcctccattgttggtccaccaatgagctgtgtacgattggctgaaagagttgtagctctcatttgctgtgagaaactgcacaaaattggcgaactggatgaccatttgatgccagttgggaaagagactgttaaatatgaagaggagcttgatttgcatgatgaagaagagaccagtgttccaggaagaccaggttccacgaaacgaaggcagtgctacccaaaagcaattccagagtgtttgagggatagttatcccagacctgatcagccctgttacctgtatgtgataggaatggttttaactacacctttacctgatgaactcaactttagaaggcggaagctctatcctcctgaagataccacaagatgctttggaatactgacggccaaacccatacctcagattccacactttcctgtgtacacacgctctggagaggttaccatatccattgagttgaagaagtctggtttcatgttgtctctacaaatgcttgagttgattacaagacttcaccagtatatattctcacatattcttcggcttgaaaaacctgcactagaatttaaacctacagacgctgattcagcatactgtgttctacctcttaatgttgttaatgactccagcactttggatattgactttaaattcatggaagatattgagaagtctgaagctcgcataggcattcccagtacaaagtatacaaaagaaacaccctttgtttttaaattagaagattaccaagatgccgttatcattccaagatatcgcaattttgatcagcctcatcgattttatgtagctgatgtgtacactgatcttaccccactcagtaaatttccttcccctgagtatgaaacttttgcagaatattataaaacaaagtacaaccttgacctaaccaatctcaaccagccactgctggatgtggaccacacatcttcaagacttaatcttttgacacctcgacatttgaatcagaaggggaaagcgcttcctttaagcagtgctgagaagaggaaagccaaatgggaaagtctgcagaataaacagatactggttccagaactctgtgctatacatccaattccagcatcactgtggagaaaagctgtttgtctccccagcatactttatcgccttcactgccttttgactgcagaggagctaagagcccagactgccagcgatgctggcgtgggagtcagatcacttcctgcggattttagataccctaacttagacttcgggtggaaaaaatctattgacagcaaatctttcatctcaatttctaactcctcttcagctgaaaatgataattactgtaagcacagcacaattgtccctgaaaatgctgcacatcaaggtgctaatagaacctcctctctagaaaatcatgaccaaatgtctgtgaactgcagaacgttgctcagcgagtcccctggtaagctccacgttgaagtttcagcagatcttacagcaattaatggtctttcttacaatcaaaatctcgccaatggcagttatgatttagctaacagagacttttgccaaggaaatcagctaaattactacaagcaggaaatacccgtgcaaccaactacctcatattccattcagaatttatacagttacgagaaccagccccagcccagcgatgaatgtactctcctgagtaataaataccttgatggaaatgctaacaaatctacctcagatggaagtcctgtgatggccgtaatgcctggtacgacagacactattcaagtgctcaagggcaggatggattctgagcagagcccttctattgggtactcctcaaggactcttggccccaatcctggacttattcttcaggctttgactctgtcaaacgctagtgatggatttaacctggagcggcttgaaatgcttggcgactcctttttaaagcatgccatcaccacatatctattttgcacttaccctgatgcgcatgagggccgcctttcatatatgagaagcaaaaaggtcagcaactgtaatctgtatcgccttggaaaaaagaagggactacccagccgcatggtggtgtcaatatttgatccccctgtgaattggcttcctcctggttatgtagtaaatcaagacaaaagcaacacagataaatgggaaaaagatgaaatgacaaaagactgcatgctggcgaatggcaaactggatgaggattacgaggaggaggatgaggaggaggagagcctgatgtggagggctccgaaggaagaggctgactatgaagatgatttcctggagtatgatcaggaacatatcagatttatagataatatgttaatggggtcaggagcttttgtaaagaaaatctctctttctcctttttcaaccactgattctgcatatgaatggaaaatgcccaaaaaatcctccttaggtagtatgccattttcatcagattttgaggattttgactacagctcttgggatgcaatgtgctatctggatcctagcaaagctgttgaagaagatgactttgtggtggggttctggaatccatcagaagaaaactgtggtgttgacacgggaaagcagtccatttcttacgacttgcacactgagcagtgtattgctgacaaaagcatagcggactgtgtggaagccctgctgggctgctatttaaccagctgtggggagagggctgctcagcttttcctctgttcactggggctgaaggtgctcccggtaattaaaaggactgatcgggaaaaggccctgtgccctactcgggagaatttcaacagccaacaaaagaacctttcagtgagctgtgctgctgcttctgtggccagttcacgctcttctgtattgaaagactcggaatatggttgtttgaagattccaccaagatgtatgtttgatcatccagatgcagataaaacactgaatcaccttatatcggggtttgaaaattttgaaaagaaaatcaactacagattcaagaataaggcttaccttctccaggcttttacacatgcctcctaccactacaatactatcactgattgttaccagcgcttagaattcctgggagatgcgattttggactacctcataaccaagcacctttatgaagacccgcggcagcactccccgggggtcctgacagacctgcggtctgccctggtcaacaacaccatctttgcatcgctggctgtaaagtacgactaccacaagtacttcaaagctgtctctcctgagctcttccatgtcattgatgactttgtgcagtttcagcttgagaagaatgaaatgcaaggaatggattctgagcttaggagatctgaggaggatgaagagaaagaagaggatattgaagttccaaaggccatgggggatatttttgagtcgcttgctggtgccatttacatggatagtgggatgtcactggagacagtctggcaggtgtactatcccatgatgcggccactaatagaaaagttttctgcaaatgtaccccgttcccctgtgcgagaattgcttgaaatggaaccagaaactgccaaatttagcccggctgagagaacttacgacgggaaggtcagagtcactgtggaagtagtaggaaaggggaaatttaaaggtgttggtcgaagttacaggattgccaaatctgcagcagcaagaagagccctccgaagcctcaaagctaatcaacctcaggttcccaatagctgaaaccgctttttaaaattcaaaacaagaaacaaaacaaaaaaaattaaggggaaaattatttaaatcggaaaggaagacttaaagttgttagtgagtggaatgaattgaaggcagaatttaaagtttggttgataacaggatagataacagaataaaacatttaacatatgtataaaattttggaactaattgtagttttagttttttgcgcaaacacaatcttatcttctttcctcacttctgctttgtttaaatcacaagagtgctttaatgatgacatttagcaagtgctcaaaataattgacaggttttgtttttttttttttgagtttatgtcagctttgcttagtgttagaaggccatggagcttaaacctccagcagtccctaggatgatgtagattcttctccatctctccgtgtgtgcagtagtgccagtcctgcagtagttgataagctgaatagaaagataaggttttcgagaggagaagtgcgccaatgttgtcttttctttccacgttatactgtgtaaggtgatgttcccggtcgctgttgcacctgatagtaagggacagatttttaatgaacattggctggcatgttggtgaatcacattttagttttctgatgccacatagtcttgcataaaaaagggttcttgccttaaaagtgaaaccttcatggatagtctttaatctctgatctttttggaacaaactgttttacattcctttcattttattatgcattagacgttgagacagcgtgatacttacaactcactagtatagttgtaacttattacaggatcatactaaaatttctgtcatatgtatactgaagacattttaaaaaccagaatatgtagtctacggatattttttatcataaaaatgatctttggctaaacaccccattttactaaagtcctcctgccaggtagttcccactgatggaaatgtttatggcaaataattttgccttctaggctgttgctctaacaaaataaaccttagacatatcacacctaaaatatgctgcagattttataattgattggttacttatttaagaagcaaaacacagcacctttacccttagtctcctcacataaatttcttactatacttttcataatgttgcatgcatatttcacctaccaaagctgtgctgttaatgccgtgaaagtttaacgtttgcgataaactgccgtaattttgatacatctgtgatttaggtcattaatttagataaactagctcattatttccatctttggaaaaggaaaaaaaaaaaaacttctttaggcatttgcctaagtttctttaattagacttgtaggcactcttcacttaaatacctcagttcttcttttcttttgcatgcatttttcccctgtttggtgctatgtttatgtattatgcttgaaattttaatttttttttttttgcactgtaactataatacctcttaatttacctttttaaaagctgtgggtcagtcttgcactcccatcaacataccagtagaggtttgctgcaatttgccccgttaattatgcttgaagtttaagaaagctgagcagaggtgtctcatatttcccagcacatgattctgaacttgatgcttcgtggaatgctgcatttatatgtaagtgacatttgaatactgtccttcctgctttatctgcatcatccacccacagagaaatgcctctgtgcgagtgcaccgacagaaaactgtcagctctgctttctaaggaaccctgagtgaggggggtattaagcttctccagtgttttttgttgtctccaatcttaaacttaaattgagatctaaattattaaacgagtttttgagcaaattaggtgacttgttttaaaaatatttaattccgatttggaaccttagatgtctatttgattttttaaaaaaccttaatgtaagatatgaccagttaaaacaaagcaattcttgaattatataactgtaaaagtgtgcagttaacaaggctggatgtgaattttattctgagggtgatttgtgatcaagtttaatcacaaatctcttaatatttataaactacctgatgccaggagcttagggctttgcattgtgtctaatacattgatcccagtgttacgggattctcttgattcctggcaccaaaatcagattgttttcacagttatgattcccagtgggagaaaaatgcctcaatatatttgtaaccttaagaagagtatttttttgttaatactaagatgttcaaacttagacatgattaggtcatacattctcaggggttcaaatttccttctaccattcaaatgttttatcaacagcaaacttcagccgtttcactttttgttggagaaaaatagtagattttaatttgactcacagtttgaagcattctgtgatcccctggttactgagttaaaaaataaaaaagtacgagttagacatatgaaatggttatgaacgcttttgtgctgctgatttttaatgctgtaaagttttcctgtgtttagcttgttgaaatgttttgcatctgtcaattaaggaaaaaaaaaatcactctatgttgccccactttagagccctgtgtgccaccctgtgttcctgtgattgcaatgtgagaccgaatgtaatatggaaaacctaccagtggggtgtggttgtgccctgagcacgtgtgtaaaggactggggaggcgtgtcttgaaaaagcaactgcagaaattccttatgatgattgtgtgcaagttagttaacatgaaccttcatttgtaaattttttaaaatttcttttataatatgctttccgcagtcctaactatgctgcgttttataatagctttttcccttctgttctgttcatgtagcacagataagcattgcacttggtaccatgctttacctcatttcaagaaaatatgcttaacagagaggaaaaaaatgtggtttggccttgctgctgttttgatttatggaatttgaaaaagataattataatgcctgcaatgtgtcatatactcgcacaacttaaataggtcatttttgtctgtggcatttttactgtttgtgaaagtatgaaacagatttgttaactgaactcttaattatgtttttaaaatgtttgttatatttcttttcttttttcttttatattacgtgaagtgatgaaatttagaatgacctctaacactcctgtaattgtcttttaaaatactgatatttttatttgttaataatactttgccctcagaaagattctgataccctgccttgacaacatgaaacttgaggctgctttggttcatgaatccaggtgttcccccggcagtcggcttcttcagtcgctccctggaggcaggtgggcactgcagaggatcactggaatccagatcgagcgcagttcatgcacaaggccccgttgatttaaaatattggatcttgctctgttagggtgtctaatccctttacacaagattgaagccaccaaactgagaccttgatacctttttttaactgcatctgaaattatgttaagagtctttaacccatttgcattatctgcagaagagaaactcatgtcatgtttattacctatatggttgttttaattacatttgaataattatatttttccaaccactgattacttttcaggaatttaattatttccagataaatttctttattttatattgtacatgaaaagttttaaagatatgtttaagaccaagactattaaaatgatttttaaagttgttggagacgccaatagcaatatctaggaaatttgcattgagaccattgtattttccactagcagtgaaaatgatttttcacaactaacttgtaaatatattttaatcattacttctttttttctagtccatttttatttggacatcaaccacagacaatttaaattttatagatgcactaagaattcactgcagcagcaggttacatagcaaaaatgcaaaggtgaacaggaagtaaatttctggcttttctgctgtaaatagtgaaggaaaattactaaaatcaagtaaaactaatgcatattatttgattgacaataaaatatttaccatcacatgctgcagctgttttttaaggaacatgatgtcattcattcatacagtaatcatgctgcagaaatttgcagtctgcaccttatggatcacaattacctttagttgttttttttgtaataattgtagccaagtaaatctccaataaagttatcgtctgttca

SEQ ID NO: 109853 - DNA, 6179 bp, Artificial Sequence
  derived and/or modified sequence
gctggtttcatcctaaggctggatcttttcatgggtctgtgtagtgtaattgcagcagcaaatgggactaataatttcatgagtcatctttagagggaaagaaagacaactgcttctcttcaaccatcaaatgaaagtcctaaattttttgctgttggatgagcatgaaccaattcctctggccagggtaagctgtgctagaacaaaaatgcaatgaaagaaacactggatgaatgaaaagccctgctttgcaacccctcagcatggcaggcctgcagctcatgacccctgcttcctcaccaatgggtcctttctttggactgccatggcaacaagaagcaattcatgataacatttatacgccaagaaaatatcaggttgaactgcttgaagcagctctggatcataataccatcgtctgtttaaacactggctcagggaagacatttattgcagtactactcactaaagagctgtcctatcagatcaggggagacttcagcagaaatggaaaaaggacggtgttcttggtcaactctgcaaaccaggttgctcaacaagtgtcagctgtcagaactcattcagatctcaaggttggggaatactcaaacctagaagtaaatgcatcttggacaaaagagagatggaaccaagagtttactaagcaccaggttctcattatgacttgctatgtcgccttgaatgttttgaaaaatggttacttatcactgtcagacattaaccttttggtgtttgatgagtgtcatcttgcaatcctagaccacccctatcgagaaattatgaagctctgtgaaaattgtccatcatgtcctcgcattttgggactaactgcttccattttaaatgggaaatgtgatccagaggaattggaagaaaagattcagaaactagagaaaattcttaagagtaatgctgaaactgcaactgacctggtggtcttagacaggtatacttctcagccatgtgagattgtggtggattgtggaccatttactgacagaagtgggctttatgaaagactgctgatggaattagaagaagcacttaattttatcaatgattgtaatatatctgtacattcaaaagaaagagattctactttaatttcgaaacagatactatcagactgtcgtgccgtattggtagttctgggaccctggtgtgcagataaagtagctggaatgatggtaagagaactacagaaatacatcaaacatgagcaagaggagctgcacaggaaatttttattgtttacagacactttcctaaggaaaatacatgcactatgtgaagagcacttctcacctgcctcacttgacctgaaatttgtaactcctaaagtaatcaaactgctcgaaatcttacgcaaatataaaccatatgagcgacagcagtttgaaagcgttgagtggtataataatagaaatcaggataattatgtgtcatggagtgattctgaggatgatgatgaggatgaagaaattgaagaaaaagagaagccagagacaaattttccttctccttttaccaacattttgtgcggaattatttttgtggaaagaagatacacagcagttgtcttaaacagattgataaaggaagctggcaaacaagatccagagctggcttatatcagtagcaatttcataactggacatggcattgggaagaatcagcctcgcaacaaacagatggaagcagaattcagaaaacaggaagaggtacttaggaaatttcgagcacatgagaccaacctgcttattgcaacaagtattgtagaagagggtgttgatataccaaaatgcaacttggtggttcgttttgatttgcccacagaatatcgatcctatgttcaatctaaaggaagagcaagggcacccatctctaattatataatgttagcggatacagacaaaataaaaagttttgaagaagaccttaaaacctacaaagctattgaaaagatcttgagaaacaagtgttccaagtcggttgatactggtgagactgacattgatcctgtcatggatgatgatgacgttttcccaccatatgtgttgaggcctgacgatggtggtccacgagtcacaatcaacacggccattggacacatcaatagatactgtgctagattaccaagtgatccgtttactcatctagctcctaaatgcagaacccgagagttgcctgatggtacattttattcaactctttatctgccaattaactcacctcttcgagcctccattgttggtccaccaatgagctgtgtacgattggctgaaagagttgtagctctcatttgctgtgagaaactgcacaaaattggcgaactggatgaccatttgatgccagttgggaaagagactgttaaatatgaagaggagcttgatttgcatgatgaagaagagaccagtgttccaggaagaccaggttccacgaaacgaaggcagtgctacccaaaagcaattccagagtgtttgagggatagttatcccagacctgatcagccctgttacctgtatgtgataggaatggttttaactacacctttacctgatgaactcaactttagaaggcggaagctctatcctcctgaagataccacaagatgctttggaatactgacggccaaacccatacctcagattccacactttcctgtgtacacacgctctggagaggttaccatatccattgagttgaagaagtctggtttcatgttgtctctacaaatgcttgagttgattacaagacttcaccagtatatattctcacatattcttcggcttgaaaaacctgcactagaatttaaacctacagacgctgattcagcatactgtgttctacctcttaatgttgttaatgactccagcactttggatattgactttaaattcatggaagatattgagaagtctgaagctcgcataggcattcccagtacaaagtatacaaaagaaacaccctttgtttttaaattagaagattaccaagatgccgttatcattccaagatatcgcaattttgatcagcctcatcgattttatgtagctgatgtgtacactgatcttaccccactcagtaaatttccttcccctgagtatgaaacttttgcagaatattataaaacaaagtacaaccttgacctaaccaatctcaaccagccactgctggatgtggaccacacatcttcaagacttaatcttttgacacctcgacatttgaatcagaaggggaaagcgcttcctttaagcagtgctgagaagaggaaagccaaatgggaaagtctgcagaataaacagatactggttccagaactctgtgctatacatccaattccagcatcactgtggagaaaagctgtttgtctccccagcatactttatcgccttcactgccttttgactgcagaggagctaagagcccagactgccagcgatgctggcgtgggagtcagatcacttcctgcggattttagataccctaacttagacttcgggtggaaaaaatctattgacagcaaatctttcatctcaatttctaactcctcttcagctgaaaatgataattactgtaagcacagcacaattgtccctgaaaatgctgcacatcaaggtgctaatagaacctcctctctagaaaatcatgaccaaatgtctgtgaactgcagaacgttgctcagcgagtcccctggtaagctccacgttgaagtttcagcagatcttacagcaattaatggtctttcttacaatcaaaatctcgccaatggcagttatgatttagctaacagagacttttgccaaggaaatcagctaaattactacaagcaggaaatacccgtgcaaccaactacctcatattccattcagaatttatacagttacgagaaccagccccagcccagcgatgaatgtactctcctgagtaataaataccttgatggaaatgctaacaaatctacctcagatggaagtcctgtgatggccgtaatgcctggtacgacagacactattcaagtgctcaagggcaggatggattctgagcagagcccttctattgggtactcctcaaggactcttggccccaatcctggacttattcttcaggctttgactctgtcaaacgctagtgatggatttaacctggagcggcttgaaatgcttggcgactcctttttaaagcatgccatcaccacatatctattttgcacttaccctgatgcgcatgagggccgcctttcatatatgagaagcaaaaaggtcagcaactgtaatctgtatcgccttggaaaaaagaagggactacccagccgcatggtggtgtcaatatttgatccccctgtgaattggcttcctcctggttatgtagtaaatcaagacaaaagcaacacagataaatgggaaaaagatgaaatgacaaaagactgcatgctggcgaatggcaaactggatgaggattacgaggaggaggatgaggaggaggagagcctgatgtggagggctccgaaggaagaggctgactatgaagatgatttcctggagtatgatcaggaacatatcagatttatagataatatgttaatggggtcaggagcttttgtaaagaaaatctctctttctcctttttcaaccactgattctgcatatgaatggaaaatgcccaaaaaatcctccttaggtagtatgccattttcatcagattttgaggattttgactacagctcttgggatgcaatgtgctatctggatcctagcaaagctgttgaagaagatgactttgtggtggggttctggaatccatcagaagaaaactgtggtgttgacacgggaaagcagtccatttcttacgacttgcacactgagcagtgtattgctgacaaaagcatagcggactgtgtggaagccctgctgggctgctatttaaccagctgtggggagagggctgctcagcttttcctctgttcactggggctgaaggtgctcccggtaattaaaaggactgatcgggaaaaggccctgtgccctactcgggagaatttcaacagccaacaaaagaacctttcagtgagctgtgctgctgcttctgtggccagttcacgctcttctgtattgaaagactcggaatatggttgtttgaagattccaccaagatgtatgtttgatcatccagatgcagataaaacactgaatcaccttatatcggggtttgaaaattttgaaaagaaaatcaactacagattcaagaataaggcttaccttctccaggcttttacacatgcctcctaccactacaatactatcactgattgttaccagcgcttagaattcctgggagatgcgattttggactacctcataaccaagcacctttatgaagacccgcggcagcactccccgggggtcctgacagacctgcggtctgccctggtcaacaacaccatctttgcatcgctggctgtaaagtacgactaccacaagtacttcaaagctgtctctcctgagctcttccatgtcattgatgactttgtgcagtttcagcttgagaagaatgaaatgcaaggaatggattctgagcttaggagatctgaggaggatgaagagaaagaagaggatattgaagttccaaaggccatgggggatatttttgagtcgcttgctggtgccatttacatggatagtgggatgtcactggagacagtctggcaggtgtactatcccatgatgcggccactaatagaaaagttttctgcaaatgtaccccgttcccctgtgcgagaattgcttgaaatggaaccagaaactgccaaatttagcccggctgagagaacttacgacgggaaggtcagagtcactgtggaagtagtaggaaaggggaaatttaaaggtgttggtcgaagttacaggattgccaaatctgcagcagcaagaagagccctccgaagcctcaaagctaatcaacctcaggttcccaatagctgaaaccgctttttaaaattcaaaacaagaaacaaaacaaaaaaaattaaggggaaaattatttaaatcggaaaggaagacttaaagttgttagtgagtggaatgaattgaaggcagaatttaaagtttggttgataacaggatagataacagaataaaacatttaacatatgtataaaa

SEQ ID NO: 109854 - DNA, 2776 bp, Artificial Sequence
  derived and/or modified sequence
ctcaaccagccactgctggatgtggaccacacatcttcaagacttaatcttttgacacctcgacatttgaatcagaaggggaaagcgcttcctttaagcagtgctgagaagaggaaagccaaatgggaaagtctgcagaataaacagatactggttccagaactctgtgctatacatccaattccagcatcactgtggagaaaagctgtttgtctccccagcatactttatcgccttcactgccttttgactgcagaggagctaagagcccagactgccagcgatgctggcgtgggagtcagatcacttcctgcggattttagctgaaaatgataattactgtaagcacagcacaattgtccctgaaaatgctgcacatcaaggtgctaatagaacctcctctctagaaaatcatgaccaaatgtctgtgaactgcagaacgttgctcagcgagtcccctggtaagctccacgttgaagtttcagcagatcttacagcaattaatggtctttcttacaatcaaaatctcgccaatggcagttatgatttagctaacagagacttttgccaaggaaatcagctaaattactacaagcaggaaatacccgtgcaaccaactacctcatattccattcagaatttatacagttacgagaaccagccccagcccagcgatgaatgtactctcctgagtaataaataccttgatggaaatgctaacaaatctacctcagatggaagtcctgtgatggccgtaatgcctggtacgacagacactattcaagtgctcaagggcaggatggattctgagcagagcccttctattgggtactcctcaaggactcttggccccaatcctggacttattcttcaggctttgactctgtcaaacgctagtgatggatttaacctggagcggcttgaaatgcttggcgactcctttttaaagcatgccatcaccacatatctattttgcacttaccctgatgcgcatgagggccgcctttcatatatgagaagcaaaaaggtcagcaactgtaatctgtatcgccttggaaaaaagaagggactacccagccgcatggtggtgtcaatatttgatccccctgtgaattggcttcctcctggttatgtagtaaatcaagacaaaagcaacacagataaatgggaaaaagatgaaatgacaaaagactgcatgctggcgaatggcaaactggatgaggattacgaggaggaggatgaggaggaggagagcctgatgtggagggctccgaaggaagaggctgactatgaagatgatttcctggagtatgatcaggaacatatcagatttatagataatatgttaatggggtcaggagcttttgtaaagaaaatctctctttctcctttttcaaccactgattctgcatatgaatggaaaatgcccaaaaaatcctccttaggtagtatgccattttcatcagattttgaggattttgactacagctcttgggatgcaatgtgctatctggatcctagcaaagctgttgaagaagatgactttgtggtggggttctggaatccatcagaagaaaactgtggtgttgacacgggaaagcagtccatttcttacgacttgcacactgagcagtgtattgctgacaaaagcatagcggactgtgtggaagccctgctgggctgctatttaaccagctgtggggagagggctgctcagcttttcctctgttcactggggctgaaggtgctcccggtaattaaaaggactgatcgggaaaaggccctgtgccctactcgggagaatttcaacagccaacaaaagaacctttcagtgagctgtgctgctgcttctgtggccagttcacgctcttctgtattgaaagactcggaatatggttgtttgaagattccaccaagatgtatgtttgatcatccagatgcagataaaacactgaatcaccttatatcggggtttgaaaattttgaaaagaaaatcaactacagattcaagaataaggcttaccttctccaggcttttacacatgcctcctaccactacaatactatcactgattgttaccagcgcttagaattcctgggagatgcgattttggactacctcataaccaagcacctttatgaagacccgcggcagcactccccgggggtcctgacagacctgcggtctgccctggtcaacaacaccatctttgcatcgctggctgtaaagtacgactaccacaagtacttcaaagctgtctctcctgagctcttccatgtcattgatgactttgtgcagtttcagcttgagaagaatgaaatgcaaggaatggattctgagcttaggagatctgaggaggatgaagagaaagaagaggatattgaagttccaaaggccatgggggatatttttgagtcgcttgctggtgccatttacatggatagtgggatgtcactggagacagtctggcaggtgtactatcccatgatgcggccactaatagaaaagttttctgcaaatgtaccccgttcccctgtgcgagaattgcttgaaatggaaccagaaactgccaaatttagcccggctgagagaacttacgacgggaaggtcagagtcactgtggaagtagtaggaaaggggaaatttaaaggtgttggtcgaagttacaggattgccaaatctgcagcagcaagaagagccctccgaagcctcaaagctaatcaacctcaggttcccaatagctgaaaccgctttttaaaattcaaaacaagaaac

SEQ ID NO: 109855 - DNA, 1956 bp, Artificial Sequence
  derived and/or modified sequence
atgaagaattgtggcagacggtttcataacgaggtagggaagttcagatttctgaacgagctcattaaagtcgtgtcccccaaatacctaggggatagagtgagcgagaaggtgaaaacgaaagtgatcgagctactgtatagctggaccatggccctgccggaagaggcaaaaatcaaggatgcatatcacatgctcaagcgtcagggcattgtacaaagcgaccccccaatcccagtggatcgaactttaataccgagcccccctcctcgccccaagaatcccgtgtttgacgacgaagaaaaaagcaaactgctcgctaaactcctaaaaagcaagaatcccgacgatctccaggaggctaataagttgataaagtctatggtcaaggaagacgaagcccgcattcagaaagttacaaagagattacacacacttgaagaggtgaacaacaacgttcggctgctgtccgagatgttactccattattcacaagaagactcttcagatggggaccgagagctgatgaaagaactcttcgatcagtgtgagaataagaggagaacgttgtttaagctcgccagcgagacggaggataatgataattccctcggcgatattctgcaggccagtgataatctgtcacgagtcattaattcctacaagaccatcatcgagggccaagtgatcaacggagaggtggcaaccctcacactacctgattcagagggaaattctcagtgttcaaatcagggcaccctcattgacctggctgagctagatactactaatagcctttcctccgtattggcaccagcccctacacccccgtcaagcggcattccgattctcccgccacctccccaggcaagcggtccgcctcgatccaggtctagctctcaggcagaagctaccctgggcccatcctccactagtaacgctctgtcctggcttgatgaggagctgttgtgcctgggcctcgcggaccctgcacccaatgttccacctaaggaatctgcgggcaactcccagtggcacctgctgcaacgagagcaaagcgacttggattttttttcccctaggcccggcaccgcggcatgcggtgcctccgatgctcctctcctgcagcccagcgcgccctctagcagttcatcgcaggcccctcttccccccccattccctgcccctgtcgtgccggccagtgtgcctgccccctccgctgggtcttcactgttctcaacgggcgtggcacctgcccttgcacccaaggtcgagcccgccgtccctggtcaccacgggctggccctcgggaactcagctctgcatcatctggatgcactggaccagctccttgaagaggcaaaggtgacctccggtctcgtcaagcccaccaccagtcccttgatcccaacgacgacaccggctagaccactgctgcccttctccacaggccctggtagccctctgtttcaaccgctgtcttttcagtcccagggaagccccccaaagggccctgagctgagcttagcctccattcacgtaccgctggagagcatcaagccatccagcgccctgccagtcacggcttacgacaaaaatggcttcaggatattgttccattttgctaaagagtgcccaccaggaagacctgacgttctggtagtcgtggtctcaatgttgaacaccgcccccctgccagtcaagtccattgtgttgcaggcagctgtgccaaagagtatgaaagtgaaactccagcccccatccggcaccgaactgtcccctttcagtccaatccagcccccggccgccataactcaggtaatgctgttggccaatcccctcaaggaaaaggtgagactgagatacaaactgaccttcgcgctgggcgaacagctgagcactgaggtgggagaagtcgatcagttcccccccgtggagcaatgggggaatctgtag

SEQ ID NO: 109856 - DNA, 1956 bp, Artificial Sequence
  derived and/or modified sequence
atgaaaaattgcgggcgccgcttccacaatgaagtcggaaagtttcgttttctcaacgaactcatcaaggttgtgtcccctaaatacctaggagaccgagtgtccgaaaaggtcaaaacgaaggtgattgagctgttatatagttggaccatggcactgcctgaagaagcaaaaattaaggacgcataccacatgctcaagaggcaggggatcgtgcagagtgacccccctattcccgtggacagaaccttgatcccatctccaccaccacggcctaaaaacccagtgttcgatgatgaagagaagtcaaagttactggcaaagctcctgaaatcaaagaaccctgacgatcttcaggaggccaataagttaatcaagtccatggttaaggaagacgaggcgcgcatccagaaagtgaccaagcgactccacacgcttgaagaggttaataacaacgtacggcttctctctgagatgctgttgcactactcacaggaggatagcagtgacggtgacagagagttaatgaaagaactctttgatcagtgcgagaacaagaggaggactctgtttaaattggcctctgaaaccgaagacaatgataattccctgggagatattctgcaggcgtctgacaacctcagccgtgttataaacagttataaaacaatcatagagggacaggtgataaatggggaggtggcaactctgaccttgcccgacagtgagggcaatagccaatgcagcaaccaggggactctaatcgatctggccgaacttgataccacgaactcactttcatctgtcctcgctccagctccaacgcctccaagctccggaatccctatcttgcctcctccccctcaagcgtccggacctccaaggagtaggagcagctcacaggctgaggccactctggggccttcctcaacttcaaacgcactgtcatggctggatgaagagctgctctgtctgggcctggccgacccagccccgaatgtcccccctaaagagagcgccggaaattctcagtggcaccttttacagcgtgagcagagtgacctcgacttcttttcgccccgccccggtaccgccgcctgcggcgcttccgacgcgcccctcctgcagccgtctgctccctcgagcagtagttcccaggccccgttgccaccacctttccccgcacccgtcgtgccagcttcagtccctgccccatccgctggtagctctctcttttccacaggggtggctcccgcgctggctccgaaggttgagccagcggtgcctggccaccacgggctggcgctcggcaactctgcactgcaccatctggacgctctagatcagctactcgaggaagccaaggtgacatctggactcgtcaagccgacaacatcccccctcattcccacaaccacccccgctcgcccgcttctgcctttctcaacaggacccggttcacccctctttcaaccgctttcattccaatctcagggaagcccaccaaagggccctgagctctccttggccagcattcacgtgccattagagtcaattaagccaagcagcgccttacctgttactgcttacgataagaacggctttcgcatcttattccacttcgctaaagagtgcccgcccggacgacccgacgtgctggtggtagtggtgtcaatgcttaataccgctccgctgccagttaagtcaatagtgctgcaggctgcagtccccaaatcaatgaaagtcaagctgcaaccaccaagtgggaccgaattgagtcccttctcaccgatccagccacccgcagccattactcaggtgatgctgctggcaaatccgctgaaggaaaaagtccggttgaggtacaaactgaccttcgctctgggcgagcagctgtccacagaggtgggcgaggtcgaccagttcccacctgtggaacagtggggcaacctctag

SEQ ID NO: 109857 - DNA, 1806 bp, Artificial Sequence
  derived and/or modified sequence
atggccctgcccgaggaggcaaaaataaaagacgcctatcacatgctgaaaaggcagggtattgtgcagagtgacccccccatcccagtagataggacattgattccttcgccaccgccacgtccaaaaaatcccgtgttcgatgatgaggagaaatcaaagctgctggctaaactgctgaaaagcaagaatccagacgacctacaggaggcaaacaagctcatcaagagtatggtaaaagaggatgaggcccggatccaaaaagttaccaagcgcctccatactcttgaggaagtcaacaacaatgtgagactgctgagtgagatgctgcttcactattcacaggaagacagtagcgacggggatcgcgagctgatgaaggaactgttcgaccagtgcgagaacaaacgccgaactctttttaagctggctagtgagactgaggacaatgacaactcactgggggacatccttcaagccagtgacaacctgtcccgcgttatcaacagctacaagaccattattgaaggtcaggttatcaatggcgaggtcgctactctgactctgcccgacagtgaagggaattctcagtgtagtaaccaggggaccctgattgacctggccgagctagacacaaccaattctctatccagtgtgctcgcccctgcgcctacgcccccatcctccggcatacctattctcccacctccgccacaagcctccggccccccacgaagcaggtctagctcccaagcagaggcaaccttgggcccatcatcaactagcaatgccctctcatggctcgacgaagaactcttgtgtctgggccttgccgatccagcaccgaacgtgcctccgaaggagtctgcaggtaactcccagtggcacctactccagagagagcagagtgacttagacttcttctcgcctaggcccgggaccgctgcgtgcggagcgagcgacgcaccactgttacagccgagcgctccctcctcctccagctcccaggcacccctccccccaccgtttcctgccccagtggtgccagcatctgtgcccgcccccagcgcgggatcgtccctgttttcaaccggcgtggcccccgcactcgccccgaaagttgagccagctgtgcccgggcaccacggactggccctgggaaattctgccttgcatcatctggatgccttggaccagcttctggaggaggcaaaagtgacatcgggtcttgtgaagccaacaacatctcccctgattcctaccacaacaccagccagaccgcttctcccattctccaccggccctgggagtccactatttcaaccactgtcattccagtcacagggcagcccgcctaagggacccgaactgtcactggcctcaattcacgtgcctctggaatctatcaagccatcatctgccttgccagtgacggcatacgataaaaatggtttcagaatcctgttccatttcgcgaaggaatgcccgcccgggagaccggacgtcctggtggtggtcgtctcaatgttgaataccgctcccctcccagtcaagagcatcgtcttacaggcggccgtgcctaagtcaatgaaggtcaagctccagccacccagcggtactgaactctcgccattcagccccattcagcccccggccgccattacacaggttatgctattggcaaacccgctgaaagagaaggtccggctgcgatacaaactgaccttcgccctcggagaacagcttagcaccgaggtgggggaggtcgatcagttccctccagtggagcaatgggggaacctgtag

SEQ ID NO: 109858 - DNA, 1967 bp, Artificial Sequence
  derived and/or modified sequence
tgcaatatggcggaggcggaaggggaaagcctggagtcctggctcatacctgggggacagggtgtctgagaaagtgaagaccaaggttattgagctgctgtacagctggaccatggccctgccagaagaagcaaagatcaaagacgcctaccacatgctgaagagacagggcatagtgcagtctgacccaccaattcctgtggataggacgctgatcccctctccaccacctcgtcccaaaaaccctgtttttgatgatgaggagaagtccaagcttttagccaagctgctgaaaagcaaaaacccagatgacctgcaggaggccaacaagctcatcaagtccatggtgaaggaagacgaggcacggatccagaaggtgaccaagcgtctgcacacgttagaggaagttaacaacaacgtgagactgctcagtgagatgctgcttcattacagccaggaggactcttcggacggggacagagagctgatgaaggagctgtttgatcagtgtgagaacaagaggcggactttatttaaactcgccagtgagactgaggacaatgataacagtttgggggacatcctgcaagccagtgacaacctctcccgggtcatcaactcttacaaaacaattattgaagggcaggtcatcaatggcgaggtggctaccttaaccctgcctgactcggaaggaaacagtcagtgcagtaaccaaggcacgctcatcgaccttgcggagctggacacgaccaacagtttgtcctccgtgttggccccagcacctactccaccctcctcaggcatcccaatcctccctccaccaccccaggcctcaggacctccacggagccgctcctctagccaggccgaggccaccctggggcccagcagcacaagcaacgccctctcctggctggacgaggagctactctgcttgggcctcgccgacccagcccctaatgttcctcccaaagagtcagctgggaacagccagtggcacctgctccagagggaacagtccgacctggacttcttcagccccaggccggggaccgctgcctgtggcgcctccgatgctcctctgctccagccctcagccccctcctcaagcagctcccaagctccactgccgcctcccttcccagctcctgtggtcccagccagtgttcctgcccccagtgcgggctcctccttgttttctactggagtggccccagccttggccccaaaagttgagcccgcagtccctgggcaccatggcttggcgttgggcaacagcgcgctgcaccacctggatgccctcgatcagcttctagaagaggccaaagtgacctcgggcttggtgaaacccactacctcccctctcatccccaccaccaccccagccaggcccctcctgcccttctccacggggcccggcagcccgctcttccagccactgagtttccagtcccagggcagccccccgaaggggcctgagctctccctggccagcatccacgtgcccctggaatcgatcaagcctagcagtgcccttcctgtgacagcctacgataaaaacggcttccgcatcctcttccactttgccaaggagtgtcccccaggacgacctgacgtgctggtggtggtggtgtccatgctgaacacggctcccttacctgtcaagagcatcgtgctgcaggctgcagtgcccaagtcaatgaaagtgaagttgcagccaccttctgggacagaactctctccatttagccccatccagccacctgcagccatcacccaggtcatgttgctggccaatccactgaaggagaaggtgcggcttcggtataagctgaccttcgccctgggggagcagctgagcacagaggtgggcgaggtggaccagttccctcctgtggaacagtgggggaacctatgaccccagaggacgctgtgatctccaccttgaagccaggcaggctgccctg

SEQ ID NO: 109859 - DNA, 1956 bp, Artificial Sequence
  derived and/or modified sequence
atgaagaactgtggccgccgcttccacaatgaggtgggcaagttccgcttcctgaatgaactcatcaaggtggtgagccccaagtacctgggggacagagtgtctgagaaggtgaagaccaaggtgattgagctgctgtacagctggaccatggccctgcctgaggaggccaagatcaaggatgcctaccacatgctgaagaggcagggcatcgtgcagagcgacccccccatccctgtggacaggaccctcatccccagccccccaccccggcccaagaaccctgtgtttgatgatgaggagaagagcaagctgctggccaagctgctgaagagcaagaacccagatgacctgcaggaggccaacaagctgatcaagtccatggtgaaggaggatgaggcccgcatccagaaggtgaccaagaggctgcacaccctggaggaggtgaacaacaacgtgcggctgctgtctgagatgctgctgcactacagccaggaggacagcagtgatggagaccgggagctgatgaaggagctgtttgaccagtgtgagaacaagaggaggaccctcttcaagctggccagcgagacagaggacaatgacaacagcctgggggacatcctgcaggccagtgacaacctgagcagggtcatcaacagctacaagaccatcatcgagggccaggtgatcaatggagaggtggccaccctgaccctgcctgacagcgagggcaacagccagtgcagcaaccagggcaccctgattgacctggccgagctggacaccaccaacagcctgagctctgtgctggccccagcccccaccccacccagcagcggcatccccatcctgcccccaccaccccaggccagcggccccccaagaagccgcagcagcagccaggccgaggccaccctgggccccagcagcaccagcaatgccctgtcctggctggatgaggagctgctgtgcctgggcctggccgaccctgccccaaatgtgccccccaaggagagcgctggcaacagccagtggcacctgctgcagcgggagcagagcgacctggacttcttcagcccccggcccggcacagctgcctgtggggccagtgatgcccccctgctgcagcccagcgcccccagcagcagcagcagccaggcccccctgcccccacccttccctgcccctgtggtgcctgcctctgtgcctgcccccagcgctggcagcagcctcttcagcactggagtggccccagccctggcccccaaggtggagcctgctgtgcccggccaccacggcctggccctgggcaacagcgccctgcaccacctggatgccctggaccagctgctggaggaggccaaggtgaccagcggcctggtgaagcccaccaccagccccctcatccccaccaccaccccagcccggcccctgctgcccttcagcactggacctggcagccccctcttccagcccctgtccttccagagccagggcagcccccccaagggccctgagctgagcctggccagcatccacgtgcccctggagagcatcaagcccagcagcgccctgcctgtgacagcctatgacaagaatggcttccgcatcctcttccactttgccaaggagtgccccccaggccgcccagatgtgctggtggtggtggtgtccatgctgaacacagcccccctgcctgtgaagagcatcgtgctgcaggccgctgtgcccaagtccatgaaggtgaagctgcagccccccagcggcacagagctgagccccttcagccccatccagcccccagctgccatcacccaggtgatgctgctggccaaccccctgaaggagaaggtgcggctgcgctacaagctgacctttgccctgggggagcagctgagcacagaggtgggggaggtggaccagtttcctcctgtggagcagtggggcaacctgtag

SEQ ID NO: 109860 - DNA, 1806 bp, Artificial Sequence
  derived and/or modified sequence
atggccctgcctgaggaggccaagatcaaggatgcctaccacatgctgaagaggcagggcatcgtgcagagcgacccccccatccctgtggacaggaccctcatccccagccccccaccccggcccaagaaccctgtgtttgatgatgaggagaagagcaagctgctggccaagctgctgaagagcaagaacccagatgacctgcaggaggccaacaagctgatcaagtccatggtgaaggaggatgaggcccgcatccagaaggtgaccaagaggctgcacaccctggaggaggtgaacaacaacgtgcggctgctgtctgagatgctgctgcactacagccaggaggacagcagtgatggagaccgggagctgatgaaggagctgtttgaccagtgtgagaacaagaggaggaccctcttcaagctggccagcgagacagaggacaatgacaacagcctgggggacatcctgcaggccagtgacaacctgagcagggtcatcaacagctacaagaccatcatcgagggccaggtgatcaatggagaggtggccaccctgaccctgcctgacagcgagggcaacagccagtgcagcaaccagggcaccctgattgacctggccgagctggacaccaccaacagcctgagctctgtgctggccccagcccccaccccacccagcagcggcatccccatcctgcccccaccaccccaggccagcggccccccaagaagccgcagcagcagccaggccgaggccaccctgggccccagcagcaccagcaatgccctgtcctggctggatgaggagctgctgtgcctgggcctggccgaccctgccccaaatgtgccccccaaggagagcgctggcaacagccagtggcacctgctgcagcgggagcagagcgacctggacttcttcagcccccggcccggcacagctgcctgtggggccagtgatgcccccctgctgcagcccagcgcccccagcagcagcagcagccaggcccccctgcccccacccttccctgcccctgtggtgcctgcctctgtgcctgcccccagcgctggcagcagcctcttcagcactggagtggccccagccctggcccccaaggtggagcctgctgtgcccggccaccacggcctggccctgggcaacagcgccctgcaccacctggatgccctggaccagctgctggaggaggccaaggtgaccagcggcctggtgaagcccaccaccagccccctcatccccaccaccaccccagcccggcccctgctgcccttcagcactggacctggcagccccctcttccagcccctgtccttccagagccagggcagcccccccaagggccctgagctgagcctggccagcatccacgtgcccctggagagcatcaagcccagcagcgccctgcctgtgacagcctatgacaagaatggcttccgcatcctcttccactttgccaaggagtgccccccaggccgcccagatgtgctggtggtggtggtgtccatgctgaacacagcccccctgcctgtgaagagcatcgtgctgcaggccgctgtgcccaagtccatgaaggtgaagctgcagccccccagcggcacagagctgagccccttcagccccatccagcccccagctgccatcacccaggtgatgctgctggccaaccccctgaaggagaaggtgcggctgcgctacaagctgacctttgccctgggggagcagctgagcacagaggtgggggaggtggaccagtttcctcctgtggagcagtggggcaacctgtag

SEQ ID NO: 109861 - DNA, 1956 bp, Artificial Sequence
  derived and/or modified sequence
atgaagaactgcggccggcggttccacaacgaggtgggcaagttccggttcctgaacgaattaattaaggtggtgtccccgaaatatctgggcgaccgcgtgtcagaaaaagtgaagactaaagtgatcgaactgttgtactcatggaccatggcactcccggaagaggccaagattaaagatgcataccacatgctgaaaagacaggggatcgtgcaaagcgaccctcccataccagttgacagaactttaatccctagcccacctcccagacccaagaaccccgtctttgacgacgaggagaagtccaagctgctggcaaagctcctaaagagtaagaacccagatgatttgcaagaggctaataagcttatcaagagcatggtgaaggaagacgaggcgaggatacagaaggttacgaagcggcttcatactctagaagaagtcaacaacaacgtgcggttactctccgagatgctgctgcactactcccaggaagattcctcagacggggatcgagagctcatgaaagagttgttcgaccagtgcgaaaacaagcggcgcaccctcttcaagctcgcatccgagactgaggacaacgacaattccctcggcgacattctgcaggcctccgacaacctcagtcgagtgatcaattcctataagacaatcatcgagggccaagtgatcaacggcgaagtggccactctaaccctacctgactctgaaggtaactcacaatgctctaatcaagggactctgatcgatctagccgagctggatactacgaacagcttatcctccgtgctggcgcccgcaccaacccccccttcatcaggaatcccaatccttccccctcccccccaggcctccggacccccgaggagcaggtccagcagtcaggccgaggccacactgggcccatcatccacctccaacgccttaagctggctagatgaggaactcctgtgcctcggcctggccgaccctgcccccaatgtgcctcctaaggagagtgccggcaactctcagtggcatctgctccaacgggagcagtccgatcttgattttttctcgcctaggcctggaacggccgcctgcggcgcatctgacgcgccactgctgcagccgagcgcacctagcagcagcagctcacaggccccactgcctccgcccttcccagctcccgtcgtgcccgcctccgtacccgcccctagcgccggaagttcactgttcagcacaggggtggcgccagccctggctccaaaggtggaacctgcggtgccaggccaccatggactcgccctggggaacagtgcgttgcatcatctggacgctctggaccagctcctcgaagaagccaaagtgactagcggtctggtaaagcccaccacctcaccgctgatccctaccacaactccagcccgccctttactcccattttctactggaccaggctcgcccctctttcagcccctgtcctttcaatctcagggctctccccccaaagggccggaattatcgctggcaagcatacatgtgcccctagagagcattaagccttcttctgcactgcccgtcacagcctacgataaaaatggatttcgcattcttttccactttgccaaagagtgccctcccggcagaccggacgtgctggttgtggtagtgtctatgctgaacaccgcaccactcccagtgaagtcaattgtgctccaggccgcagtgccaaaaagcatgaaggtgaaattgcagcctccctccggcacggagttgtcgcctttttctcctatccaacccccagccgcgattactcaagtaatgctgctggccaatccgctgaaggaaaaagtgcggctgaggtacaaactgacttttgccctcggagaacaactgtctacagaagtgggggaggtcgatcaatttccccccgttgaacagtggggtaacctttag

SEQ ID NO: 109862 - DNA, 1956 bp, Artificial Sequence
  derived and/or modified sequence
atgaagaactgcggccggcggttccacaacgaggtgggcaagttccggttcttaaacgaactgatcaaggttgtgtctcctaagtacctcggggatagagtatcagagaaggtgaaaacaaaagtgattgagctcctgtatagctggacgatggccctgcctgaagaagctaagataaaggatgcttaccacatgctgaaacggcagggtatagtccagagcgacccacctattccggtcgaccgcacccttatcccctccccgccaccccggccgaaaaacccagtgttcgatgacgaggaaaagagtaagcttctagccaagctgttaaagtcgaaaaacccagatgacctgcaggaggcaaataagctcatcaaaagtatggtgaaagaggacgaggctagaattcagaaggtgacaaagcggctgcatactctggaagaagtgaacaataacgtcaggctactgtccgagatgctgctgcattatagccaggaggacagctcggacggagaccgtgagttgatgaaagagttgtttgatcagtgtgaaaataagcgtagaacgctgtttaagctggccagtgagaccgaagacaacgacaacagtctcggcgatatcctacaggctagcgacaatttgtcccgggtgattaactcttacaaaacgatcattgagggacaggtcatcaacggggaagtggccacactaacactgccagattcagaggggaattcacagtgctccaatcagggtactttaatcgacctcgctgagctggacactacgaactctctttccagtgtccttgcaccagcacctactccaccctccagcggaataccaattctgccaccaccccctcaggcgtcaggtcccccccgctctcgatcttctagccaggccgaagccacactaggcccaagtagcacaagcaacgctctttcatggctcgatgaagaactgctgtgtctcggactcgcagatcccgcacctaatgtgcctcctaaggagagcgcgggcaattcccagtggcatctgttgcagcgggaacaatcggatcttgatttcttcagcccccggccaggcacagctgcctgtggtgcttccgacgcacccctgcttcagccaagtgcacctagcagcagctctagccaggcccccctgccacctccatttccagctcccgtggtgcctgcctcggttccggctcccagcgccgggtcgtccttattctctacaggggtggccccggctctggctccaaaggtggagccagccgtgccaggtcaccacggcctcgctctgggcaattccgcgctgcatcacctggacgcattggatcagttgttagaggaagccaaggtgacctccggactcgtcaaacctacaacttccccacttatcccgacgactaccccggctcggcccctcctgcccttctccacggggcctggatcaccactttttcaaccactttccttccagtcacaaggaagcccacccaaggggcctgaactctcccttgcgagcatccatgttccgttagagtccattaagccttccagcgccctgcccgtgactgcgtacgataaaaacggatttcggatccttttccattttgctaaggagtgtcctcccgggaggccagatgtcttggtggttgtagtatcaatgctgaatactgcccctcttcctgtgaagtccatcgtactgcaggccgcggttccgaagtccatgaaggtcaaactgcagccaccttctgggacagagctgagtcctttctccccaattcaaccacctgcggccattacccaggtgatgcttttggcaaaccccctcaaagaaaaggttcgcttgcgctataagcttacctttgctcttggtgagcagctgtccactgaggttggagaggttgaccagttcccgcccgttgagcagtggggcaacctctag

SEQ ID NO: 109863 - DNA, 1806 bp, Artificial Sequence
  derived and/or modified sequence
atggccctgcccgaggaggccaagatcaaggacgcctaccacatgctgaagcgccagggaatagtgcagtccgaccctcccatacctgtagaccgaactctgatacccagtcctcctccccggcccaagaatcccgttttcgacgatgaggaaaaaagcaagctgctcgcaaagctgcttaagagtaaaaatccggatgacctgcaggaggcaaacaagctcatcaagtccatggtaaaggaggacgaggcacggattcagaaggtgacaaaacggttgcacacgctggaagaggtcaataataatgtcaggctcctcagtgaaatgctgcttcactactcacaggaagattcatctgacggcgacagggaactgatgaaagagctattcgaccagtgcgagaacaagcgcagaacgctgttcaaactggccagtgaaactgaggacaatgacaactctctgggagatatcctccaggccagcgacaatcttagcagggtgattaactcttataaaactatcatagagggccaggtgatcaatggggaggtcgccacactaaccttacccgactctgaaggaaactcacaatgcagcaaccagggaacattaattgacctcgccgagctggacacaacgaactccctctccagcgttctggcccctgcacctaccccacccagttcagggatccccatccttcctccgccacctcaggcgtctggtcctcctcgaagtagaagttccagtcaggcagaggcaacattaggtccatcaagcacatcaaacgcactctcctggctggatgaagagttactctgccttggcctggccgaccctgcacccaacgtgccgcctaaggaatccgcgggcaacagccagtggcatctacttcaaagggagcaaagcgacctggacttctttagtcctcgtcctggcactgctgcgtgcggcgcaagcgatgctcccctgttacaacccagtgctccatcatcctccagctcacaggctccactacccccccctttcccggccccagtggtacctgcaagtgtgcccgccccatccgccgggtcttcacttttcagtacaggggtcgcccctgccttggccccaaaggtagagcccgcagtccctgggcaccatggcctggctttaggaaattcagcacttcaccacttagatgccttagatcagctgctggaggaagcaaaagtgaccagcggactcgtcaaacctaccacaagcccactgatccctactacaacccctgctaggcctcttttgcccttctcaacagggccggggtctccactgttccagcctctgtcctttcagtcccaagggagtccaccaaaaggacctgaactgagcctagcctcaattcatgtcccacttgagagtataaaacccagcagcgcattgccagtgaccgcttacgataaaaatggatttcgtatcttgttccatttcgccaaggaatgtccccctggcaggccggatgtgctagtggtggtggttagtatgctcaataccgctccacttcctgttaagtctattgtgttgcaggccgctgtgcccaagtcaatgaaagtgaagctacagcctccttctgggaccgaactgtcaccattctctccaatccagccccctgccgccatcactcaggtcatgctcctcgccaatccactgaaggaaaaggtccgactgagatacaagctgaccttcgctctcggcgagcagctgtcgacagaggtgggagaggttgaccaatttccccctgtggagcagtggggaaacctctag

SEQ ID NO: 109864 - DNA, 1956 bp, Artificial Sequence
  derived and/or modified sequence
atgaagaactgtggcaggagatttcataacgaggtcggcaagtttcggtttcttaatgagttgatcaaggtcgtttctccaaagtacctgggcgatcgagtgtctgaaaaggttaagacaaaagtgatagaattgttatattcctggactatggctctgcccgaggaggcaaagatcaaagacgcctatcacatgttgaaaaggcagggtattgtacaatcagaccccccaatccccgtagatcggacccttattcctagcccacctcctcgtccaaaaaaccccgtgttcgatgatgaggaaaagagcaagctcctggcaaaactcttgaagagtaagaatcccgatgatctccaggaagccaacaaacttatcaagagcatggtgaaagaagacgaagcccgaatccagaaggtgacaaagcggctgcatactctagaagaagttaacaacaatgtccggcttttgagtgagatgctgctgcactactcccaggaggacagcagtgacggagatagggagcttatgaaagagctgttcgatcagtgcgagaacaaaagacggactctatttaaattggcgtctgaaacagaggataacgacaatagtttgggagatatactgcaagccagcgataatctcagccgagttatcaatagctacaagaccatcatagagggtcaagtcatcaacggcgaggtcgccaccttgactctccctgattcagaggggaacagtcagtgcagcaatcagggaaccctgatcgacctcgctgagctggacaccaccaattccctgtcctccgtcctggccccagcccctacacctccaagctcaggcatcccgatcctcccacctccgcctcaggctagcggaccaccgaggagcaggagctcctcccaagccgaggccacactgggcccttcttctacttctaatgcactgtcttggctcgacgaggagcttctctgccttggtctcgctgatcccgcaccaaatgtgcctcccaaagagagtgctggaaatagtcagtggcatctgctgcagcgggagcagagcgatttagacttcttctctccacggcctggtaccgccgcttgtggcgctagtgatgctccattgctgcaaccctccgccccttcttcctcttcctctcaagcgccactgcctcccccattccccgctcctgtggtcccagcttccgtccctgctccttctgcgggttcttcattattcagtactggtgtggctcccgctctggcaccgaaagtagagcctgcggtgccgggacatcacggcctcgctcttgggaatagtgcgctacaccaccttgatgccctcgaccagctgctcgaggaggcgaaagtcacttctggccttgttaagcccaccacatctcctctcattccaacaactacccccgcacggccattactccctttttctaccggacccggatcgcccctatttcagcctttatcctttcaatcccaggggtcccctcctaaaggccctgaactctccctcgcatctatccacgttcccctggaaagtattaagccgtcatcagctctgccagtgacagcctatgacaagaatgggttccgcatactgtttcacttcgcgaaggaatgtccacctggcagaccagacgtgctagtggttgtggtgtctatgctgaacacagccccactgcccgttaagagtatcgtcctccaagccgctgtgcccaagtccatgaaagtgaaactgcagcctccatccggtactgaactgagcccatttagcccgatccagccccctgccgcaatcactcaggtcatgcttctggcgaacccgctgaaggagaaggttcgccttcgatacaagctgactttcgccttgggggagcagctgtcaactgaggtgggcgaggtcgaccagttccctccggttgagcagtggggaaatctatag

SEQ ID NO: 109865 - DNA, 1956 bp, Artificial Sequence
  derived and/or modified sequence
atgaaaaactgtgggagaagattccacaatgaagtcggaaagtttaggttcctgaatgagttgataaaggtggtgtccccaaagtacttgggggaccgggtgtccgaaaaagtcaaaacaaaagtgattgaattgttgtactcgtggacaatggcgctacctgaagaagctaaaattaaagacgcgtaccatatgctgaaacgtcaaggcatagtacagtccgatccccctattcccgtggaccgcacccttattccctccccaccgccacggccaaagaacccagtgtttgatgacgaagaaaagtcaaagcttctcgccaaattactgaagtcaaagaaccccgacgacctccaggaggcgaataagctaatcaagagcatggtcaaagaagacgaggcccgtatccagaaggtcactaaacgccttcataccttggaggaagtgaacaacaatgtacggttactgagcgagatgttgctgcactacagtcaggaagactccagtgacggagatagagagcttatgaaggagctgttcgatcagtgtgagaataaacgccgaaccctgttcaagcttgcctctgagaccgaagacaatgacaattccttgggagatatacttcaggcctccgataatctgtctcgggtgatcaactcctacaagaccataatcgaggggcaggtcataaacggagaagtggcaaccctgacgctgcccgacagtgaaggcaactctcagtgttctaaccaagggaccctcatcgacttagccgagctggatacaaccaatagcctgagttcagttctggccccagcacccactccccctagctctgggatccctatcctgccacccccacctcaggcttctggacctccgaggtctaggtccagctcgcaagcagaggcaactctaggcccaagcagcacctcaaacgccttgagttggctggacgaggagctcttgtgcctggggttggccgatcccgcaccaaatgtccctcccaaagagtccgccggaaatagtcagtggcatctcttacagagggagcaaagtgatcttgacttttttagccctagacccggtacagccgcttgcggggctagtgatgcgcctctgctccaaccctctgccccttcatcgtcgtcctctcaggcacctctacccccaccatttcccgctcccgtggttcccgcaagcgtgcccgcaccatctgccggtagttcactctttagtaccggcgtggcacccgcactcgctcccaaggttgagcccgcagtgccaggtcaccacggcctggctttggggaattccgctctgcatcacctcgacgcgctggaccagttattagaagaggccaaagtgacttcaggcctggtcaagccaaccactagccccctgatccccacaactacacccgctcgtccactcctgcccttctccactggtccgggaagtcccctctttcagcccctgtctttccagagccaggggagtccgcctaagggaccagagctgtccctggcctccatccatgttccgcttgaatccattaagccctcgtccgccctgcctgtaacagcctacgataaaaacggctttcggattctgttccattttgccaaggagtgtccccctggtcgtccggacgtcctcgtggttgtagtaagtatgctgaacactgcgcctctaccagtaaagagtattgtgttgcaagcggcagtgcctaagtccatgaaagtcaaactgcagccccctagcggcacagaactttcccccttttcccctatccagccaccagccgctattacacaagtgatgctgctcgctaaccccctcaaagagaaggtgcgcctgcggtataagcttacctttgcgcttggcgagcagctgtcaacagaggtgggggaagtagatcaatttccgccagtcgaacaatgggggaatctttag

SEQ ID NO: 109866 - DNA, 1806 bp, Artificial Sequence
  derived and/or modified sequence
atggcgctgccagaggaagctaaaattaaggacgcctaccatatgctcaagaggcagggaatcgtgcaatctgatcctccaattcccgttgaccgaacactcatcccatcccctcctccccgtcctaagaatccagtgttcgacgacgaggagaaaagtaaacttcttgccaagctgctgaaatccaaaaaccctgacgatctgcaggaagccaacaaactcatcaagtcaatggtgaaggaggatgaggctcggatccaaaaagtcacaaagagactgcatacgctggaggaggtgaataataatgtaaggctactgtccgagatgctgcttcattatagccaagaggactcctccgacggagatagggagctgatgaaggagctgtttgaccagtgtgagaacaaacggaggacactcttcaagctcgccagcgaaactgaggataacgataacagtcttggggacatcctgcaggctagtgataatctcagccgagtgattaacagttacaaaacgattatcgagggtcaggtcatcaatggagaagtggctacccttacgctgcccgactcagaaggaaattcccagtgctcaaatcaggggaccctaattgatctcgccgaactcgacaccacaaattccctgagcagtgtgttggcacccgcacccaccccacctagctctggcatccccatactaccccctcccccacaggcctccggacctcctagatcaaggagttctagtcaggccgaggccaccctgggacctagtagtacctctaacgctctgagttggttagacgaggagctcctgtgtcttggattggccgatccggcaccaaatgtgcctcctaaggaatccgctggcaactcccagtggcacctattgcaaagggaacagtcagatctcgacttctttagccctcggccaggaaccgccgcttgcggagcatctgatgcccctctgctgcagccaagcgccccttccagttctagctctcaggctcctctcccccctccgttccccgcaccagtggttcccgcttctgtcccagcaccgtccgccggttcatcactgttttcaactggcgttgcgccagcccttgctccaaaagtggaaccggctgtgcccggacatcatggcctcgcactggggaacagcgcgctccatcatctagatgctttagaccaattgctggaggaagctaaggtcacctctggcctggtcaaaccgacaacatcccctttgatcccaacaaccacgccagcccgacctttgcttcccttttcaaccggccctggcagccctcttttccaaccactcagctttcaatcccaggggtcccccccaaaaggtccagagcttagcctggccagcattcacgtgcctctcgagtctattaagccctccagcgctctgcctgtcactgcttacgataagaatggctttcgtatacttttccactttgctaaagagtgcccaccaggacggccagatgtcttggtcgtggtggtgtccatgctgaacaccgcgccactgcccgtgaagagcatagtgctgcaggcggctgtgccaaaaagcatgaaggtaaaacttcagcctccgagcgggaccgaactttctccattctcacccattcagcccccagcagccatcacacaggtcatgttgctggcgaacccattgaaggagaaggtccggctgcggtacaagctgactttcgccctgggagaacagctgtctacagaagtgggcgaagtcgaccagtttccacctgttgagcaatggggcaatctttag

SEQ ID NO: 109867 - DNA, 1956 bp, Artificial Sequence
  derived and/or modified sequence
atgaagaactgcggcagaagattccacaacgaggtgggcaagttcagattcctgaacgagctgatcaaggtggtgagccccaagtacctgggcgacagagtgagcgagaaggtgaagaccaaggtgatcgagctgctgtacagctggaccatggccctgcccgaggaggccaagatcaaggacgcctaccacatgctgaagagacagggcatcgtgcagagcgacccccccatccccgtggacagaaccctgatccccagccccccccccagacccaagaaccccgtgttcgacgacgaggagaagagcaagctgctggccaagctgctgaagagcaagaaccccgacgacctgcaggaggccaacaagctgatcaagagcatggtgaaggaggacgaggccagaatccagaaggtgaccaagagactgcacaccctggaggaggtgaacaacaacgtgagactgctgagcgagatgctgctgcactacagccaggaggacagcagcgacggcgacagagagctgatgaaggagctgttcgaccagtgcgagaacaagagaagaaccctgttcaagctggccagcgagaccgaggacaacgacaacagcctgggcgacatcctgcaggccagcgacaacctgagcagagtgatcaacagctacaagaccatcatcgagggccaggtgatcaacggcgaggtggccaccctgaccctgcccgacagcgagggcaacagccagtgcagcaaccagggcaccctgatcgacctggccgagctggacaccaccaacagcctgagcagcgtgctggcccccgcccccaccccccccagcagcggcatccccatcctgcccccccccccccaggccagcggcccccccagaagcagaagcagcagccaggccgaggccaccctgggccccagcagcaccagcaacgccctgagctggctggacgaggagctgctgtgcctgggcctggccgaccccgcccccaacgtgccccccaaggagagcgccggcaacagccagtggcacctgctgcagagagagcagagcgacctggacttcttcagccccagacccggcaccgccgcctgcggcgccagcgacgcccccctgctgcagcccagcgcccccagcagcagcagcagccaggcccccctgcccccccccttccccgcccccgtggtgcccgccagcgtgcccgcccccagcgccggcagcagcctgttcagcaccggcgtggcccccgccctggcccccaaggtggagcccgccgtgcccggccaccacggcctggccctgggcaacagcgccctgcaccacctggacgccctggaccagctgctggaggaggccaaggtgaccagcggcctggtgaagcccaccaccagccccctgatccccaccaccacccccgccagacccctgctgcccttcagcaccggccccggcagccccctgttccagcccctgagcttccagagccagggcagcccccccaagggccccgagctgagcctggccagcatccacgtgcccctggagagcatcaagcccagcagcgccctgcccgtgaccgcctacgacaagaacggcttcagaatcctgttccacttcgccaaggagtgcccccccggcagacccgacgtgctggtggtggtggtgagcatgctgaacaccgcccccctgcccgtgaagagcatcgtgctgcaggccgccgtgcccaagagcatgaaggtgaagctgcagccccccagcggcaccgagctgagccccttcagccccatccagccccccgccgccatcacccaggtgatgctgctggccaaccccctgaaggagaaggtgagactgagatacaagctgaccttcgccctgggcgagcagctgagcaccgaggtgggcgaggtggaccagttcccccccgtggagcagtggggcaacctgtag

SEQ ID NO: 109868 - DNA, 1806 bp, Artificial Sequence
  derived and/or modified sequence
atggccctgcccgaggaggccaagatcaaggacgcctaccacatgctgaagagacagggcatcgtgcagagcgacccccccatccccgtggacagaaccctgatccccagccccccccccagacccaagaaccccgtgttcgacgacgaggagaagagcaagctgctggccaagctgctgaagagcaagaaccccgacgacctgcaggaggccaacaagctgatcaagagcatggtgaaggaggacgaggccagaatccagaaggtgaccaagagactgcacaccctggaggaggtgaacaacaacgtgagactgctgagcgagatgctgctgcactacagccaggaggacagcagcgacggcgacagagagctgatgaaggagctgttcgaccagtgcgagaacaagagaagaaccctgttcaagctggccagcgagaccgaggacaacgacaacagcctgggcgacatcctgcaggccagcgacaacctgagcagagtgatcaacagctacaagaccatcatcgagggccaggtgatcaacggcgaggtggccaccctgaccctgcccgacagcgagggcaacagccagtgcagcaaccagggcaccctgatcgacctggccgagctggacaccaccaacagcctgagcagcgtgctggcccccgcccccaccccccccagcagcggcatccccatcctgcccccccccccccaggccagcggcccccccagaagcagaagcagcagccaggccgaggccaccctgggccccagcagcaccagcaacgccctgagctggctggacgaggagctgctgtgcctgggcctggccgaccccgcccccaacgtgccccccaaggagagcgccggcaacagccagtggcacctgctgcagagagagcagagcgacctggacttcttcagccccagacccggcaccgccgcctgcggcgccagcgacgcccccctgctgcagcccagcgcccccagcagcagcagcagccaggcccccctgcccccccccttccccgcccccgtggtgcccgccagcgtgcccgcccccagcgccggcagcagcctgttcagcaccggcgtggcccccgccctggcccccaaggtggagcccgccgtgcccggccaccacggcctggccctgggcaacagcgccctgcaccacctggacgccctggaccagctgctggaggaggccaaggtgaccagcggcctggtgaagcccaccaccagccccctgatccccaccaccacccccgccagacccctgctgcccttcagcaccggccccggcagccccctgttccagcccctgagcttccagagccagggcagcccccccaagggccccgagctgagcctggccagcatccacgtgcccctggagagcatcaagcccagcagcgccctgcccgtgaccgcctacgacaagaacggcttcagaatcctgttccacttcgccaaggagtgcccccccggcagacccgacgtgctggtggtggtggtgagcatgctgaacaccgcccccctgcccgtgaagagcatcgtgctgcaggccgccgtgcccaagagcatgaaggtgaagctgcagccccccagcggcaccgagctgagccccttcagccccatccagccccccgccgccatcacccaggtgatgctgctggccaaccccctgaaggagaaggtgagactgagatacaagctgaccttcgccctgggcgagcagctgagcaccgaggtgggcgaggtggaccagttcccccccgtggagcagtggggcaacctgtag

SEQ ID NO: 109869 - protein, 3092 aa, Artificial Sequence
  derived and/or modified sequence
MSDANKAAIAAEKEALNLKLPPIVHLPENIGVDTPTQSKLLKYRRSKEQQQKINQLVIDGAKRNLDRTLGKRTPLLPPPDYPQTMTSEMKKKGFNYIYMKQCVESSPLVPIQQEWLDHMLRLIPESLKEGKEREELLESLINEVSSDFENSMKRYLVQSVLVKPPVKSLEDEGGPLPESPVGLDYSNPWHSSYVQARNQIFSNLHIIHPTMKMLLDLGYTTFADTVLLDFTGIRAKGPIDCESLKTDLSIQTRNAEEKIMNTWYPKVINLFTKKEALEGVKPEKLDAFYSCVSTLMSNQLKDLLRRTVEGFVKLFDPKDQQRLPIFKIELTFDDDKMEFYPTFQDLEDNVLSLVERIAEALQNVQTIPSWLSGTSTPVNLDTELPEHVLHWAVDTLKAAVHRNLEGARKHYETYVEKYNWLLDGTAVENIETFQTEDHTFDEYTEFIEKFLSLASEIMLLPQWIHYTMVRLDCEDLKTGLTNKAKAFANILLNDIASKYRKENECICSEFEAIKEHALKVPETTEEMMDLISYVEKARTVGIEELILRIQESKRQMSYFLDVFLFPQEDLALNATVLMWPRKINPIFDENDELIENAKHKKENELMAKREKLILEIEKESRRMEEFTEFAELERMQQYVTDVRQLQKRIQESEEAVQFINKEEELFKWELTKYPELDKLKVNIEPYQKFFNFVLKWQRSEKRWMDGGFLDLNGESMEADVEEFSREIFKTLKFFQTKLKKELQEKRKAARKRSLEEEKIEEEPKDNATITMCRMRARHWKQISEIVGYDLTPDSGTTLRKVLKLNLTPYLEQFEVISAGASKEFSLEKAMNTMIGTWEDIAFHISLYRDTGVCILSSVDEIQAILDDQIIKTQTMRGSPFIKPFEHEIKAWEDRLIRIQETIDEWLKVQAQWLYLEPIFCSEDIMQQMPEEGRQFQTVDRHWRDIMKFCAKDPKVLAATSLTGLLEKLQNCNELLEKIMKGLNAYLEKKRLFFPRFFFLSNDEMLEILSETKDPLRVQPHLKKCFEGIAKLEFLPNLDIKAMYSSEGERVELIALISTSAARGAVEKWLIQVEDLMLRSVHDVIAAARLAYPESARRDWVREWPGQVVLCISQMFWTSETQEVISGGTEGLKKYYKELQNQLNEIVELVRGKLSKQTRTTLGALVTIDVHARDVVMDMIKMGVSHDTDFLWLAQLRYYWENENARVRIINCNVKYAYEYLGNSPRLVITPLTDRCYRTLIGAFYLNLGGAPEGPAGTGKTETTKDLAKALAVQCVVFNCSDGLDYLAMGKFFKGLASSGAWACFDEFNRIELEVLSVVAQQILCIQRAIQQKLVVFVFEGTELKLNPNCFVAITMNPGYAGRSELPDNLKVLFRTVAMMVPNYALIAEISLYSYGFLNARPLSVKIVMTYRLCSEQLSSQFHYDYGMRAVKAVLVAAGNLKLKYPNENEDILLLRSIKDVNEPKFLSHDIPLFNGITSDLFPGIKLPEADYHEFLECAHEACNVHNLQPVKFFLEKIIQTYEMMIVRHGFMLVGEPFAAKTKVLHVLADTLTLMNEHGYGEEEKVIYRTVNPKSITMGQLFGQFDPVSHEWTDGIVANTFREFALSETPDRKWVVFDGPIDTLWIESMNTVLDDNKKLCLMSGEIIQMSPQMSLIFETMDLSQASPATVSRCGMIYLEPSQLGWEPLVSSWLNSLKGPLCEPEYQALLRGLFAWLIPPSLNQRVELFQLNYLYTTIVSKILKILITFRISNYFKYVPLKTQCTFIKFFLHQQACFIFSLIWSIGGSCDTDGRRVFDTFIRLIILGKDDENPVPDSVGKWECPFDEKGLVYDYMYELKNKGRWVHWNELIKNTNLGDKQIKIQDIIVPTMDTIRYTFLMDLSITYAKPLLFVGPTGTGKSVYVKDKLMNHLEKDQYFPFYINLSARTSANQVQNIIMARLDKRRKGVFGPPMGKKCIIFIDDMNMPALEKYGAQPPIELLRQFFDCGHWYDLKDTSKITLVDIELIAAMGPPGGGRNPVTPRCIRHFNICSINSFSDETMVRIFSSIVAFYLRTHEFPPEYFVIGNQIVNGTMEIYKQSVENLLPTPTKSHYTFNLRDFSRVIRGCLLIERDAVANKHTMIRLFVHEVLRVFYDRLINDDDRRWLFQLTKTVIKDHFKESFHSIFSHLRKQNAPVTEEDLRNLMFGDYMNPDLEGDDRVYIEIPNIHHFSDVVDQCLDEYNQTHKTRMNLVIFRYVLEHLSRICRVLKQSGGNALLVGLGGSGRQSLTRLATSMAKMHIFQPEISKSYGMNEWREDMKSFIAVPVTNRIVDNKSKILEKRLRYLNDHFTYNLYCNICRSLFEKDKLLFSFLLCANLLLARKEIEYQELMFLLTGGVSLKSAEKNPDPTWLQDKSWEEICRASEFPAFRGLRQHFCEHIYEWREIYDSKEPHNAKFPAPMDKNLNELQKIIILRCLRPDKITPAITNYVTDKLGKKFVEPPPFDLTKSYLDSNCTIPLIFVLSPGADPMASLLKFANDKSMSGNKFQAISLGQGQGPIAAKMIKAAIEEGTWVCLQNCHLAVSWMPMLEKICEDFTSETCNSSFRLWLTSYPSSKFPVTILQNGVKMTNEPPTGLRLNLLQSYLTDPVSDPEFFKGCRGKELAWEKLLFGVCFFHALVQERKKFGPLGWNIPYGFNESDLRISIRQLQLFINEYDTIPFEAISYLTGECNYGGRVTDDWDRRLLLTMLADFYNLYIVENPHYKFSPSGNYFAPPKGTYEDYIEFIKKLPFTQHPEIFGLHENVDISKDLQQTKTLFESLLLTQGGSKQTGASGSTDQILLEITKDILNKLPSDFDIEMALRKYPVRYEESMNTVLVQEMERFNNLIITIRNTLRDLEKAIKGVVVMDSALEALSGSLLVGKVPEIWAKRSYPSLKPLGSYITDFLARLNFLQDWYNSGKPCVFWLSGFFFTQAFLTGAMQNYARKYTTPIDLLGYEFEVIPSDTSDTSPEDGVYIHGLYLDGARWDRESGLLAEQYPKLLFDLMPIIWIKPTQKSRIIKSDAYVCPLYKTSERKGTLSTTGHSTNFVIAMLLKTDQPTRHWIKRGVALLCQLDD

SEQ ID NO: 109870 - DNA, 9279 bp, Artificial Sequence
  derived and/or modified sequence
atgagcgacgccaacaaggccgccatcgccgccgagaaggaggccctgaacctgaagctgccccccatcgtgcacctgcccgagaacatcggcgtggacacccccacccagagcaagctgctgaagtacagaagaagcaaggagcagcagcagaagatcaaccagctggtgatcgacggcgccaagagaaacctggacagaaccctgggcaagagaacccccctgctgcccccccccgactacccccagaccatgaccagcgagatgaagaagaagggcttcaactacatctacatgaagcagtgcgtggagagcagccccctggtgcccatccagcaggagtggctggaccacatgctgagactgatccccgagagcctgaaggagggcaaggagagagaggagctgctggagagcctgatcaacgaggtgagcagcgacttcgagaacagcatgaagagatacctggtgcagagcgtgctggtgaagccccccgtgaagagcctggaggacgagggcggccccctgcccgagagccccgtgggcctggactacagcaacccctggcacagcagctacgtgcaggccagaaaccagatcttcagcaacctgcacatcatccaccccaccatgaagatgctgctggacctgggctacaccaccttcgccgacaccgtgctgctggacttcaccggcatcagagccaagggccccatcgactgcgagagcctgaagaccgacctgagcatccagaccagaaacgccgaggagaagatcatgaacacctggtaccccaaggtgatcaacctgttcaccaagaaggaggccctggagggcgtgaagcccgagaagctggacgccttctacagctgcgtgagcaccctgatgagcaaccagctgaaggacctgctgagaagaaccgtggagggcttcgtgaagctgttcgaccccaaggaccagcagagactgcccatcttcaagatcgagctgaccttcgacgacgacaagatggagttctaccccaccttccaggacctggaggacaacgtgctgagcctggtggagagaatcgccgaggccctgcagaacgtgcagaccatccccagctggctgagcggcaccagcacccccgtgaacctggacaccgagctgcccgagcacgtgctgcactgggccgtggacaccctgaaggccgccgtgcacagaaacctggagggcgccagaaagcactacgagacctacgtggagaagtacaactggctgctggacggcaccgccgtggagaacatcgagaccttccagaccgaggaccacaccttcgacgagtacaccgagttcatcgagaagttcctgagcctggccagcgagatcatgctgctgccccagtggatccactacaccatggtgagactggactgcgaggacctgaagaccggcctgaccaacaaggccaaggccttcgccaacatcctgctgaacgacatcgccagcaagtacagaaaggagaacgagtgcatctgcagcgagttcgaggccatcaaggagcacgccctgaaggtgcccgagaccaccgaggagatgatggacctgatcagctacgtggagaaggccagaaccgtgggcatcgaggagctgatcctgagaatccaggagagcaagagacagatgagctacttcctggacgtgttcctgttcccccaggaggacctggccctgaacgccaccgtgctgatgtggcccagaaagatcaaccccatcttcgacgagaacgacgagctgatcgagaacgccaagcacaagaaggagaacgagctgatggccaagagagagaagctgatcctggagatcgagaaggagagcagaagaatggaggagttcaccgagttcgccgagctggagagaatgcagcagtacgtgaccgacgtgagacagctgcagaagagaatccaggagagcgaggaggccgtgcagttcatcaacaaggaggaggagctgttcaagtgggagctgaccaagtaccccgagctggacaagctgaaggtgaacatcgagccctaccagaagttcttcaacttcgtgctgaagtggcagagaagcgagaagagatggatggacggcggcttcctggacctgaacggcgagagcatggaggccgacgtggaggagttcagcagagagatcttcaagaccctgaagttcttccagaccaagctgaagaaggagctgcaggagaagagaaaggccgccagaaagagaagcctggaggaggagaagatcgaggaggagcccaaggacaacgccaccatcaccatgtgcagaatgagagccagacactggaagcagatcagcgagatcgtgggctacgacctgacccccgacagcggcaccaccctgagaaaggtgctgaagctgaacctgaccccctacctggagcagttcgaggtgatcagcgccggcgccagcaaggagttcagcctggagaaggccatgaacaccatgatcggcacctgggaggacatcgccttccacatcagcctgtacagagacaccggcgtgtgcatcctgagcagcgtggacgagatccaggccatcctggacgaccagatcatcaagacccagaccatgagaggcagccccttcatcaagcccttcgagcacgagatcaaggcctgggaggacagactgatcagaatccaggagaccatcgacgagtggctgaaggtgcaggcccagtggctgtacctggagcccatcttctgcagcgaggacatcatgcagcagatgcccgaggagggcagacagttccagaccgtggacagacactggagagacatcatgaagttctgcgccaaggaccccaaggtgctggccgccaccagcctgaccggcctgctggagaagctgcagaactgcaacgagctgctggagaagatcatgaagggcctgaacgcctacctggagaagaagagactgttcttccccagattcttcttcctgagcaacgacgagatgctggagatcctgagcgagaccaaggaccccctgagagtgcagccccacctgaagaagtgcttcgagggcatcgccaagctggagttcctgcccaacctggacatcaaggccatgtacagcagcgagggcgagagagtggagctgatcgccctgatcagcaccagcgccgccagaggcgccgtggagaagtggctgatccaggtggaggacctgatgctgagaagcgtgcacgacgtgatcgccgccgccagactggcctaccccgagagcgccagaagagactgggtgagagagtggcccggccaggtggtgctgtgcatcagccagatgttctggaccagcgagacccaggaggtgatcagcggcggcaccgagggcctgaagaagtactacaaggagctgcagaaccagctgaacgagatcgtggagctggtgagaggcaagctgagcaagcagaccagaaccaccctgggcgccctggtgaccatcgacgtgcacgccagagacgtggtgatggacatgatcaagatgggcgtgagccacgacaccgacttcctgtggctggcccagctgagatactactgggagaacgagaacgccagagtgagaatcatcaactgcaacgtgaagtacgcctacgagtacctgggcaacagccccagactggtgatcacccccctgaccgacagatgctacagaaccctgatcggcgccttctacctgaacctgggcggcgcccccgagggccccgccggcaccggcaagaccgagaccaccaaggacctggccaaggccctggccgtgcagtgcgtggtgttcaactgcagcgacggcctggactacctggccatgggcaagttcttcaagggcctggccagcagcggcgcctgggcctgcttcgacgagttcaacagaatcgagctggaggtgctgagcgtggtggcccagcagatcctgtgcatccagagagccatccagcagaagctggtggtgttcgtgttcgagggcaccgagctgaagctgaaccccaactgcttcgtggccatcaccatgaaccccggctacgccggcagaagcgagctgcccgacaacctgaaggtgctgttcagaaccgtggccatgatggtgcccaactacgccctgatcgccgagatcagcctgtacagctacggcttcctgaacgccagacccctgagcgtgaagatcgtgatgacctacagactgtgcagcgagcagctgagcagccagttccactacgactacggcatgagagccgtgaaggccgtgctggtggccgccggcaacctgaagctgaagtaccccaacgagaacgaggacatcctgctgctgagaagcatcaaggacgtgaacgagcccaagttcctgagccacgacatccccctgttcaacggcatcaccagcgacctgttccccggcatcaagctgcccgaggccgactaccacgagttcctggagtgcgcccacgaggcctgcaacgtgcacaacctgcagcccgtgaagttcttcctggagaagatcatccagacctacgagatgatgatcgtgagacacggcttcatgctggtgggcgagcccttcgccgccaagaccaaggtgctgcacgtgctggccgacaccctgaccctgatgaacgagcacggctacggcgaggaggagaaggtgatctacagaaccgtgaaccccaagagcatcaccatgggccagctgttcggccagttcgaccccgtgagccacgagtggaccgacggcatcgtggccaacaccttcagagagttcgccctgagcgagacccccgacagaaagtgggtggtgttcgacggccccatcgacaccctgtggatcgagagcatgaacaccgtgctggacgacaacaagaagctgtgcctgatgagcggcgagatcatccagatgagcccccagatgagcctgatcttcgagaccatggacctgagccaggccagccccgccaccgtgagcagatgcggcatgatctacctggagcccagccagctgggctgggagcccctggtgagcagctggctgaacagcctgaagggccccctgtgcgagcccgagtaccaggccctgctgagaggcctgttcgcctggctgatcccccccagcctgaaccagagagtggagctgttccagctgaactacctgtacaccaccatcgtgagcaagatcctgaagatcctgatcaccttcagaatcagcaactacttcaagtacgtgcccctgaagacccagtgcaccttcatcaagttcttcctgcaccagcaggcctgcttcatcttcagcctgatctggagcatcggcggcagctgcgacaccgacggcagaagagtgttcgacaccttcatcagactgatcatcctgggcaaggacgacgagaaccccgtgcccgacagcgtgggcaagtgggagtgccccttcgacgagaagggcctggtgtacgactacatgtacgagctgaagaacaagggcagatgggtgcactggaacgagctgatcaagaacaccaacctgggcgacaagcagatcaagatccaggacatcatcgtgcccaccatggacaccatcagatacaccttcctgatggacctgagcatcacctacgccaagcccctgctgttcgtgggccccaccggcaccggcaagagcgtgtacgtgaaggacaagctgatgaaccacctggagaaggaccagtacttccccttctacatcaacctgagcgccagaaccagcgccaaccaggtgcagaacatcatcatggccagactggacaagagaagaaagggcgtgttcggcccccccatgggcaagaagtgcatcatcttcatcgacgacatgaacatgcccgccctggagaagtacggcgcccagccccccatcgagctgctgagacagttcttcgactgcggccactggtacgacctgaaggacaccagcaagatcaccctggtggacatcgagctgatcgccgccatgggcccccccggcggcggcagaaaccccgtgacccccagatgcatcagacacttcaacatctgcagcatcaacagcttcagcgacgagaccatggtgagaatcttcagcagcatcgtggccttctacctgagaacccacgagttcccccccgagtacttcgtgatcggcaaccagatcgtgaacggcaccatggagatctacaagcagagcgtggagaacctgctgcccacccccaccaagagccactacaccttcaacctgagagacttcagcagagtgatcagaggctgcctgctgatcgagagagacgccgtggccaacaagcacaccatgatcagactgttcgtgcacgaggtgctgagagtgttctacgacagactgatcaacgacgacgacagaagatggctgttccagctgaccaagaccgtgatcaaggaccacttcaaggagagcttccacagcatcttcagccacctgagaaagcagaacgcccccgtgaccgaggaggacctgagaaacctgatgttcggcgactacatgaaccccgacctggagggcgacgacagagtgtacatcgagatccccaacatccaccacttcagcgacgtggtggaccagtgcctggacgagtacaaccagacccacaagaccagaatgaacctggtgatcttcagatacgtgctggagcacctgagcagaatctgcagagtgctgaagcagagcggcggcaacgccctgctggtgggcctgggcggcagcggcagacagagcctgaccagactggccaccagcatggccaagatgcacatcttccagcccgagatcagcaagagctacggcatgaacgagtggagagaggacatgaagagcttcatcgccgtgcccgtgaccaacagaatcgtggacaacaagagcaagatcctggagaagagactgagatacctgaacgaccacttcacctacaacctgtactgcaacatctgcagaagcctgttcgagaaggacaagctgctgttcagcttcctgctgtgcgccaacctgctgctggccagaaaggagatcgagtaccaggagctgatgttcctgctgaccggcggcgtgagcctgaagagcgccgagaagaaccccgaccccacctggctgcaggacaagagctgggaggagatctgcagagccagcgagttccccgccttcagaggcctgagacagcacttctgcgagcacatctacgagtggagagagatctacgacagcaaggagccccacaacgccaagttccccgcccccatggacaagaacctgaacgagctgcagaagatcatcatcctgagatgcctgagacccgacaagatcacccccgccatcaccaactacgtgaccgacaagctgggcaagaagttcgtggagcccccccccttcgacctgaccaagagctacctggacagcaactgcaccatccccctgatcttcgtgctgagccccggcgccgaccccatggccagcctgctgaagttcgccaacgacaagagcatgagcggcaacaagttccaggccatcagcctgggccagggccagggccccatcgccgccaagatgatcaaggccgccatcgaggagggcacctgggtgtgcctgcagaactgccacctggccgtgagctggatgcccatgctggagaagatctgcgaggacttcaccagcgagacctgcaacagcagcttcagactgtggctgaccagctaccccagcagcaagttccccgtgaccatcctgcagaacggcgtgaagatgaccaacgagccccccaccggcctgagactgaacctgctgcagagctacctgaccgaccccgtgagcgaccccgagttcttcaagggctgcagaggcaaggagctggcctgggagaagctgctgttcggcgtgtgcttcttccacgccctggtgcaggagagaaagaagttcggccccctgggctggaacatcccctacggcttcaacgagagcgacctgagaatcagcatcagacagctgcagctgttcatcaacgagtacgacaccatccccttcgaggccatcagctacctgaccggcgagtgcaactacggcggcagagtgaccgacgactgggacagaagactgctgctgaccatgctggccgacttctacaacctgtacatcgtggagaacccccactacaagttcagccccagcggcaactacttcgccccccccaagggcacctacgaggactacatcgagttcatcaagaagctgcccttcacccagcaccccgagatcttcggcctgcacgagaacgtggacatcagcaaggacctgcagcagaccaagaccctgttcgagagcctgctgctgacccagggcggcagcaagcagaccggcgccagcggcagcaccgaccagatcctgctggagatcaccaaggacatcctgaacaagctgcccagcgacttcgacatcgagatggccctgagaaagtaccccgtgagatacgaggagagcatgaacaccgtgctggtgcaggagatggagagattcaacaacctgatcatcaccatcagaaacaccctgagagacctggagaaggccatcaagggcgtggtggtgatggacagcgccctggaggccctgagcggcagcctgctggtgggcaaggtgcccgagatctgggccaagagaagctaccccagcctgaagcccctgggcagctacatcaccgacttcctggccagactgaacttcctgcaggactggtacaacagcggcaagccctgcgtgttctggctgagcggcttcttcttcacccaggccttcctgaccggcgccatgcagaactacgccagaaagtacaccacccccatcgacctgctgggctacgagttcgaggtgatccccagcgacaccagcgacaccagccccgaggacggcgtgtacatccacggcctgtacctggacggcgccagatgggacagagagagcggcctgctggccgagcagtaccccaagctgctgttcgacctgatgcccatcatctggatcaagcccacccagaagagcagaatcatcaagagcgacgcctacgtgtgccccctgtacaagaccagcgagagaaagggcaccctgagcaccaccggccacagcaccaacttcgtgatcgccatgctgctgaagaccgaccagcccaccagacactggatcaagagaggcgtggccctgctgtgccagctggacgactag

SEQ ID NO: 109871 - DNA, 9279 bp, Artificial Sequence
  derived and/or modified sequence
atgtccgatgcaaataaagctgccatagccgccgaaaaggaggccttgaacttaaaactccctccaatcgtccacctgccggagaacataggtgtggatactccaactcaaagcaagctcctgaaatatagacgttctaaggagcaacagcagaaaattaatcagcttgtcattgacggcgctaagagaaacttggatcgcactctcggcaagcggactccactactaccacctccagattaccctcaaacaatgacgtccgagatgaaaaaaaagggtttcaactatatatatatgaagcagtgcgtggagtcaagcccattggtgcccatccagcaggaatggctggatcacatgctgcgacttattccggagagtcttaaggagggcaaggagagagaggagttgttggagtctttaatcaatgaggtttccagcgatttcgagaattccatgaagcgctacctggttcagtcagtgcttgtgaaacctcctgtcaaaagcctcgaagatgaaggagggcctctgcctgaatccccagttggactggactattccaacccatggcattccagttatgtccaagccaggaaccaaatcttctctaacctgcatattattcaccctaccatgaaaatgctactggacctcgggtacactactttcgctgatactgtgttgttggattttacaggtattagagcaaagggccccatcgactgtgagagcttgaaaactgatttgtcaattcagacgagaaatgccgaagagaaaataatgaacacttggtaccctaaggtaattaatctattcactaaaaaggaggccctggagggggtgaagccagagaagctggacgcgttttattcctgtgtgtcgactttgatgtccaaccaactgaaagatctcctccgccggaccgtggaaggcttcgtgaagttgtttgatcctaaagaccagcaaagattacccatctttaagatagaattgactttcgacgatgataaaatggaattttacccaacattccaggacctcgaggacaacgtgctgagtctggtggaacgcattgccgaggctcttcagaatgtgcagacaataccctcatggctttccggtacatccacacccgtaaacttggatactgagcttccggagcatgtgctgcactgggcagttgacactctaaaggctgccgttcaccggaatctggagggggcccgaaaacactatgagacctacgtggaaaaatataattggctcctggatggtaccgccgtcgagaatatagagacatttcagactgaagatcacacatttgacgagtacacagagtttatcgaaaaatttttgagccttgcctctgagataatgctccttcctcaatggatccactacaccatggtgagactagattgtgaagacttgaagactgggctcacaaacaaggccaaggctttcgccaacattctactgaacgacattgcctctaaatacagaaaggagaatgaatgcatttgcagtgagttcgaggccatcaaggaacacgccctcaaagtgcccgaaacaacagaggagatgatggacttgatcagttacgtcgagaaggccagaacggtcggcatagaagaactcatcttgagaatccaggagtctaaaagacaaatgtcctattttctggacgtgttcctttttccccaagaagacttggccttgaacgccaccgtcctgatgtggcctaggaagataaaccctattttcgatgaaaacgatgaactgatcgagaacgcaaaacataaaaaggagaatgagctaatggccaagcgagagaagttgatactggaaatcgagaaagaatctcggaggatggaagagttcaccgaatttgcagagttagaaaggatgcagcagtacgtaacagatgtgaggcagctacaaaaaagaatccaggaaagtgaggaggcagttcaatttatcaataaagaggaagagctttttaagtgggaactgacaaagtaccctgagctcgataagcttaaagtcaatatcgaaccatatcaaaaattcttcaacttcgtcttgaagtggcagagatcagaaaaacgctggatggacgggggttttctggacctgaacggcgaaagcatggaagcggatgttgaagaattttcacgggaaattttcaagactctgaaattttttcaaacaaagctcaagaaagaactgcaggaaaagcgtaaagcggccaggaagaggtcactggaggaagaaaaaattgaggaggagccaaaggacaatgctaccattactatgtgtcgcatgcgggcgcgtcactggaagcaaatttctgaaattgtcggctacgatttgactccagacagcggaaccacactgaggaaggtactgaagctgaacttgaccccatatcttgaacagtttgaagtaatctctgcgggtgcatctaaggaattttctctggaaaaagcaatgaacacaatgataggaacatgggaagacatagcatttcatatttctctctaccgcgataccggggtgtgcattctatcttccgtggacgaaatccaggcgattctggatgatcaaatcattaagactcaaacgatgagagggtccccatttatcaagcctttcgagcatgagatcaaggcctgggaggatcgcctgatcaggatccaagaaacaattgatgagtggctgaaggtgcaggcacaatggctctatctggagcctattttctgctcagaggacatcatgcagcagatgccggaagaaggtagacagttccagacagtggatcgtcactggagagatattatgaaattttgtgccaaggaccccaaggtcttagccgctacctccttaactggcttgctggagaaactgcaaaactgcaacgaactgctggaaaaaatcatgaagggactgaatgcctatcttgagaagaaaaggctgttctttccgcggtttttttttctgtccaacgacgaaatgctcgagatacttagcgaaacgaaagacccactgcgggtgcagcctcatttaaagaaatgttttgaaggaattgccaagttagaattcctgccaaacctggacattaaagcgatgtatagcagcgagggcgagcgcgtagagcttatagcattgattagtaccagtgccgcccgcggcgccgttgaaaaatggctgattcaagtggaagatcttatgctccgttcagtgcacgatgtcatcgcagcggccaggctcgcctacccagaatctgcgagaagggattgggtgcgggaatggcccggacaggtcgtgctatgcatcagtcagatgttttggaccagcgagacgcaggaagtgatcagtggcgggacagaggggctgaagaagtattacaaggagctgcagaaccaactgaacgagatagtggaattggtgcgaggaaagctctctaagcagacaagaactacactaggtgcactggtgaccatcgacgtgcatgcccgggatgtcgtgatggacatgatcaaaatgggggtgtcccatgacaccgactttttgtggctcgcccagctacgatactactgggaaaatgaaaatgcccgggtgcggattattaattgtaatgtgaagtatgcctacgaatacctcggcaattccccgcggctggtgatcactcccctcacggatcggtgctaccgaacactcatcggcgcgttctacctgaatctgggcggagctcccgaaggtcccgctggcacaggaaaaaccgaaaccacaaaagatcttgccaaggctctcgccgtccagtgtgtagtgtttaactgttcagatggcctggattaccttgccatgggaaaatttttcaaaggactggcttcatctggggcatgggcctgcttcgacgagttcaaccgcatagaactagaggtgctgagcgtggttgctcagcagattttatgcatccaacgagctatccagcaaaaactcgtggtgtttgtgttcgagggtacagaactgaaactcaaccccaactgttttgtcgccatcactatgaaccccgggtacgctgggcgcagcgagctgccagacaacttgaaagtattgttccgtaccgtagccatgatggttcccaactacgctttaatcgccgagatcagcctgtactcctatggcttccttaacgctcgccctctatcggtgaagatagttatgacgtaccggctctgcagcgagcagctgagcagtcagtttcactacgactatgggatgagggctgtgaaagccgttctcgtggctgccggtaatctgaaactgaagtacccaaacgagaacgaggatatcctattactccgctcaataaaagacgtgaacgaaccaaaattcctctctcacgacataccactgtttaatggcattactagcgatctgttcccagggatcaaactgcccgaggctgattaccatgagtttctagaatgtgcgcacgaggcgtgcaatgtgcacaatttgcagcctgtcaagttcttcttagagaagattatccagacatatgagatgatgattgtgaggcacggttttatgctcgttggggaacctttcgccgctaagactaaggtgttgcatgtgttggccgacaccctgacccttatgaatgaacatggatatggagaagaggaaaaagtgatctatcggacagttaaccctaaatctatcacaatgggtcaattattcggacagtttgatcccgtgagtcacgagtggactgatggcattgtggccaacactttcagagagttcgccctgtcagagaccccggacaggaaatgggtggttttcgacgggcctattgacacgctgtggatcgagtctatgaatactgttctcgatgacaataaaaaactgtgcctgatgtccggggagattattcagatgtcccctcagatgtctctcatttttgagaccatggatttgagccaggcctcgccagcaactgtaagtcgctgtggcatgatctacctggagccctcccagctgggttgggagccgctggtcagcagctggcttaactcgctgaaaggccctttgtgcgagcctgagtaccaggccctgttaaggggcctttttgcttggctaatcccacctagcctgaaccagcgggtggagctctttcaactgaattacctatatacaaccatagtgagcaaaattctgaagatcctgatcactttcaggatttccaactattttaagtacgtgcctttgaagactcagtgtacattcatcaaatttttccttcaccagcaggcttgttttatattttccctaatttggagcataggaggttcttgcgacacggacggcagacgtgtctttgacacctttatacgactgatcatcctaggcaaagacgacgagaaccccgtgcctgatagcgtcggcaaatgggagtgcccatttgacgagaagggactggtttacgattacatgtatgagctgaagaacaagggccggtgggttcactggaatgaactcattaagaatactaacctgggggacaagcaaatcaaaattcaggatatcatcgtccctactatggataccatcaggtacacatttcttatggacttatcgatcacgtatgctaagcccctgctgtttgtgggacccacaggaacgggcaaaagcgtttacgttaaggacaagctcatgaatcacctggaaaaagaccaatatttccctttttacattaacctgtctgctcgcactagcgcaaatcaggtgcagaacataatcatggctcgtctagataagcgtcgaaagggtgtgtttgggccaccaatgggcaaaaagtgcatcattttcatcgatgatatgaacatgcccgctctcgaaaagtacggagcacagccccctatagaacttttgcgtcagttctttgactgtggccattggtacgacctcaaggatacttccaaaatcactctggttgatatagagcttatcgctgctatgggcccaccagggggaggcaggaacccagtcaccccccgctgcatacgccacttcaatatttgttctatcaactcttttagcgacgaaaccatggttcgtatctttagcagcatagtcgcattctacttacggacccacgagtttcccccggagtatttcgtgatcggtaaccagatcgttaatgggacaatggaaatttacaaacagtcagtggagaacctcctcccaacaccaacaaaatcacactacacatttaatctcagggacttctcccgcgtgattagaggatgtctactgattgaacgtgatgcggtggctaataagcacaccatgattcgattgttcgtgcatgaagtgctcagggtgttctatgatcggctcataaacgatgacgatagacggtggctgtttcagttgaccaagaccgtaattaaagaccactttaaggagtccttccactctatattcagccatctgagaaaacagaacgctcccgtaacagaagaggacttgagaaatctgatgttcggcgattacatgaacccagatctggaaggtgacgacagggtttacattgaaatccccaatattcatcactttagtgatgtggttgaccagtgcctcgacgagtataatcagactcataaaaccaggatgaatctcgtgatttttcgctacgttctggaacacttgagcagaatctgccgcgttttgaaacagtcgggcggaaatgcacttctggttggtctcgggggttcagggcgccagagtctcaccagattggcaacatccatggccaagatgcacatttttcagcccgaaatatcaaagtcttacggcatgaatgagtggagggaagatatgaaaagctttattgccgtcccggttaccaacagaatcgtggacaacaagagcaagattctggagaaaaggctgcgctatcttaatgaccacttcacttacaatctgtactgtaacatttgcagaagtctctttgaaaaggataaactgctcttttcattcttgctctgcgcaaaccttctccttgcccgaaaggaaatagaatatcaagaattgatgtttctgttaacaggcggagtttccctgaagtccgctgagaagaatcctgatcccacctggctccaggataagtcttgggaagagatatgtagggcctctgagttccccgcttttagaggattgagacagcatttctgtgagcatatttacgaatggagggagatttacgattccaaagagccccacaacgcaaagtttcccgctccaatggacaaaaatctaaacgaattgcaaaagattatcatcctgcggtgtctgcgacctgacaaaattaccccagccatcactaactacgtgactgacaagctcggaaagaagttcgtggagcctcctccctttgatctcacaaaatcttacctagactcaaattgtacaattcccctgattttcgtcctctcaccaggggctgacccaatggcaagcctcttaaagttcgctaacgataaaagcatgagcggtaataaattccaggctatttcattaggacaagggcaaggccctatcgcagctaaaatgattaaagccgcgattgaagaaggaacctgggtctgcctccagaattgccatcttgccgtgagctggatgcccatgctcgagaagatctgcgaagactttactagcgagacctgtaattcctcatttcgcctttggttgacaagttacccctcctccaaatttcccgtgaccattctacaaaatggagtgaagatgactaacgagccaccaacaggcctgcggctgaatctgctgcagagctacctgactgatcccgtctctgatcctgaattcttcaaagggtgtcgcggaaaggaactggcctgggagaagctgttatttggtgtgtgctttttccacgccctggtccaggaaagaaagaagttcggacctctggggtggaatatcccgtatggctttaacgaaagcgacctacgtatcagcattaggcagttacagctgtttatcaacgaatacgataccatcccctttgaggccatctcttatctgaccggtgaatgcaactacggcggccgggttaccgacgactgggatcgccgactgttactgacaatgttggcagatttctacaacctctatattgtggaaaacccccactacaagtttagcccaagcggcaattatttcgcccctccaaaggggacgtatgaggattacattgagtttatcaagaagctgccatttactcagcatcctgaaatttttgggttacatgagaatgttgacatatccaaggatctgcagcagaccaaaactctttttgaatctctgttgcttacccaggggggaagcaaacaaaccggcgcttctggctctacagaccagatcctgttagagataacaaaagacatccttaacaagctccccagcgacttcgacattgaaatggctctaagaaagtatcctgtgaggtacgaggaatccatgaacacagtgctggtccaagagatggagcgctttaacaacctaatcatcactatccgaaatactctaagagacctcgagaaggctatcaagggcgtggtggtgatggactcggcactggaggcattaagtggctccttgctggtgggcaaggtccccgagatatgggccaaacggagctatccatccctgaaaccactgggctcgtacatcactgatttcttggcgagactgaacttcttacaggactggtacaactcgggaaagccatgtgtcttctggttgagtgggtttttcttcacccaggctttcctgaccggtgctatgcagaattacgcccgtaagtacacaacacccattgatctactgggatacgagtttgaggtgatcccatcggatacttccgacacaagccctgaagatggtgtttatattcatggactctatctagacggagcgagatgggatagggaatctggcttgttagctgagcagtaccctaaattgctgttcgatctcatgccaattatttggatcaaaccaacccagaagtctaggatcatcaagagcgatgcgtatgtgtgcccattatataagacttctgagcggaagggcaccctgtctacgaccggtcactccacaaactttgtgattgctatgttactgaagacagaccagcccacgaggcactggataaaaaggggggtagcactgctgtgccagctggatgattag

SEQ ID NO: 109872 - DNA, 9542 bp, Artificial Sequence
  derived and/or modified sequence
gcccttctccagctactcgtttgagagccggtggcgttccggaggtttctccctcgttatccccctgcctttcacctgaggagaggctctgactgtctctctctctctctggcgtctgcgcagcggggaagtagtgagaaacaatcagagtacagagtattttaatctttaggggatcaagatgtcagatgcaaacaaagctgccattgcagcagaaaaggaagctctgaacttgaagttaccccccattgtccatctcccagaaaacataggcgttgatacaccaacacaaagtaagctgctaaaatacagaagatccaaggagcagcagcagaaaattaatcagttagtaattgatggagccaaaagaaatttagacagaacactgggtaaaagaacacctctattaccaccacctgattatcctcaaactatgaccagtgaaatgaaaaaaaaaggattcaactatatttatatgaagcaatgtgtagaaagtagtcctttagtacctattcagcaggaatggctggatcacatgttaaggctgatacctgagtctttaaaggaagggaaagaaagagaagaacttcttgaaagtctcataaatgaggtgtcaagtgactttgaaaacagcatgaagagatatttggtgcagagcgttcttgtgaaaccaccagttaaatcgcttgaagatgaaggaggtcctttacctgaatctcctgtaggcctagattattctaatccttggcattctagctatgtgcaggcaagaaatcaaatattctctaatttgcacattattcatccaactatgaaaatgttactggaccttggttatacaacatttgctgatacagttttgttggacttcacaggaattagagctaaaggtccaattgactgtgaatcactgaaaactgatctatcaatacaaactagaaacgcagaagagaagataatgaatacatggtatccaaaggttataaatctctttaccaagaaggaggcactagaaggtgttaaacctgaaaaattggatgcattttatagctgtgtttccacacttatgtcaaatcagctaaaggatctattaaggagaactgtagaaggatttgtaaaactctttgacccaaaagatcaacaaaggctgccaatatttaagatagaattgacatttgatgacgacaaaatggaattttatcctacctttcaagatttggaagataatgtcttgagtttggtggaacgaatagccgaagctctgcagaatgtccaaacaatcccctcttggctatcaggaacttcaacaccagtaaatcttgacacagaacttcctgaacacgtgttacactgggctgttgatacactgaaggcagcagtacatcggaacttagaaggtgcaagaaagcattatgagacatatgttgaaaaatataattggctccttgatgggactgcagttgagaatatagagacttttcagacagaagatcatacttttgatgaatatacagagtttatagaaaaatttctcagtcttgcctcagaaataatgcttttgcctcagtggattcattacactatggtgcgtttggattgtgaagatttgaagacaggcctgacaaataaagcaaaagcctttgcaaacatattattaaatgacatagcttcaaaatatagaaaagaaaatgaatgtatttgcagtgaatttgaagcaattaaagaacatgcattaaaagtccctgaaacaacagaagagatgatggatctgatatcttatgtagaaaaagcccggactgtaggaatcgaagagttgattttaaggatccaggaatctaaacgccaaatgagttactttttagatgttttcctatttcctcaagaagacttagctttaaatgcaactgtcctcatgtggcctaggaaaattaatcccatctttgatgaaaatgatgagctaattgagaatgctaaacataaaaaagaaaatgaactaatggccaagagagagaaacttattttggaaatagaaaaagaatcacgccgcatggaggagtttacagaatttgcagagctggagcgcatgcaacagtatgtgacagatgtaagacaactacaaaaacgtattcaggaatctgaagaagcagtgcagtttattaataaagaagaggaacttttcaagtgggaattgacaaaatatcctgaactggataaattaaaagttaacattgagccctatcagaagttttttaattttgttttgaagtggcagcgatcagaaaaacggtggatggatggagggtttttggacctcaatggggaaagcatggaggctgatgtggaagagttttcccgagaaatttttaagacactaaaatttttccaaacgaagctaaagaaagaattacaagaaaaaagaaaggcagcaagaaaacggtctttggaagaagagaaaattgaagaagaaccaaaagacaatgctactattactatgtgcagaatgagagctcgtcactggaaacagatatcagaaattgtaggctatgacttgactccagactctggaactacactgagaaaagttttaaaattaaaccttaccccatacttggaacaatttgaagtgataagtgcaggtgcaagcaaggaattttcattagagaaagccatgaatacaatgataggaacttgggaagatattgcttttcatataagtctgtatcgtgacactggagtctgtattctttcttcggtggatgagattcaggccatccttgatgatcaaattataaaaactcagacaatgagaggctcacctttcatcaaaccatttgaacatgagatcaaggcctgggaggaccgcttgattcgaatacaagaaacaattgatgaatggttaaaagtacaagctcaatggctgtacttagagcccatcttttgttctgaggatatcatgcaacagatgccagaagaagggcgtcaatttcagacagtagacagacactggagagatatcatgaagttttgtgctaaagatccaaaggttcttgctgccacttctttaacaggtttattggaaaaactacagaactgcaatgaacttttggagaaaattatgaaaggtcttaacgcatatcttgaaaagaaacgtcttttcttccctcgttttttcttcttatctaatgatgaaatgttagagattttatcagagaccaaagatccacttagagttcagccacatttaaaaaaatgctttgagggcattgctaaattagagttccttcccaatttggacattaaagccatgtatagctctgagggcgagcgagtggagctgattgcactcatttccacgtctgcagcgcggggtgctgtggaaaagtggctcattcaagtggaagacctaatgctccggagtgttcacgatgtgatcgctgcagccaggctggcttatccagaatctgcaagaagagactgggttcgagagtggcctggccaagttgtactttgtatttctcaaatgttctggacatctgagacacaggaagtgataagtggcgggacggagggattaaagaagtattataaggaacttcagaaccaactgaatgagattgtagagctggtaagaggaaagttgtctaagcagaccaggaccactctgggggctttggttactattgatgtccatgctagagatgtggtcatggacatgattaaaatgggtgtctcacatgatacagatttcctgtggcttgctcagctccgatattattgggaaaatgagaatgcccgagttcgtatcattaattgcaatgtaaaatatgcttatgaatatcttggtaactcacctcgacttgtcattacgcctctaactgacaggtgttacagaacattgataggtgctttctatttaaaccttggaggtgctccagaggggccagcaggcacaggaaaaaccgaaaccaccaaggacttggctaaagctcttgctgtacagtgtgtggtgttcaactgttctgatgggctagattatctagcaatgggaaagttttttaaaggactggcttcttctggtgcttgggcttgctttgatgaattcaatcgaattgagttggaagtgttgtcagtggtagctcaacagatcctttgcattcagagagctattcaacagaagttggttgtgtttgtttttgaagggacagaacttaagctcaatccgaattgttttgtagctattaccatgaatcctggctatgcaggacgctctgaattgccggacaatcttaaggttctttttagaacagtggctatgatggttccaaactatgcgcttatagcagaaatctccctctactcttacggatttttgaatgcaagacctctgtctgtgaaaatagtaatgacctataggctttgctcagagcagctctcatcgcaatttcattacgactatggaatgcgagcagtaaaagccgttttagtggctgctggcaatctaaaactaaaatacccaaatgaaaatgaagatatacttcttcttcgatcaattaaagatgtaaatgaaccaaagtttttatcacatgatatacctttatttaatggaataactagtgacttatttcctggtattaaacttcctgaagctgactatcacgaatttttggaatgtgctcatgaagcctgcaatgtacataatcttcagcctgttaaattttttcttgaaaaaataattcaaacatatgaaatgatgattgttagacatggttttatgttagtaggagagccttttgctgctaagacaaaagttctgcatgtgctggcggatacgctaactttaatgaatgaacatggctatggagaggaagaaaaggtcatttatagaactgtaaaccccaaatctattactatgggccaactttttggacagtttgacccagtgtctcatgagtggactgatggtattgtggctaacacttttagagaatttgccttatcagaaacacctgaccggaaatgggttgtatttgatggtcctattgacactttgtggatagagagcatgaacacagtattggatgataataaaaagctttgccttatgagtggagaaatcattcagatgtccccccaaatgagcctcatctttgaaacaatggacctttcccaggcatcccctgccactgtaagtcgttgtggtatgatttatttggagccttcacagttaggatgggaaccacttgtgtcttcttggttgaattcactgaaaggacctctgtgtgaaccagaatatcaagctcttctgagaggactttttgcctggttaataccaccctctttaaaccagcgggttgaattattccagctaaactatttgtatacaaccatagtgtctaaaattttaaaaattctaattactttccgtatttcaaattattttaaatatgtgcctctaaaaactcaatgtacatttattaaattttttctccaccaacaggcttgctttatattctctttgatttggtcgattggaggaagttgtgatacagatggccgtcgtgtttttgatactttcatacgattaatcatactgggaaaagatgatgaaaacccagtgccagattctgtgggtaaatgggaatgcccatttgatgaaaaaggcctggtctatgactacatgtatgagttgaaaaacaaaggtcgctgggtccattggaatgaattaattaaaaatactaatttaggagataaacaaatcaagattcaagatatcatagtccctacgatggacacaattagatatacgtttctaatggatttgagtattacctatgcaaagccactcctttttgtgggtccaacgggtacaggaaaatctgtgtatgtgaaggataagctaatgaatcacttggaaaaggaccagtactttcctttttatattaacttatctgcacggaccagcgccaatcaggttcagaacattatcatggctagattggataaaagacgcaaaggagtctttggaccacctatgggaaagaagtgtataatttttatagatgatatgaatatgcctgcattggagaagtatggagctcaaccacctattgaattattacgacagttttttgactgtggacattggtacgaccttaaggacacaagtaaaatcacgctggtggacatagagctgattgctgcaatgggccctccaggtggtggaagaaatccagttactccccgttgtattcgacatttcaacatctgcagtattaattcttttagtgatgaaactatggtccgaatcttctcatctattgtagcattctaccttagaactcatgaatttcctccagagtactttgtaattgggaaccagatagtcaatgggactatggagatatataaacaatctgtggaaaatcttttacccactcccacaaaatcccattatactttcaacttgcgtgatttttcacgcgtcatccggggctgtttactcattgaaagagacgccgtggcgaacaaacacactatgatccgtctgtttgtgcatgaggttctccgagtgttttatgatcgcctcattaatgatgatgatcgaagatggctgttccagttaactaaaactgttataaaggaccattttaaagaatcatttcacagtatcttttcacatttgaggaaacaaaatgcaccagtaactgaagaagacttaagaaatctcatgtttggtgattatatgaatcctgaccttgaaggagatgatagagtttatattgaaattccaaatattcatcattttagtgatgttgtggaccagtgcttagatgagtataatcaaacacacaaaacaagaatgaatcttgtcatttttaggtatgttttggaacatttatcaagaatatgtcgagttctaaagcaatctggtggaaatgctttgcttgttggtcttggaggaagtggtcgtcaatctttaactcgtctggctacatccatggcaaaaatgcatattttccaaccagaaatttctaagagctatggtatgaatgaatggagagaggatatgaagagctttattgctgtcccggtgaccaacaggatagtggataacaaatccaagattttggaaaagcgcctacgatatttaaatgaccacttcacatacaacttatattgtaatatatgccgatcactatttgagaaggacaagctgttattttcctttttattatgtgccaatcttcttctggcaaggaaagagattgaataccaggaactgatgtttcttttaactggaggagtaagtcttaaaagtgctgagaaaaatcctgatccaacttggctacaggacaaaagctgggaggaaatctgtcgggcaagtgaatttcctgccttcagaggactcaggcaacatttttgtgaacatatatatgaatggcgagaaatctatgacagtaaagagccacataatgctaaatttccagcaccaatggataagaacctaaatgaactacagaaaataataattcttcggtgtttaagacctgataagataaccccagctataacaaactatgtaactgacaaactagggaaaaagtttgtagagcctccaccatttgatttgacaaagagttacttggattcaaattgcaccattcccttaatttttgttctatctccaggagcagatcctatggccagcctgctgaaatttgcaaatgataaatctatgtctggaaataagtttcaagctatttcactgggacagggacaaggaccgattgcagcaaaaatgattaaagcagcaattgaagaaggaacttgggtgtgcctacagaattgccatcttgcagtgtcctggatgcccatgttggaaaaaatatgtgaagattttacctctgaaacctgtaactcatcctttaggctttggctgacaagctatccatcttcaaaattcccagtaacaattctacagaatggagtaaaaatgactaatgaacctcccacgggtcttcggctgaatctccttcaatcatatctcactgatccagtttctgatcctgagtttttcaagggatgccgtggaaaggaactggcctgggagaagttactgtttggagtttgtttttttcatgcccttgtgcaagagagaaagaaatttggtcctcttggttggaatattccatatggatttaatgaatctgacttgcgcatcagtatccgacaactgcagttatttatcaatgaatatgatacaattccatttgaagctatatcttacctgactggggagtgtaattatggaggaagagtgacagacgattgggacagacgtcttctattaaccatgctggctgacttttataatctgtacatagttgaaaaccctcattataagttttctcccagtggaaactattttgcacctcctaaaggcacttatgaggactacattgaattcattaagaaacttccatttactcaacaccctgagatatttggattacatgaaaacgttgacatctccaaggatcttcaacaaacaaaaaccctctttgagtccttgctcctcacccagggaggctccaaacagacaggagcctcaggaagtactgatcagattctgttagaaattaccaaagatatcctcaacaagctccctagtgatttcgacattgaaatggcactacggaagtatcctgtgagatatgaagaaagcatgaatactgtgttagtacaagaaatggaaagatttaacaatttaattataactatacgtaacactctacgggaccttgaaaaagctattaagggtgtggttgtgatggattctgcattggaggcactctccggtagcttacttgttggaaaggttccagaaatatgggccaaacgttcatacccaagccttaagcccctgggaagttacatcacagatttcctagcccggttgaactttttacaggactggtataattcaggaaaaccttgtgtgttttggctgtcaggtttctttttcactcaggcctttttaactggagctatgcagaattatgccagaaaatataccacccctattgatttgctaggatatgaatttgaggttatcccatctgatacatctgacacatcaccagaagatggtgtttatatccacggactgtatctcgatggcgcacgctgggaccgagaaagtggattgcttgctgaacaatatcccaaacttctgtttgacctgatgcccatcatatggataaaaccaactcaaaaatctcggattataaagtcggatgcctatgtctgtcccctctacaagacaagtgaacgtaaaggaactctttccactacgggacattctactaactttgtcattgcaatgttgttaaaaacagaccaacctactcggcactggatcaagcgcggggttgctttgctttgtcagttggatgactaaattggacaaatttataaaacatccaaaagtttaaaaaaaaaaaaacctgtcctacttaaaatatatacattataaaaccaag

SEQ ID NO: 109873 - DNA, 9279 bp, Artificial Sequence
  derived and/or modified sequence
atgtctgatgccaacaaggccgccatcgctgctgagaaggaggccctgaacctgaagctgccccccatcgtgcacctgcctgagaacatcggcgtggacacccccacccagagcaagctgctgaagtaccgccgcagcaaggagcagcagcagaagatcaaccagctggtgattgatggagccaagaggaacctggacaggaccctgggcaagaggacccccctgctgcccccaccagactacccccagaccatgaccagcgagatgaagaagaagggcttcaactacatctacatgaagcagtgtgtggagagcagccccctggtgcccatccagcaggagtggctggaccacatgctgcggctcatccctgagagcctgaaggagggcaaggagcgggaggagctgctggagagcctcatcaatgaggtgtccagtgactttgaaaattccatgaagcgctacctggtgcagagcgtgctggtgaagccccctgtgaagagcctggaggatgaaggaggccccctgcctgagagccctgtgggcctggactacagcaacccctggcacagcagctatgtgcaggccaggaaccagatcttcagcaacctgcacatcatccaccccaccatgaagatgctgctggacctgggctacaccacctttgctgacacagtgctgctggacttcaccggcatccgggccaagggccccatcgactgtgagagcctgaagacagacctgagcatccagaccagaaatgctgaggagaagatcatgaacacctggtaccccaaggtgatcaacctcttcaccaagaaggaggccctggagggcgtgaagccagagaagctggatgccttctacagctgtgtgtccaccctgatgagcaaccagctgaaggacctgctgcggaggacagtggagggctttgtgaagctgtttgaccccaaggaccagcagaggctgcccatcttcaagattgagctgacctttgatgatgacaagatggagttctaccccaccttccaggacctggaggacaacgtgctgagcctggtggagagaattgctgaggccctgcagaatgtgcagaccatccccagctggctgagcggcaccagcacccctgtgaacctggacacagagctgcctgagcacgtgctgcactgggccgtggacaccctgaaggctgctgtgcacaggaacctggagggcgccaggaagcactatgagacctacgtggagaagtacaactggctgctggatggaacagctgtggagaacatcgagaccttccagacagaggaccacacctttgatgagtacacagagttcatcgagaagttcctgagcctggccagcgagatcatgctgctgccccagtggatccactacaccatggtgcggctggactgtgaggacctgaagacaggcctgaccaacaaggccaaggcctttgccaacatcctgctgaatgacatcgccagcaagtacagaaaagaaaatgaatgcatctgcagcgagtttgaggccatcaaggagcacgccctgaaggtgcctgagaccacagaggagatgatggacctgatctcctatgtggagaaggccaggacagtgggcatcgaggagctgatcctgcgcatccaggagagcaagaggcagatgagctacttcctggatgtgttcctgttcccccaggaggacctggccctgaatgccaccgtgctgatgtggcccaggaagatcaaccccatctttgatgaaaatgatgagctgattgaaaatgccaagcacaagaaggaaaatgagctgatggccaagcgggagaagctgatcctggagattgagaaggagagcaggaggatggaggagttcacagaatttgctgagctggagaggatgcagcagtatgtgacagatgtgcggcagctgcagaagaggatccaggagagcgaggaggccgtgcagttcatcaacaaggaggaggagctgttcaagtgggagctgaccaagtacccagagctggacaagctgaaggtgaacatcgagccctaccagaagttcttcaactttgtgctgaagtggcagaggtctgagaagcgctggatggatggcggcttcctggacctgaatggagagagcatggaggctgatgtggaggagttcagccgggagatcttcaagaccctgaagttcttccagaccaagctgaagaaggagctgcaggagaagaggaaggccgccaggaagaggagcctggaggaggagaagattgaggaggagcccaaggacaatgccaccatcaccatgtgcaggatgagggcccggcactggaagcagatcagcgagatcgtgggctatgacctgaccccagacagcggcaccaccctgaggaaggtgctgaagctgaacctgaccccctacctggagcagtttgaagtcatctctgctggggccagcaaggagttcagcctggagaaggccatgaacaccatgattggcacctgggaggacatcgccttccacatcagcctgtacagagacaccggggtgtgcatcctgagctctgtggatgagatccaggccatcctggatgaccagatcatcaagacccagaccatgaggggcagccccttcatcaagccctttgagcacgagatcaaggcctgggaggacaggctcatccgcatccaggagaccattgatgagtggctgaaggtgcaggcccagtggctgtacctggagcccatcttctgcagcgaggacatcatgcagcagatgcctgaggagggccggcagttccagacagtggacagacactggagggacatcatgaagttctgtgccaaggaccccaaggtgctggccgccaccagcctgaccggcctgctggagaagctgcagaactgcaatgagctgctggagaagatcatgaagggcctgaatgcctacctggagaagaagaggctcttcttcccccgcttcttcttcctgagcaatgatgagatgctggagatcctgtctgagaccaaggaccccctgcgggtgcagccccacctgaagaagtgctttgagggcatcgccaagctggagttcctgcccaacctggacatcaaggccatgtacagcagcgagggggagcgggtggagctgattgccctgatcagcaccagcgctgcccggggagctgtggagaagtggctgatccaggtggaggacctgatgctgcggtctgtgcatgatgtgattgctgctgcccggctggcctacccagagagcgcccggcgggactgggtgcgggagtggccaggccaggtggtgctgtgcatcagccagatgttctggaccagcgagacccaggaggtgatcagcggcggcacagagggcctgaagaagtactacaaggagctgcagaaccagctgaatgaaattgtggagctggtgcggggcaagctgagcaagcagaccaggaccaccctgggcgccctggtgaccattgatgtgcacgccagagatgtggtgatggacatgatcaagatgggcgtgtcccatgacacagacttcctgtggctggcccagctgcgctactactgggagaatgaaaatgcccgggtgcgcatcatcaactgcaatgtgaagtatgcctatgagtacctgggcaacagcccccggctggtgatcacccccctgacagaccgctgctaccgcaccctcatcggggccttctacctgaacctgggcggggcccctgagggccctgctggcaccgggaagacagagaccaccaaggacctggccaaggccctggccgtgcagtgtgtggtgttcaactgcagtgatggcctggactacctggccatgggcaagttcttcaagggcctggccagcagcggggcctgggcctgctttgatgagttcaaccgcatcgagctggaggtgctgtctgtggtggcccagcagatcctgtgcatccagagggccatccagcagaagctggtggtgtttgtgtttgagggcacagagctgaagctgaaccccaactgctttgtggccatcaccatgaaccctggctacgccggccgctctgagctgcctgacaacctgaaggtgctcttcagaacagtggccatgatggtgcccaactatgccctgattgctgagatcagcctgtacagctatggcttcctgaatgcccggcccctgtctgtgaagatcgtgatgacctaccgcctgtgcagcgagcagctgagcagccagttccactatgactatggcatgagagctgtgaaggctgtgctggtggccgccggcaacctgaagctgaagtacccaaatgaaaatgaagacatcctgctgctgcggagcatcaaggatgtgaatgagcccaagttcctgagccatgacatccccctcttcaacggcatcaccagtgacctcttccctggcatcaagctgcctgaggccgactaccacgagttcctggagtgtgcccacgaggcctgcaatgtgcacaacctgcagcctgtgaagttcttcctggagaagatcatccagacctatgagatgatgattgtgcgccacggcttcatgctggtgggggagccctttgctgccaagaccaaggtgctgcacgtgctggccgacaccctgaccctgatgaatgaacatggctatggagaggaggagaaggtgatctacagaacagtgaaccccaagagcatcaccatgggccagctgtttggccagtttgatcctgtgtcccatgagtggacagatggcatcgtggccaacaccttccgggagtttgccctgtctgagaccccagacaggaagtgggtggtgtttgatggccccatcgacaccctgtggattgaatccatgaacacagtgctggatgacaacaagaagctgtgcctgatgtctggagagatcatccagatgagcccccagatgagcctcatctttgagaccatggacctgagccaggccagccctgccaccgtgagccgctgtggcatgatctacctggagcccagccagctgggctgggagcccctggtgtcctcctggctgaacagcctgaagggccccctgtgtgagcctgagtaccaggccctgctgcggggcctgtttgcctggctgatcccccccagcctgaaccagagggtggagctgttccagctgaactacctgtacaccaccatcgtgtccaagatcctgaagatcctgatcaccttccgcatcagcaactacttcaagtatgtgcccctgaagacccagtgcaccttcatcaagttcttcctgcaccagcaggcctgcttcatcttcagcctcatctggagcattggaggcagctgtgacacagatggccggcgggtgtttgacaccttcatccgcctcatcatcctgggcaaggatgatgaaaatcctgtgcctgattctgtgggcaagtgggagtgcccctttgatgagaagggcctggtgtatgactacatgtatgagctgaagaacaagggccgctgggtgcactggaatgagctgatcaagaacaccaacctgggggacaagcagatcaagatccaggacatcatcgtgcccaccatggacaccatccgctacaccttcctgatggacctgagcatcacctacgccaagcccctgctgtttgtgggccccaccggcaccgggaagtctgtgtatgtgaaggacaagctgatgaaccacctggagaaggaccagtacttccccttctacatcaacctgagcgcccggaccagcgccaaccaggtgcagaacatcatcatggcccggctggacaagaggaggaagggcgtgtttggaccacccatgggcaagaagtgcatcatcttcattgatgacatgaacatgcctgccctggagaagtacggggcccagccccccatcgagctgctgcggcagttctttgactgtggccactggtatgacctgaaggacaccagcaagatcaccctggtggacatcgagctgattgctgccatgggccccccaggcggcggcagaaatcctgtgaccccccgctgcatccgccacttcaacatctgcagcatcaacagcttcagtgatgagaccatggtgcgcatcttcagcagcatcgtggccttctacctgcggacccatgagttccccccagagtactttgtgattggcaaccagatcgtgaatggcaccatggagatctacaagcagagcgtggagaacctgctgcccacccccaccaagagccactacaccttcaacctgcgggacttcagcagggtcatccggggctgcctgctgattgaaagagatgctgtggccaacaagcacaccatgatccggctgtttgtgcatgaggtgctgcgggtcttctatgacaggctcatcaatgatgatgaccggcgctggctgttccagctgaccaagacagtcatcaaggaccacttcaaggagagcttccacagcatcttcagccacctgaggaagcagaatgcccctgtgacagaggaggacctgaggaacctgatgtttggagactacatgaacccagacctggagggagatgacagagtgtacatcgagatccccaacatccaccacttcagtgatgtggtggaccagtgcctggatgagtacaaccagacccacaagaccaggatgaacctggtgatcttccgctacgtgctggagcacctgagccgcatctgccgggtgctgaagcagagcggcggcaatgccctgctggtgggcctgggcggcagcggccggcagagcctgacccggctggccacctccatggccaagatgcacatcttccagcctgagatcagcaagagctatggcatgaatgagtggagggaggacatgaagagcttcatcgctgtgcctgtgaccaaccgcatcgtggacaacaagagcaagatcctggagaagaggctgcgctacctgaatgaccacttcacctacaacctgtactgcaacatctgccgcagcctgtttgagaaggacaagctgctcttctccttcctgctgtgtgccaacctgctgctggccaggaaggagattgagtaccaggagctgatgttcctgctgaccggcggcgtgtccctgaagtctgctgagaagaacccagaccccacctggctgcaggacaagtcctgggaggagatctgccgggccagcgagttccctgccttccggggcctgcggcagcacttctgtgagcacatctatgagtggagggagatctatgacagcaaggagccccacaatgccaagtttcctgcccccatggacaagaacctgaatgagctgcagaagatcatcatcctgcgctgcctgcggccagacaagatcaccccagccatcaccaactacgtgacagacaagctgggcaagaagtttgtggagcccccaccatttgacctgaccaagagctacctggacagcaactgcaccatccccctcatctttgtgctgagccctggagctgaccccatggccagcctgctgaagtttgccaatgacaagtccatgagcggcaacaagttccaggccatcagcctgggccagggccagggccccatcgccgccaagatgatcaaggccgccatcgaggagggcacctgggtgtgcctgcagaactgccacctggccgtgtcctggatgcccatgctggagaagatctgtgaggacttcaccagcgagacctgcaacagcagcttccggctgtggctgaccagctaccccagcagcaagtttcctgtgaccatcctgcagaatggagtgaagatgaccaatgaaccacccaccggcctgcggctgaacctgctgcagagctacctgacagatcctgtgtctgaccctgagttcttcaagggctgccggggcaaggagctggcctgggagaagctgctgtttggagtgtgcttcttccacgccctggtgcaggagaggaagaagtttggccccctgggctggaacatcccctacggcttcaatgaaagtgacctgcgcatcagcatccggcagctgcagctgttcatcaatgaatatgacaccatcccctttgaggccatctcctacctgaccggggagtgcaactatggaggccgggtgacagatgactgggaccggcggctgctgctgaccatgctggccgacttctacaacctgtacatcgtggagaacccccactacaagttcagccccagcggcaactactttgccccacccaagggcacctatgaggactacatcgagttcatcaagaagctgcccttcacccagcaccctgagatcttcggcctgcatgaaaatgtggacatcagcaaggacctgcagcagaccaagaccctgtttgagagcctgctgctgacccagggcggcagcaagcagacaggagccagcggcagcacagaccagatcctgctggagatcaccaaggacatcctgaacaagctgcccagcgactttgacatcgagatggccctgaggaagtaccctgtgcgctatgaggagagcatgaacacagtgctggtgcaggagatggagcgcttcaacaacctgatcatcaccatccggaacaccctgcgggacctggagaaggccatcaagggcgtggtggtgatggacagcgccctggaggccctgagcggcagcctgctggtgggcaaggtgcctgagatctgggccaagaggagctaccccagcctgaagcccctgggcagctacatcacagacttcctggcccggctgaacttcctgcaggactggtacaacagcggcaagccctgtgtgttctggctgagcggcttcttcttcacccaggccttcctgaccggggccatgcagaactatgccaggaagtacaccacccccatcgacctgctgggctatgaatttgaagtcatccccagcgacaccagtgacaccagcccagaagatggagtgtacatccacggcctgtacctggatggagcccgctgggaccgggagagcggcctgctggccgagcagtaccccaagctgctgtttgacctgatgcccatcatctggatcaagcccacccagaagagccgcatcatcaagagtgatgcctacgtgtgccccctgtacaagaccagcgagaggaagggcaccctgagcaccaccggccacagcaccaacttcgtcatcgccatgctgctgaagacagaccagcccaccaggcactggatcaagaggggcgtggccctgctgtgccagctggatgactag

SEQ ID NO: 109874 - DNA, 9279 bp, Artificial Sequence
  derived and/or modified sequence
atgagcgacgccaacaaggccgccatcgccgccgagaaggaggccctgaatctgaaactgccccctatcgtgcacctgcctgagaatataggcgtggatactccaacccagtcgaagctcctcaaatatagaaggagtaaggaacagcagcagaagatcaaccaactagtaatcgacggtgccaaacgaaatctggatcgcacattgggaaagcggacacccttgctgccaccgccagactaccctcagacaatgaccagtgaaatgaaaaagaaagggtttaattacatttacatgaaacaatgcgtggagagttctccacttgttccgatccaacaggaatggctggaccacatgctgcgtctgattcccgagtctctcaaggaagggaaagaaagagaagaattactggagtccctaatcaatgaggtctcgtctgatttcgaaaacagcatgaagagatatctcgtgcaatccgtgctggttaagccgccggtcaagagcctggaggacgagggaggccctttgcccgagagcccagtgggactcgattattcaaacccatggcactcctcgtatgtgcaggcccgaaaccaaatcttttcaaacttgcacatcatacaccccaccatgaaaatgctactagacctcggatacacaaccttcgctgacactgtgctattggacttcacaggtattcgggccaagggccctattgattgcgagtcccttaaaacagacctcagtatccaaacgaggaatgctgaggagaaaatcatgaacacctggtaccctaaggtcattaacctctttaccaaaaaggaggctctggagggagtgaaacccgagaagctcgacgcattctatagctgcgtgtcaaccctcatgtctaatcaattgaaagacctcttaaggcgaaccgtggagggttttgtcaagctgttcgacccaaaagatcagcaaaggctgcctatcttcaagatagagttaacttttgatgatgacaagatggaattttatccaacctttcaagacttggaggataatgtgctctcgctggtcgaacgaatagcggaggccctgcagaacgtgcaaactataccatcgtggctgtcaggcacctctacgcccgtgaacttggatacagagctgccagagcacgtgcttcactgggccgtggacactttgaaggccgccgttcatcgcaacctggagggagctcggaaacactatgaaacatatgtggaaaagtataattggttgctggatggaacagcagtcgagaacatcgaaaccttccagacggaagaccatacctttgacgagtatacagagtttatcgaaaagttcttgagcctagcaagtgaaataatgctgctacctcagtggatccattataccatggtcagactggattgtgaagatctgaagacaggtctgacaaacaaggctaaagctttcgcgaacatcctgttgaacgatatcgcctctaagtatcgaaaggaaaatgagtgcatctgcagcgagttcgaggccataaaggagcacgcacttaaagtacctgagactaccgaagaaatgatggacctaatttcctatgtggagaaagcgcggaccgttggcatcgaggagctgatcctccggatccaggaaagtaaacgacaaatgtcctactttctggacgtgttcttgtttcctcaggaagacctggctctcaatgctacggtgttaatgtggccacggaaaatcaatcctatcttcgacgaaaacgacgaacttattgagaatgccaagcacaaaaaggaaaacgaactcatggcaaagagagaaaaactcatcctggagattgagaaggagtctaggcgcatggaagagtttacagagtttgcagagctggaaagaatgcagcaatacgtaacggatgtgaggcagctccagaagcgaatccaggagtctgaggaagctgtgcagtttatcaacaaggaggaggaactgttcaagtgggagctcactaagtaccccgagctcgacaagttgaaggtcaatatcgagccataccagaagttttttaattttgtcctcaagtggcaacgatcggaaaaacggtggatggacggcggttttctagatctgaacggagaaagcatggaagctgatgttgaagagttcagccgcgagatcttcaagacacttaaatttttccagactaaactgaaaaaagagcttcaggaaaagagaaaggcggcacggaaacgctcacttgaggaggaaaagatagaagaggagccgaaggacaacgctactatcacaatgtgcagaatgagggccaggcactggaagcaaatctccgaaatagttggatatgacctgacaccagatagcggcacaacactcagaaaagtcctgaaactgaatctgacaccatacctcgaacagtttgaagtcatctctgcaggggccagtaaggaattcagcttggagaaggccatgaacaccatgatcggcacatgggaggatattgcctttcatatctccctttacagggataccggagtttgcatcctgtcaagtgtggacgagatccaggcaatcctcgacgatcagattatcaagacacagacaatgcggggctcaccctttatcaagccgttcgagcacgagattaaggcctgggaggacagacttatcagaattcaggaaaccatcgatgaatggcttaaggtccaggctcagtggctgtacctggaacctattttttgctccgaggatattatgcagcagatgccggaagagggacggcagttccagaccgttgacagacactggagggacataatgaaattctgcgctaaggaccccaaggttctagccgccacaagcctgacaggcctgttggaaaagctccagaactgcaacgagttactcgagaaaattatgaagggattgaacgcttaccttgagaaaaaacgcctcttttttcccaggttcttcttcctgagtaacgatgagatgctggagattttgtctgaaaccaaagacccccttagagtgcaaccccatctgaagaaatgcttcgaaggcatcgcaaaactggaatttttacctaacctcgacataaaagccatgtacagttccgaaggagagagagtggaactgattgccctgatttctactagtgcagccagaggggctgtggagaaatggctgattcaggtggaggacctgatgttaaggtccgtgcacgacgtgatcgccgccgcacgcctggcctacccagaaagtgcacggcgtgactgggtacgtgagtggcctggccaagtggtactgtgtatctcccagatgttctggacaagtgagactcaggaagtcatatctggcggaacagaagggctgaaaaaatattacaaagagttacagaaccaactgaatgagatagtggagctcgtgagaggcaaactgtccaaacaaacccgcaccacccttggcgctctggtgactatagatgtgcacgcccgagacgtggtaatggacatgatcaagatgggcgtctcgcacgataccgatttcctgtggctagcccagttacgctactattgggaaaacgaaaacgcgcgcgtccgtatcatcaactgcaacgtgaagtatgcatatgagtacctcggaaactccccaaggctggtaataaccccattgactgacagatgctatagaacgctgattggggccttctacctaaacctggggggcgcgccagagggcccagcaggtactggaaaaactgagacaactaaagacctcgctaaagcgttggcagttcagtgtgtcgtgttcaactgttcagatggactggactacctcgcaatggggaagttttttaagggcctcgccagctccggcgcgtgggcctgttttgatgagttcaaccgtatcgaactcgaagtgttaagcgtggttgcccagcagattctctgtatccagagggccatacaacagaagctggtagtgttcgtgttcgaaggaaccgaactgaaactgaatcctaactgtttcgtggctattaccatgaatccaggatatgccggccgaagcgagctgcccgataatctcaaggtgcttttccgcacagtggcgatgatggtgcctaattacgctctgatcgcagagatttccctctacagctacgggttcctgaatgcaagacccctctccgttaagattgtgatgacctaccgtctgtgtagcgagcagctgtcgagccagtttcactatgattatggcatgagagcggtgaaagctgtgctcgtggcggctggaaacttaaagctcaaataccctaacgaaaatgaggacattctccttctaagatcaatcaaagacgtgaacgagccaaaatttctgagtcacgatataccgttgttcaatggtatcaccagtgatctgtttcccggtataaaactgcccgaggcggattaccacgagtttttagagtgcgctcacgaggcgtgcaatgttcataatctgcagcccgtgaaattctttcttgaaaagatcatacagacttatgaaatgatgatagtgcggcacgggtttatgctcgtcggagagccttttgccgctaagactaaggttctccatgtcctcgccgacacactcacattgatgaatgaacacggctatggcgaagaggaaaaagttatttatcgaaccgtaaatcccaaatccattactatgggacaactgttcggacagtttgacccagtttcacacgagtggacagacggtatagtcgcaaatacttttagagagtttgctctgtccgagacacccgatagaaagtgggtagtgttcgacggtccaatcgataccctgtggatagagtccatgaacaccgttctggacgataacaagaaactgtgtctgatgagcggtgaaatcatccagatgtctccacagatgagccttatttttgagaccatggacttgagccaggcctctcccgctaccgtgagccgatgtggtatgatctatttggagccgagtcaactcggatgggaacctctcgtcagttcatggctgaactcgttaaaaggacccctctgcgagccagagtatcaggcccttctgcgtggcttgttcgcctggttgatacccccgagcttgaatcagcgggtggaactttttcagctcaactatttgtataccaccattgtgagcaaaatccttaagatacttatcacctttaggatctctaactactttaaatatgtcccgttaaagactcagtgtactttcatcaagtttttcttgcaccaacaggcttgcttcatctttagtctgatatggagcatcggagggtcctgtgatacagacgggcgacgcgtattcgatacgtttatacgtctcatcatactggggaaggacgacgagaatccggttcccgattcagtggggaagtgggagtgcccctttgatgagaaggggttggtctacgattatatgtacgaactgaaaaataaggggagatgggtgcattggaatgagctcattaaaaacactaacctgggcgataagcaaatcaaaatccaagacattattgtgcctaccatggatacgattcggtacacctttctgatggacctgtccattacatacgcgaaacctttgttattcgtgggtcctaccggaactgggaaaagtgtgtacgttaaggacaagcttatgaaccacctggagaaggatcagtattttcctttttacattaacctgtctgcccggacttctgctaaccaggtgcagaacatcatcatggctagacttgataaaaggagaaagggagtcttcggaccacccatgggcaagaagtgcatcatcttcattgacgatatgaatatgcctgctttggagaagtatggtgcacaacccccaatagagctcctgcgccaattttttgattgcggccactggtacgatttaaaagacaccagcaaaatcactctggttgatatagagctcattgcagccatggggccccctggtggaggccgaaaccccgttacacccagatgcattcggcattttaacatttgttctatcaactcgttttctgatgagacaatggttcgcatattctctagcatagttgctttttacctgaggacacatgaatttcctcccgagtatttcgtgattggcaatcaaattgtgaacggcacaatggagatctataagcagagcgttgagaaccttctccccactcctactaaaagccactacaccttcaacctgagagacttcagcagggtcattagaggctgtctcctgattgaaagggatgccgttgccaataaacatacgatgataaggctgtttgttcacgaagtactgcgcgtgttttatgatcggctgattaatgatgacgatcgcaggtggctattccagctcacaaaaaccgtaatcaaggaccactttaaggagtctttccattcgattttcagccatttacggaagcagaacgcccccgtaactgaggaagacctacggaatctgatgtttggtgactatatgaacccagatttggagggggatgatcgagtttacatcgagattccaaacatccatcatttttctgatgtggttgaccagtgcctggacgagtacaaccaaacccataagacacgaatgaatttggtcatctttaggtatgtgctcgaacacctctccaggatatgccgggtgttgaagcaaagtggcgggaacgccctcctggtcgggctcgggggcagcggtcgccagtcccttacgaggctggccactagtatggcaaaaatgcacatcttccagcccgagatcagcaagtcatacggtatgaatgagtggcgtgaggacatgaagtcattcatcgcggtccctgtgaccaaccgtattgtcgataataaaagcaagattctcgaaaaacggcttcgctatctcaacgaccactttacctataatctttattgtaacatctgcagatccctgtttgaaaaagacaagctcctgttctcgttcctgctgtgtgcgaatctgttgttagcaaggaaggagatcgagtaccaagagctgatgtttctcctgacgggaggcgtaagcttgaaatcagctgagaaaaatcctgaccctacatggctgcaggacaagagttgggaagagatctgtcgggcaagcgaatttccagcgtttagggggctcaggcagcacttttgtgagcatatctacgagtggcgcgaaatctacgactctaaagaacctcacaacgccaaattccccgcccccatggacaagaacctcaacgagctccagaagatcattatcctgagatgcctgcgaccagataagatcaccccagctatcactaactatgtgactgataagctgggcaaaaagtttgtggaacctccaccatttgacctcaccaagtcttacctggactctaactgcacaatccctctcattttcgtactgtctccaggagcagaccctatggcctccttgcttaagttcgcaaacgataaatccatgtcaggcaataaattccaggctattagccttggtcagggccaggggcccatcgctgccaagatgattaaagctgcgattgaagaggggacctgggtgtgtttgcaaaactgtcatctagccgttagctggatgccgatgctggaaaagatctgcgaggatttcacttccgagacatgcaactcctccttcagactgtggctcaccagctaccctagcagcaagttcccggtgactatactgcaaaacggcgtaaagatgaccaacgaacccccaacaggcctgcgtctaaatctgctgcagagctatctgaccgatccagtgagtgacccggagtttttcaagggttgccgtggtaaggaactggcttgggaaaaactgctctttggcgtctgttttttccacgctctggtccaggagcgcaagaaattcggcccactgggttggaatatcccttatgggtttaatgaatccgatctgcggatatcaatccgccagcttcagttgttcattaacgagtacgacaccattccattcgaagctatcagctatctgaccggggagtgtaactatggcggtagggttactgatgactgggatcggagacttctgctgacgatgctggctgacttctacaacctgtacatcgtagaaaaccctcattataaattttctcccagtggcaattacttcgcccccccgaaaggcacttatgaagactatatagaatttatcaagaagctgccctttacacaacaccctgaaattttcgggttgcatgaaaatgtggatatttccaaggacctacagcaaactaaaacgctgtttgaaagtctgttactcacccagggaggtagtaaacaaacgggagcaagcggttcaacggatcaaatcctgctggagattaccaaagatattctcaacaaactaccctcagattttgacatcgagatggctttgcgaaagtaccccgttcgctacgaggagtccatgaacactgtgttggtccaggagatggagcgctttaacaacttgataatcactatccgaaatacgctccgtgacttagagaaggccatcaagggggtggtggtgatggactcggccctggaggctttgtcgggatcactcctggtgggcaaagtcccagaaatttgggcgaaaagatcttacccttctttgaaaccattaggctcttatatcactgacttcctggctcgcctaaactttttacaggactggtacaatagtggcaagccatgcgtgttttggttatctggtttctttttcacccaggctttcctcactggagccatgcagaattacgcacgcaaatacacaactccaatcgatctgttagggtatgaattcgaagttattcccagcgacaccagtgacacatctcccgaagacggtgtatatatccacggcctttatttagacggtgcgcgctgggaccgcgagtccggcctgctagccgaacagtacccaaagttgttattcgatctgatgcctatcatttggattaaacctactcagaaatccagaattattaagtctgacgcctatgtgtgccccctgtataaaacttcggaaaggaagggcaccctgagcaccacaggccactccaccaactttgttatcgccatgctgctcaaaacagatcagcctacccggcactggataaaacggggcgtggccttgctgtgtcagctggacgactag

SEQ ID NO: 109875 - DNA, 9278 bp, Artificial Sequence
  derived and/or modified sequence
atgtcagatgccaataaagcggcaattgcggcagagaaagaggcattaaacttaaaactcccaccgatcgtccatctgccagagaacatcggtgtcgatactccaacacagtccaagctcctgaagtacagaaggagcaaggaacagcaacagaagataaatcagctggttatagatggcgcaaagcgcaatctggacagaacgctgggaaagaggacacccttattacctccaccggactacccccagaccatgacttctgagatgaaaaaaaagggctttaactacatatatatgaagcagtgcgtagagagcagtcctctggtgccaatccagcaggagtggctggaccatatgctgcggcttattcctgaatccttaaaggagggcaaagagcgtgaggagttgctggagtccttgattaatgaagtgtcttcggattttgagaatagcatgaagcggtatctagtgcagagcgtgctggtcaagccccctgtgaaaagcctggaggacgaaggaggcccactgcctgagtcacccgtgggactggactatagtaacccctggcactctagctatgtacaggcacgtaaccagatcttcagcaatttacacatcatacaccccacaatgaagatgctcttggacttggggtacactactttcgctgatacagtgctcctcgactttacgggtatccgcgcaaagggacctattgattgcgagtctctgaaaactgatctctctatccagacacgcaacgccgaggagaaaattatgaacacctggtatccaaaggtgatcaatttgttcacaaaaaaggaagcactcgagggtgttaagccggaaaagctggatgcgttctacagctgcgtttccaccctgatgagcaaccaactcaaagatctgctgaggcggacggtggaaggatttgtaaagttattcgaccctaaggaccagcagaggctcccaatctttaaaattgagctgactttcgacgatgataagatggagttttacccaacattccaggatcttgaggacaacgtgctctctctggtagaacggatcgccgaagcactccagaacgtccagactatcccatcctggttgagtggcacttcgacgcctgtcaatctcgataccgaattacctgaacacgtgctgcactgggccgtggatacgctcaaggcggctgtgcaccggaatcttgagggggcaaggaaacattatgagacctatgtcgaaaaatataactggctgttggacgggaccgccgtggaaaatatcgaaacgtttcagacagaagaccataccttcgatgagtacacagaatttattgagaaatttctctccctcgcctcagaaattatgcttctaccccaatggattcactacactatggtccgcctggactgcgaggatctgaagacaggactgaccaataaagctaaggcattcgctaatatactattaaatgacatcgcaagcaaataccgcaaagaaaacgagtgcatatgctctgagtttgaagctattaaagagcacgccctgaaggtgcctgagacaacagaggagatgatggacctgattagttatgtggaaaaagctagaaccgtggggattgaggagctgattctgcgaattcaagaatctaagcgtcagatgagctatttcctggatgttttcttgttcccccaagaggacctggcattaaacgctactgttcttatgtggccccgtaagatcaatcctatattcgatgagaatgatgaactgatcgaaaatgccaagcataaaaaggagaacgaactcatggcaaaacgggaaaaattgatccttgagattgagaaagagtctcgccgaatggaagaatttacagaatttgctgagctggagcgaatgcaacagtatgttacagacgtgaggcagctgcagaaaagaatccaggaatctgaggaagctgtacaattcattaacaaggaggaagaactcttcaaatgggaattaaccaagtaccctgagttagacaaactgaaggtgaatatagaaccttaccagaagttttttaactttgtgctgaaatggcagaggagtgagaagcggtggatggatggagggttcctggatttaaatggtgagtcaatggaggcagacgtggaggagttcagtcgggagatttttaagacgctgaaattctttcagaccaagcttaaaaaagaattacaagaaaaaagaaaggccgctcgtaaaagaagcttggaggaagaaaagatcgaggaagagccaaaagacaacgcgaccatcaccatgtgcaggatgcgcgctcgccattggaagcagattagtgaaatcgttgggtacgatcttactccggactccgggacgactttacgcaaagtgctcaagttaaatcttacaccctacctggagcagtttgaagtaattagcgcaggcgctagtaaagagttcagcctggagaaagctatgaacactatgatcgggacttgggaggacattgcgttccatatctctctgtacagggacacgggggtttgtatcctttccagcgtcgacgagatccaggccatactggatgatcagattatcaaaactcagacaatgagggggtcgccatttatcaagccatttgaacacgaaataaaggcgtgggaagacaggctcattagaattcaggaaaccatcgacgaatggcttaaggtccaggctcagtggctgtaccttgaacccatcttctgcagcgaagacattatgcagcagatgcccgaagagggcagacagtttcagacagtagaccgccattggcgcgacatcatgaagttttgtgcaaaagatcctaaggtcctggcagcgacttcacttacaggccttcttgaaaagctccagaattgtaatgagctgttggaaaagataatgaagggcctcaacgcttacctggaaaagaagcgccttttctttcccagattctttttcctttccaacgatgagatgttggagatcttgtctgagactaaggatcctttacgtgtccaacctcacctcaagaagtgctttgagggtattgctaaactggagtttctacccaacctagacatcaaggctatgtattcttcagagggtgaaagggtggaactaatcgctctgataagcacctcagccgctcggggagccgtggaaaaatggctgattcaggttgaagacctgatgttgagaagtgttcacgacgttatcgcggctgcaaggctggcatatcctgagtctgcgagacgggattgggttcgcgaatggcctggacaagtggtactctgcatttctcaaatgttctggacctcagaaactcaggaggtgatcagcggaggtaccgaaggactcaagaagtactacaaggagttgcagaatcagttaaatgagatcgtggagctggtgcggggaaagctcagcaaacagaccaggacaaccctgggggctcttgtcaccatcgacgttcatgccagggatgtagtcatggacatgatcaagatgggggtgtcccacgacaccgatttcctgtggctagcacagctcaggtattactgggaaaacgagaatgctcgcgtcaggattattaattgcaatgttaagtacgcctatgagtaccttggcaattccccgaggttagttatcaccccacttaccgacagatgctatcgcaccctgattggcgctttctatttgaatttgggaggcgcacccgaaggacccgcaggtaccgggaaaactgagaccacgaaggatttagcgaaggctctggctgttcagtgtgtcgtgttcaactgcagcgatggcctggactacctggccatggggaagttcttcaaggggctagctagtagcggcgcatgggcttgctttgacgagtttaatagaatcgagctggaggtgctaagcgtggtcgcccaacagattctgtgtatccagagagcaatacagcagaaattggtggtattcgtgtttgaggggaccgagctgaagctgaacccaaattgctttgtggctataacaatgaatccaggatacgctggacggagtgagctacccgacaacctaaaagttctgtttaggacagtcgccatgatggtgccgaattacgcgctgattgccgaaattagcctttatagttatggatttttaaacgccaggcccctttctgtgaagatagttatgacataccggctgtgcagcgaacagctgtcttcgcagttccactacgattatggcatgagggcggtcaaggcagtgctggtcgccgcaggaaatctgaaactgaagtatccaaatgagaacgaagacatcctcttgctacgcagtatcaaagacgtgaatgagcccaagtttctttcccatgatatccctttgtttaacggcatcacaagtgacctatttccaggcatcaaattgcccgaggctgactatcatgagtttcttgagtgtgcccacgaggcttgcaatgtgcacaatctgcagcctgttaaattcttcctagagaaaattatacaaacttacgaaatgatgatagtcaggcacggtttcatgctcgtcggcgagccctttgctgcaaagacaaaagttctgcatgtgttggccgatacgctgaccctgatgaatgagcacgggtacggcgaggaagaaaaggtgatttaccggaccgttaaccctaaatcaataactatgggccagctctttggccaatttgacccagtgtctcatgaatggaccgatggcatcgttgcgaatactttcagagaatttgccctgagtgagacccccgacagaaagtgggtcgtgttcgacgggcctatcgatacactgtggatcgaatcaatgaacacagtcctggacgacaataagaagctgtgccttatgagcggtgaaatcatccagatgtccccccagatgagcctgatatttgaaaccatggatctgtctcaggcctcccccgctaccgtgtcgagatgcggcatgatttatctcgagccatctcagctggggtgggagcccctcgtcagctcttggctgaatagtctgaagggtccgctatgcgagccggagtaccaagccctgttacgtggcctgttcgcatggctcatccccccttctctcaaccaaagggtcgaactattccagctgaactacctgtatacgacaattgttagcaaaattctaaaaatattaatcaccttccggatcagcaactacttcaagtacgttcctctcaagactcagtgcaccttcatcaagttctttctccaccagcaggcttgttttatctttagcctcatttggtctatcggcggttcctgtgatacagatggcagacgagtctttgatacattcatccggctcatcatcctcggtaaagacgacgaaaaccccgttcccgacagcgtaggaaaatgggaatgcccttttgacgagaagggactcgtgtacgactacatgtatgagttgaaaaataagggaaggtgggttcactggaatgagcttatcaagaatactaacctgggcgacaagcagatcaagattcaggacatcatcgtgccaaccatggacacgatccgatatacattcttgatggacttgagtatcacgtatgccaagcctttgctgttcgtggggcctactggcaccggaaagagtgtgtatgtcaaggataagctaatgaaccacctcgagaaggatcagtattttcccttttacatcaacttgtcagctcggacgagcgcaaaccaagtgcagaatatcatcatggctcgattggacaagcggcgtaagggggtgtttggccctcccatgggtaaaaaatgtatcatattcatcgacgatatgaatatgcccgcactcgaaaagtacggtgcccaacccccaattgagctccttaggcagttctttgactgcgggcactggtacgaccttaaagacaccagcaagatcaccctggtggatattgaactgatcgctgctatgggaccacctggtggtggaaggaacccggtgacccctcgctgcattcgccactttaacatttgctctatcaactctttttcagatgagacaatggtgcggatctttagcagcattgtcgctttctatttgcgcactcatgagtttccgccagagtattttgtgattggcaaccagattgtgaacgggacaatggaaatttacaagcagtctgttgaaaacctcctgcccacacccacgaaatcgcactacactttcaatcttagggactttagtagagttattcgcggttgcctgctaattgaacgagatgcggtcgctaacaagcatacaatgatcaggctcttcgtgcatgaggtactaagagtgttctacgaccgtctgattaacgacgacgacaggagatggctgttccagctcactaagactgtgatcaaggatcactttaaggaaagctttcactcaatcttcagccaccttcggaaacagaacgcgcctgtaacagaagaagacttgagaaatctgatgttcggtgactacatgaaccctgacctagaaggtgacgatcgagtgtatatcgaaatacccaatatccaccacttctctgacgtagtcgaccaatgcctggacgaatataatcaaacgcacaagacccgcatgaacctggtgattttcagatacgtgctggaacacttgtccagaatctgcagagtccttaaacagtctggcggtaatgcacttctcgtggggctggggggatcaggcagacagtctcttaccagacttgctacatccatggccaaaatgcatatatttcagcccgaaatttcaaagagctacggcatgaacgagtggagagaggacatgaaatcatttattgccgtgccggtgacaaacagaatcgtagataacaagagcaagattttagagaaacggctgaggtacctcaatgaccactttacatacaacctttattgcaatatctgtcgttccctgttcgaaaaggacaaactcctgttttcatttcttctgtgcgctaatctactgctggcgagaaaggagattgaatatcaggaattgatgttcttgctcaccggaggggtcagcctgaaatcagcagagaaaaaccccgaccctacgtggttgcaggacaagagctgggaagagatctgccgcgcttctgaatttcctgcatttcgcggactgcgtcaacatttttgtgagcacatttatgagtggcgagagatatacgactcaaaggagccacataacgcaaagtttcctgcacctatggataagaacctgaatgagcttcaaaaaatcattatccttagatgcctgcggcctgacaagattacgcctgctatcaccaattatgtaacggacaagctggggaagaaattcgtcgagccaccaccattcgatctgaccaagtcttatttggattccaattgcacaatccctttgatttttgtgctgtccccgggtgccgatccgatggctagcctgctgaaatttgcaaatgacaaaagcatgtccggaaacaaatttcaggcgatcagtcttggacagggacagggacccatcgctgcgaagatgatcaaagctgccattgaggagggaacttgggtgtgtctgcagaactgccatctggcggtgagctggatgcctatgctagagaaaatttgcgaggactttaccagcgagacatgcaactcttcatttagactctggttgactagctacccatcaagtaagtttccagtgaccatattgcagaatggagtgaagatgactaatgaacccccaaccggtctgcggctgaacctcctgcaatcctacttgaccgatcccgtgtccgatccagaattttttaaaggttgcagagggaaggagcttgcttgggaaaagctgctctttggagtctgcttttttcacgccctggtgcaagagcgtaaaaagttcgggccactcggctggaacatcccatatggcttcaatgagtccgatcttcggatatcgatccggcagctgcagttattcattaatgagtacgatactatccccttcgaggccatctcatatctgaccggggagtgcaactacggcggtcgcgtgacagacgattgggatcggaggcttctcctgacgatgctggctgatttctataacctctacatcgtggagaacccacactataagttcagtcctagcggcaactacttcgccccaccaaagggcacttacgaagactatattgaattcatcaaaaagctgccgtttacacagcacccagagatcttcggactgcatgagaatgtggacatttcaaaggacctgcagcaaaccaaaacactttttgaaagccttctacttacacagggcggatctaagcagacgggggctagcgggtctactgaccagattctgttggagatcaccaaagacattctgaacaagttgcctagcgactttgacattgagatggctcttcggaagtatccagtaaggtacgaagagtcaatgaacactgtcctcgtccaagagatggagcgttttaataaccttatcatcacaatccggaacactttacgggacctggagaaggccatcaagggcgttgttgtgatggattctgccctggaagcactgagcggtagccttctggtcgggaaagtgccagagatatgggccaaacgaagttatccctcactgaaacccctcggatcatacattacagattttctggccagattgaatttcctgcaggattggtataattctggaaagccgtgtgtgttttggttgagtggattcttctttacccaagccttcttgactggcgctatgcagaactacgccagaaaatacaccaccccaattgatctcttaggctatgagttcgaagtgataccaagtgacacatccgacacaagccctgaggacggcgtgtacattcacggcttgtatttagatggcgcaaggtgggaccgagagtccgggttgttggccgagcagtaccctaagctgctttttgatcttatgccaattatttggataaaacccactcagaaaagtcgtattatcaaatctgacgcatatgtatgtcccctgtataaaacctccgagcgcaaaggaaccctgtctacgaccggccattcaacaaatttcgtaatagctatgctgctgaaaacagaccagccaaccaggcattggattaagcgaggggtggcgctcctgtgccagttggacgacta

SEQ ID NO: 109876 - DNA, 2040 bp, Artificial Sequence
  derived and/or modified sequence
atgttcttactgactggcggcgtgagccttaagtcggccgaaaagaatccagatcccacttggctacaagataagagctgggaggagatatgcagagctagcgagtttcccgctttccgcgggctacgccagcacttttgcgagcacatctacgagtggcgggagatctacgattccaaggagccacataacgcgaagtttcctgcacccatggacaaaaacctcaatgaactccagaagatcattatcctgaggtgtctccgcccagataagattacacccgccatcaccaactatgtcacggataagctcggcaagaaatttgtggagcctcctccgttcgacctgaccaagtcctatttggactctaactgcaccatcccgcttatttttgtcctaagccctggagccgatccgatggcttcactacttaaattcgcgaacgataagtctatgtctggaaacaaattccaggctatctctctgggccaaggtcagggccccatcgccgccaagatgatcaaggccgctatcgaggagggaacttgggtttgcctgcagaattgccacctggcagtttcctggatgccaatgttggagaaaatctgtgaagatttcactagcgagacctgtaactcttctttcagactatggctcacgagttacccgtcatccaagttcccagtgaccatcctccagaatggcgtgaaaatgaccaacgaacctccgaccggcttaagacttaacctcctacagagctacctcactgatcctgtcagcgatccagagttctttaaaggctgtcggggtaaagaattgctcttcataaatgaatacgataccataccatttgaagccatcagctatctgactggagagtgcaattatgggggcagagttaccgacgattgggataggcgactgttgctgaccatgctggcagatttctataacctgtatattgtggaaaaccctcattataaatttagcccatccgggaactattttgctcccccgaaggggacttatgaagactatatcgaatttatcaagaaactgcctttcacgcagcaccctgaaattttcggattgcatgaaaatgttgacatttctaaagacttgcagcagacgaaaaccctgttcgagagcctgctgctaacacagggaggttcgaaacagaccggggcctcgggaagtaccgaccagatcctactcgagatcacaaaggacatcctgaacaagctgccctctgattttgacatagagatggccttgagaaaatatcctgtccggtacgaggaatcaatgaatacggtcttggttcaggagatggagagatttaacaacttaatcataacaattcgaaacactttaagggatctggaaaaggccatcaaaggtgtggtggtgatggactcagccctcgaagcactcagcggatccctgctggtcggaaaggtacctgagatctgggctaagcggagttatccttcgctgaaacctctggggtcatacattaccgactttctggcaagactgaacttcctgcaggattggtataacagcggcaagccctgcgtgttttggttgtccggattcttctttacccaggctttccttacgggcgccatgcagaactacgctcgcaagtacacaacaccaatcgacttgttggggtatgaattcgaagtcatccccagtgataccagcgacacaagcccagaggatggcgtgtacatccacggcctctacctggacggtgctaggtgggaccgggagtctggactgttggctgagcagtaccccaaactgctgttcgatctgatgccgattatctggatcaaaccaactcagaagagtcgcataataaaatctgatgcctacgtgtgtcccctgtacaagacttccgagcgaaagggcacattgtcaactaccggtcactctaccaacttcgtgattgccatgctgttaaagactgaccagcccactcgacactggatcaagcgcggggtggcgctgctatgccagctcgatgattag

SEQ ID NO: 109877 - DNA, 9279 bp, Artificial Sequence
  derived and/or modified sequence
atgagcgacgccaataaagctgcaattgcagcggagaaagaggcactgaatctgaagctccctcccatcgtccacttgccagaaaatatcggcgtcgacactcccacacaatccaaactcctgaaatatagaagaagtaaagagcagcagcagaaaataaaccagctcgtgatcgacggggccaagagaaatctggatcggactctgggaaaacgtacgcccctactccccccaccagattaccctcagactatgaccagcgaaatgaagaaaaaggggtttaattacatttacatgaaacagtgtgtcgagagcagcccgctcgtgccaatccaacaagagtggcttgatcatatgctgaggttaatacctgaatctctcaaggagggaaaagaacgcgaagagcttttggaatcactcataaacgaggtgtcgagtgattttgagaactccatgaagcggtacctggtgcaaagcgtcctggttaaaccccccgttaaatcactcgaggacgagggcgggcccttaccagaaagtcctgttggcttagattactccaatccctggcattcaagctatgttcaggcacggaaccagatattttccaacctccatatcattcacccgacgatgaagatgctcttagacctcggctacaccaccttcgctgatactgtcctgcttgactttaccggcataagggccaagggtcccattgattgtgaatctctcaaaacggacttatctattcaaactcggaacgctgaagaaaagatcatgaacacctggtaccctaaggtgataaacctctttacaaagaaggaagcccttgagggagttaagcccgaaaaactcgatgctttctacagctgcgtatcaactctaatgagcaaccagctcaaggatctgctgaggcgaacagtggagggttttgtaaagttgtttgatccaaaggatcagcagcgcctgcccatcttcaaaatagaactaaccttcgacgatgataagatggagttttatcctacctttcaagatttagaggacaacgtcctcagcctggtggagcgcatcgcagaagctctgcagaacgtgcagaccattcccagctggctctcgggaacatcaactccagtgaatttagacactgaactgcccgagcacgtcttacactgggccgtggacacccttaaagccgcagtgcaccgaaatcttgagggcgcgcgcaagcactatgagacatatgttgaaaagtataactggttgcttgacggaaccgctgtggagaacatagaaactttccagaccgaagatcatactttcgacgaatacacagaattcattgaaaaattccttagcctggccagcgaaataatgctgctcccgcagtggatccattacaccatggttagactggattgcgaagatctgaagacaggactgactaataaggccaaggcgtttgctaacatactgcttaacgatatcgccagtaaatatagaaaggaaaacgaatgcatatgctctgaatttgaggcaatcaaggagcacgccctgaaggtgcctgagacaacggaggagatgatggatttgatatcgtacgtcgaaaaagcccgaaccgtggggatcgaagagctcatactgcgaattcaggagagtaagcggcagatgtcctatttccttgacgtgtttctgtttccacaagaggacctcgccctgaacgccaccgtgctgatgtggccccggaagattaacccaatctttgacgagaatgacgagctgatcgagaatgccaaacacaagaaagaaaacgaactcatggccaaaagagaaaagctgatcctcgaaattgagaaggagagtcgcaggatggaggagtttaccgagttcgccgagcttgaaaggatgcagcagtatgtgacagatgtgagacagctgcaaaagcgcatccaggaaagcgaggaggctgtgcaatttattaacaaggaggaagaactctttaaatgggagttgacaaagtacccagagctggataagctcaaagtcaacatcgagccgtaccagaagttctttaatttcgtgctgaaatggcagaggtccgagaagaggtggatggacggcgggttcctcgacctgaatggcgagagtatggaggcggatgttgaggagttcagcagagagatatttaagaccctcaagttcttccagactaaactaaagaaggaactgcaagagaagcggaaggcagctcgcaaacgatctctggaggaggagaaaatcgaggaagagcccaaggataacgcaaccataactatgtgccgaatgcgtgccaggcactggaaacaaatctctgagatcgtgggctatgacttaacacccgattcaggcactacgttgcgtaaagtgctgaaactgaatctgactccataccttgaacagttcgaggtgatcagtgcaggcgcttccaaggaattctcattggaaaaggcgatgaacaccatgatcgggacttgggaagacatcgcattccacatcagcctctaccgcgacactggtgtttgtattctaagttcggtggatgaaatacaggctatcctggacgatcagatcatcaaaacacagactatgagagggagcccgtttatcaagcctttcgagcatgagatcaaggcctgggaggaccgcctgatacgcattcaagaaactatcgatgagtggctcaaggttcaggctcagtggctctacctcgagcctatcttctgcagcgaggatatcatgcagcagatgccagaagaaggacgacagttccagacagttgataggcactggcgggacatcatgaagttttgcgccaaagatccaaaggtgctcgccgcaactagcctcactggactgctggagaaactgcagaattgtaatgaactgttagagaagattatgaaggggctcaacgcctacttggagaaaaagaggctgttcttcccaagattctttttcttgagcaatgacgaaatgctcgagatcctgtctgaaactaaagaccctcttcgcgtgcaaccacatctgaagaagtgttttgaagggatcgcaaagctggagtttttgcccaacctggatatcaaggctatgtattcctccgagggtgaacgcgtggagctgattgccctcattagcacgtctgccgcccggggagcagttgagaagtggctgatccaagtcgaagacctgatgctgagaagcgtgcacgatgtgattgcagcagccagattggcttatcctgagagcgcccgacgtgattgggtgagggaatggcctggccaggttgtgctgtgcatttcccagatgttttggacgtctgagacacaggaggttattagcggtggtacagagggtctgaagaaatattacaaggaactccagaaccagttaaatgagatcgtggaactggtgaggggtaaactgtccaagcaaacaaggacaacactgggcgccctggttaccatcgacgtacacgccagggatgtggttatggacatgatcaaaatgggtgtgagtcatgatacagatttcctctggctggctcagctccggtattactgggaaaacgagaacgctcgagtgagaattattaactgtaacgtcaaatacgcttacgagtatctgggtaactctcctcgactcgtcattaccccactcaccgatagatgctacaggacgctcattggtgcgttctacttgaatttggggggcgcacctgagggcccagcagggactggaaagacagaaacgaccaaagatctcgctaaggctctggcagttcagtgcgtagtctttaactgttcagatggactggactaccttgcaatgggtaagttcttcaaggggctggcttcatcaggtgcctgggcttgctttgacgaatttaacaggatcgaactggaagtactctcagtggtggcccagcagatcctctgtatacagcgcgccatccagcaaaaactggtcgtctttgtcttcgaaggcaccgagttaaaactcaaccctaactgcttcgtggctataacgatgaacccaggctacgcaggccggtcagaactgcccgacaatctaaaagtgttattccggaccgttgccatgatggttcccaattacgccttgattgctgagatcagtctttacagttacggcttcctgaacgccaggcccttgtccgtgaagatagtgatgacgtatcgtctctgctccgaacagctgtcctcccaattccattacgactacggtatgagggctgttaaggctgtcctagtcgccgccgggaacctaaagctgaagtacccaaatgagaacgaggacattctcctgttgcgaagcataaaagatgttaatgagccgaagttcctgtcccacgatatccctctgttcaatggcataaccagcgacctctttcctggcattaaacttcctgaggccgactaccatgaatttctagagtgtgctcacgaggcttgcaatgtccacaatctgcaaccagtcaaattctttctggaaaaaattattcagacttacgaaatgatgatcgtgaggcacgggtttatgttagttggcgagcctttcgctgccaagaccaaagtgctgcacgtactggcagacacccttactctgatgaacgaacacggctatggggaagaggagaaagtgatttataggaccgttaatcccaagagcatcacgatgggccagcttttcggtcagttcgacccggtgtcccacgagtggaccgatgggattgtggcgaacacctttcgggagttcgcattatccgagacccccgaccgcaagtgggtcgtgttcgacgggccaattgacacactgtggatagagagtatgaacaccgtgttagacgacaacaagaagctctgtctgatgagtggagaaataattcagatgtctccacagatgagcttgatctttgagaccatggacctctcacaggcaagccctgctacggtgagtcggtgcggaatgatttacttggagcccagtcagttggggtgggaacccctggtttcaagctggctcaatagcctcaagggtcccctgtgtgagcccgagtatcaagccctcctgcggggattgttcgcttggttgatccccccctcattaaatcagcgagtggagctattccagcttaactacctgtatacaactatagtgagcaaaatacttaagatcttaatcacatttcggatctcgaattattttaaatatgtcccgcttaaaacccagtgtacgtttataaaattcttcttgcaccagcaggcttgcttcattttttccctcatttggtctattggtggttcatgtgataccgacgggcgtagagtgtttgacacctttattcgcttgatcatcctcggcaaggacgatgaaaacccagtgccagattcagtggggaaatgggagtgtcccttcgacgaaaagggccttgtgtatgactacatgtacgaactgaaaaacaagggtagatgggtacactggaacgagctgattaagaacacaaacttgggcgataaacagattaaaatccaggacattatagtccctacaatggacactatcagatacacttttttgatggatctgtcaataacctacgccaaacccttattgttcgtcggtcctaccgggaccggtaagtccgtatatgttaaggacaagctgatgaaccacctggagaaagaccagtactttccattttacattaatctgtccgctcgcacatcagcgaaccaggtgcagaatataatcatggcaagactggataaaaggaggaagggagtattcggtccgcctatgggaaaaaagtgtatcatttttatcgatgacatgaatatgccagccctcgagaaatacggagcacagccacctatcgaattgttacgccagttctttgattgcgggcactggtacgaccttaaagacacaagtaaaataaccttagtcgatatagaactgatcgctgctatgggcccaccaggcggggggcggaatcctgtaaccccgaggtgtattaggcacttcaatatttgctccatcaatagtttcagcgatgaaaccatggtgagaatattctcctcaattgtagcgttctatctgcgtacccacgagtttccgccagagtacttcgtgatcgggaaccaaatcgtaaatggaactatggagatatataagcagtctgtcgagaatctcttgcccacacctactaaatctcattacacatttaatctgagagatttctccagagtgataagggggtgcttactgatcgagagagatgcagtggccaacaagcacaccatgattagactctttgtccatgaggtgctcagggtgttctatgatcgtctgataaatgacgacgacaggcggtggttgttccagctgaccaagactgtaattaaagatcactttaaggaatcgtttcactccatcttctcccacctgcggaaacaaaatgctcctgtgacagaagaagatctcaggaatttgatgtttggggactacatgaaccccgacctggagggggacgaccgcgtctacatcgaaatccccaacatccaccacttcagcgatgttgtggatcagtgccttgatgagtacaaccagacacacaagacgcggatgaacctggtgattttccggtacgtactggagcatttatcaaggatttgtcgcgtgctcaagcagagcggaggcaacgctctccttgtggggttgggtggttctgggcggcagtccctcacacggctcgcaacctcaatggctaagatgcacatctttcagcctgagatcagtaagagctacgggatgaacgagtggcgagaagacatgaagtccttcatcgcagttccagtgaccaatagaatcgtcgacaataagagcaaaatcctagagaagcggttacgctatctgaatgatcacttcacatataacctttactgcaatatctgtcgaagtctgttcgaaaaggacaagctgctcttcagtttcctcctgtgcgcaaacctgcttctggcccgtaaagagatcgagtaccaggaactcatgttcctcctgaccggaggggtctcccttaagagtgccgagaaaaacccagatccaacatggctgcaggataaatcctgggaagagatttgtcgtgcctccgagttccccgccttcagaggcctacggcagcacttctgcgaacacatttacgagtggcgcgagatttatgatagtaaagagccccacaatgctaagtttcccgctccaatggataaaaacctcaacgagctccagaaaattattatccttaggtgtctgcgccctgataaaatcactcctgccatcaccaactatgttaccgataagctcggcaaaaaatttgtggagcctcccccttttgaccttacaaagtcgtatctggactccaactgcaccattccactaatcttcgtgcttagccccggagccgatccaatggcttctctgcttaagtttgccaacgataagagcatgtctggtaacaagttccaagccatttctctgggccagggccaaggcccaatagccgctaaaatgatcaaagccgccatagaagaaggcacctgggtgtgcttgcagaattgtcacctggctgtaagctggatgccaatgctggagaagatatgtgaggactttacatctgaaacttgtaacagttcctttcgcctgtggctcacgtcatacccctcctcaaaatttcccgttacaatcttgcagaatggtgtgaagatgactaacgaaccacctacaggcctgcgtctaaacctgctgcagagttacttaaccgacccagtgagtgaccctgagtttttcaagggttgtcgggggaaggaactcgcttgggagaaactgctgtttggcgtgtgtttctttcatgccctggtgcaggagcggaagaagtttgggccactagggtggaatatcccatacggattcaacgagtccgacctgaggatcagtatcagacagctccagcttttcattaacgagtacgataccatcccctttgaggccatttcctacctgaccggcgagtgcaattatggagggagagtgactgacgattgggacaggcgcttgctgttaaccatgctagctgacttttacaatctctacattgtcgaaaatccgcactacaaattttcaccctcgggcaattatttcgctccacccaaaggaacctatgaggactacatagagtttatcaagaagttacccttcacccagcaccccgagatcttcggcctgcacgaaaacgtggacatttctaaagacctgcagcaaaccaaaacactttttgagagcttgctgctgacccaggggggaagcaagcaaactggagcatctggctccactgaccagatcctgctcgagatcactaaggacatcctaaataaactgccatccgattttgatatcgaaatggctctgagaaagtatccggtcaggtatgaggagagcatgaacaccgtcctcgtccaggagatggagcgtttcaacaaccttattatcaccatcaggaacactttgagagacctcgagaaagctatcaaaggggtggtcgtcatggattctgctcttgaggctctgtccgggtcactcctggtgggcaaggtccccgaaatctgggccaagagatcctatccatctctgaagccgcttggatcctatattacagacttcttagcacgccttaacttcctccaggattggtataattcaggaaagccctgcgtgttctggctgtctggattcttttttacccaggcatttctcacaggggccatgcagaactatgcacgaaaatataccactcccattgacttgctgggatacgagttcgaggtgatcccctctgacacctccgatacgtctccggaggatggagtttatatccatggtctttatctggatggagccagatgggatcgggagtcagggcttttagcggagcagtaccctaaactgctcttcgacttgatgccaataatttggataaaacccacccagaaaagcaggatcattaaatcagatgcgtatgtttgtcccctatataaaacatctgaacggaaaggcaccttgtctacaacaggtcacagtaccaatttcgtgattgctatgctcttaaagaccgaccaacctacgcggcactggatcaagcgaggagttgctttactttgccagctggatgactag

SEQ ID NO: 109878 - DNA, 2355 bp, Artificial Sequence
  derived and/or modified sequence
atgagtgacgctaacaaagcagctatagccgccgagaaggaagcacttaacctgaaacttcctccaatcgtccacctgcctgagaatatcggggtcgatactcccacacagtcaaaacttctgaagtacagacgatctaaggagcagcaacaaaagattaaccagctcgtgatcgatggcgctaagcgaaacctagaccgaaccctaggtaaaagaacaccgctgcttccaccaccagactacccccagactatgacctcagagatgaaaaagaaaggatttaattatatatacatgaagcagtgtgtcgaaagtagtcccctggttccaattcagcaagaatggctggaccacatgctgcgactcatcccagagtccctgaaggagggaaaagaacgggaagagctgttagagtctctgataaatgaggtcagctccgacttcgaaaattctatgaagcgctaccttgtgcagagcgttcttgtcaagccgcccgttaaatcactggaagacgaaggggggcccctcccagaaagcccggtggggttggactacagcaacccttggcactcttcctacgttcaagctcggaatcagatattttctaacctgcacattatacacccaactatgaagatgcttctggacctgggctacaccacatttgcggacacagtgcttcttgactttacaggcatcagagccaagggaccgatcgactgtgagagcctcaaaaccgatcttagtatacagacacggaacgccgaggaaaagatcatgaatacttggtaccctaaggtgataaaccttttcaccaaaaaggaggctttggaaggggtgaagccagagaagttggacgccttttatagctgtgtgtcgacactgatgtccaatcagttaaaagacttactgcggaggacagtggagggctttgtcaagctgttcgaccctaaagatcagcagcggcttcccattttcaagattgagctgacatttgacgatgacaagatggagttttaccccaccttccaagacctagaagataacgtcctcagtctggtggagcggattgctgaggccctgcagaatgtgcagaccattccttcatggctgtctggcactagcactccagtcaacttggatacagagctcccagagcacgtattgcactgggccgtggacaccctgaaggcagcggtgcacaggaacttggagggcgctcggaagcactatgaaacgtacgtggagaagtacaactggcttctcgacggaacggctgtggagaatattgagacttttcagaccgaagaccatacttttgatgagtacacagaatttattgaaaagtttctctctctggcctctgaaatcatgctgctcccccaatggattcattacaccatggttagactggattgcgaggatctcaaaaccggtctcacgaataaagccaaagcattcgcgaacatattgcttaatgacatcgcttcaaagtacaggaaagagaacgagtgcatatgttcagaattcgaggcaatcaaggagcatgcgctgaaagtgccggagaccacagaggaaatgatggatctcatctcttacgtggaaaaagctaggactgttggcattgaggaactaatcctccgaatccaggagagtaagcgtcaaatgtcttacttcttggatgtcttcctgtttccacaggaggacctcgccttaaacgcgactgtactcatgtggccaaggaagattaatccgatcttcgacgagaatgatgagctcattgagaacgccaagcataaaaaagaaaatgagctgatggcaaaacgagagaaactgatactggaaatcgagaaggaaagtcgccggatggaagaattcactgaatttgccgaactggagcggatgcagcagtatgtgacggacgttcgtcaactgcagaagcgcatccaggagagtgaggaggctgtccagttcatcaacaaagaagaagagctcttcaaatgggagctgactaagtatcctgaactggacaaactgaaagtgaacattgagccataccagaagttttttaacttcgtgctcaaatggcagcgctctgagaagagatggatggacggcgggttcctcgacctgaatggagagagcatggaagcggacgtggaggagttttcacgggagatctttaaaacgttgaagtttttccagaccaagctgaaaaaggaactgcaggagaaaagaaaagcagcacgaaaacgtagcctcgaggaggaaaaaatcgaagaggagcctaaagacaacgctacaatcacaatgtgttccacggtcatggagcagatcaaggcttttaaggtctag

SEQ ID NO: 109879 - DNA, 2040 bp, Artificial Sequence
  derived and/or modified sequence
atgttcctgctgactggaggagtgtccctgaagtctgctgagaagaacccagaccccacctggctgcaggacaagtcctgggaggagatctgccgggccagcgagttccctgccttccggggcctgcggcagcacttctgtgagcacatctatgagtggagggagatctatgacagcaaggagccccacaatgccaagtttcctgcccccatggacaagaacctgaatgagctgcagaagatcatcatcctgcgctgcctgcggccagacaagatcaccccagccatcaccaactacgtgacagacaagctgggcaagaagtttgtggagcccccaccatttgacctgaccaagagctacctggacagcaactgcaccatccccctcatctttgtgctgagccctggagctgaccccatggccagcctgctgaagtttgccaatgacaagtccatgagcggcaacaagttccaggccatcagcctgggccagggccagggccccatcgccgccaagatgatcaaggccgccatcgaggagggcacctgggtgtgcctgcagaactgccacctggccgtgtcctggatgcccatgctggagaagatctgtgaggacttcaccagcgagacctgcaacagcagcttccggctgtggctgaccagctaccccagcagcaagtttcctgtgaccatcctgcagaatggagtgaagatgaccaatgagccccccaccggcctgcggctgaacctgctgcagagctacctgacagatcctgtgtctgaccctgagttcttcaagggctgccggggcaaggagctgctcttcatcaatgaatatgacaccatcccctttgaggccatctcctacctgactggagagtgcaactacggcggccgggtgacagatgactgggaccggcggctgctgctgaccatgctggccgacttctacaacctgtacatcgtggagaacccccactacaagttcagccccagcggcaactactttgccccacccaagggcacctatgaggactacatcgagttcatcaagaagctgcccttcacccagcaccctgagatcttcggcctgcatgaaaatgtggacatcagcaaggacctgcagcagaccaagaccctgtttgagagcctgctgctgacccagggcggcagcaagcagacaggagccagcggcagcacagaccagatcctgctggagatcaccaaggacatcctgaacaagctgcccagcgactttgatattgagatggccctgaggaagtaccctgtgcgctatgaggagagcatgaacacagtgctggtgcaggagatggagcgcttcaacaacctgatcatcaccatccggaacaccctgcgggacctggagaaggccatcaagggcgtggtggtgatggattctgccctggaggccctgagcggcagcctgctggtgggcaaggtgcctgagatctgggccaagaggagctaccccagcctgaagcccctgggcagctacatcacagacttcctggcccggctgaacttcctgcaggactggtacaacagcggcaagccctgtgtgttctggctgagcggcttcttcttcacccaggccttcctgactggagccatgcagaactatgccaggaagtacaccacccccatcgacctgctgggctatgaatttgaggtgatccccagcgacaccagtgacaccagcccagaagatggagtgtacatccacggcctgtacctggatggagcccgctgggaccgggagagcggcctgctggccgagcagtaccccaagctgctgtttgacctgatgcccatcatctggatcaagcccacccagaagagccgcatcatcaagagtgatgcctacgtgtgccccctgtacaagaccagcgagaggaagggcaccctgagcaccaccggccacagcaccaactttgtgattgccatgctgctgaagacagaccagcccaccaggcactggatcaagaggggcgtggccctgctgtgccagctggatgactag

SEQ ID NO: 109880 - DNA, 2355 bp, Artificial Sequence
  derived and/or modified sequence
atgtctgatgccaacaaggccgccatcgctgctgagaaggaggccctgaacctgaagctgccccccatcgtgcacctgcctgagaacatcggcgtggacacccccacccagagcaagctgctgaagtaccgccgcagcaaggagcagcagcagaagatcaaccagctggtgattgatggagccaagaggaacctggacaggaccctgggcaagaggacccccctgctgcccccaccagactacccccagaccatgaccagcgagatgaagaagaagggcttcaactacatctacatgaagcagtgtgtggagagcagccccctggtgcccatccagcaggagtggctggaccacatgctgcggctcatccctgagagcctgaaggagggcaaggagcgggaggagctgctggagagcctcatcaatgaggtgtccagtgactttgaaaattccatgaagcgctacctggtgcagagcgtgctggtgaagccccctgtgaagagcctggaggatgaaggaggccccctgcctgagagccctgtgggcctggactacagcaacccctggcacagcagctatgtgcaggccaggaaccagatcttcagcaacctgcacatcatccaccccaccatgaagatgctgctggacctgggctacaccacctttgctgacacagtgctgctggacttcaccggcatccgggccaagggccccatcgactgtgagagcctgaagacagacctgagcatccagaccagaaatgctgaggagaagatcatgaacacctggtaccccaaggtgatcaacctcttcaccaagaaggaggccctggagggcgtgaagccagagaagctggatgccttctacagctgtgtgtccaccctgatgagcaaccagctgaaggacctgctgcggaggacagtggagggctttgtgaagctgtttgaccccaaggaccagcagaggctgcccatcttcaagattgagctgacctttgatgatgacaagatggagttctaccccaccttccaggacctggaggacaacgtgctgagcctggtggagagaattgctgaggccctgcagaatgtgcagaccatccccagctggctgagcggcaccagcacccctgtgaacctggacacagagctgcctgagcacgtgctgcactgggccgtggacaccctgaaggctgctgtgcacaggaacctggagggcgccaggaagcactatgagacctacgtggagaagtacaactggctgctggatggaacagctgtggagaacatcgagaccttccagacagaggaccacacctttgatgagtacacagagttcatcgagaagttcctgagcctggccagcgagatcatgctgctgccccagtggatccactacaccatggtgcggctggactgtgaggacctgaagacaggcctgaccaacaaggccaaggcctttgccaacatcctgctgaatgacatcgccagcaagtacagaaaagaaaatgaatgcatctgcagcgagtttgaggccatcaaggagcacgccctgaaggtgcctgagaccacagaggagatgatggacctgatctcctatgtggagaaggccaggacagtgggcatcgaggagctgatcctgcgcatccaggagagcaagaggcagatgagctacttcctggatgtgttcctgttcccccaggaggacctggccctgaatgccaccgtgctgatgtggcccaggaagatcaaccccatctttgatgaaaatgatgagctgattgaaaatgccaagcacaagaaggaaaatgagctgatggccaagcgggagaagctgatcctggagattgagaaggagagcaggaggatggaggagttcacagaatttgctgagctggagaggatgcagcagtatgtgacagatgtgcggcagctgcagaagaggatccaggagagcgaggaggccgtgcagttcatcaacaaggaggaggagctgttcaagtgggagctgaccaagtacccagagctggacaagctgaaggtgaacatcgagccctaccagaagttcttcaactttgtgctgaagtggcagaggtctgagaagcgctggatggatggcggcttcctggacctgaatggagagagcatggaggctgatgtggaggagttcagccgggagatcttcaagaccctgaagttcttccagaccaagctgaagaaggagctgcaggagaagaggaaggccgccaggaagaggagcctggaggaggagaagattgaggaggagcccaaggacaatgccaccatcaccatgtgcagcacagtgatggagcagatcaaggccttcaaggtgtag

SEQ ID NO: 109881 - DNA, 2040 bp, Artificial Sequence
  derived and/or modified sequence
atgttcctgctgaccggcggcgtgagcctgaagagcgccgagaagaacccggacccaacttggctgcaggacaagtcctgggaggaaatctgtagggcctccgagtttcctgccttccggggtttgcggcagcacttttgcgaacacatttatgaatggagggaaatctacgacagcaaggagccccacaatgctaagtttcccgcgcctatggacaagaatctcaacgagttacaaaaaattattatcctgaggtgcctgcggccagataaaatcacccccgcaataaccaactacgttacagacaagctaggcaagaaattcgtcgagccgccaccattcgatctaaccaagtcatacctggactcaaactgtacaatcccccttatcttcgtgctgtcaccaggagcagacccaatggcctctctgcttaagtttgcaaatgacaagtctatgtccgggaacaagttccaagccatttctctcggacagggccaaggccctatcgccgctaagatgatcaaggctgctatcgaggaaggaacatgggtctgcctgcagaactgtcacctggccgtgtcctggatgcccatgctggagaagatctgtgaagatttcaccagcgagacatgtaacagctcctttcggctgtggttgacgagttatccatcctccaagtttcctgtgactatcctgcagaatggcgtgaaaatgacgaacgaacctcccacagggctgagactgaatttgctccagagctacctcaccgacccagtgtctgatcccgagtttttcaagggatgccgagggaaagagttgctgtttataaatgaatatgataccattccctttgaggctattagttacctcacaggcgagtgtaactacggcgggcgggttaccgatgattgggaccggagactactgctgactatgctcgccgatttctataatttgtatattgttgagaatccgcattataagtttagtccatccggaaattatttcgctccacctaaaggtacatacgaagactatattgagttcattaagaagttgccatttacccaacatcctgaaatcttcggcctgcatgaaaatgttgacatctcaaaagatcttcagcagacaaaaacactatttgaatcattgctgctgacccaaggcggctcaaagcaaaccggcgcatccggcagtaccgatcagatcctgctagaaattaccaaggatatactaaacaaattgccctcagatttcgatattgagatggcactgcgcaagtatccagtccgctacgaggagagcatgaataccgtgctggtacaggagatggaaaggttcaacaacctgattattacaatcagaaatactctccgcgacctcgaaaaggcaataaagggagtggtcgtgatggatagcgcactggaagcactgtcggggagtctgctggtgggcaaagtgccagagatctgggccaagcggtcctaccctagccttaagcctctgggttcctacataaccgacttcctggctcggcttaacttcctccaggactggtacaacagcgggaaaccatgcgtgttttggctgagtgggtttttttttactcaggcattcctgacgggcgctatgcagaactacgcacgcaagtacactaccccgatcgatttgttggggtatgaattcgaggtgatccccagtgacacctcagacacctcccccgaagacggagtctatattcacgggctttacttggatggagccaggtgggacagggagtctggcttattagccgaacagtatcccaagttgctgttcgacctcatgcccattatttggatcaaacctactcagaaaagtagaatcatcaagtccgatgcttatgtctgccccctctacaaaacttccgaaagaaaggggacgctttcaaccacaggtcatagcacaaatttcgtgattgccatgctgcttaaaacagatcagcccacaaggcactggattaaacgaggtgtcgcactgctctgccagctggacgactag

SEQ ID NO: 109882 - DNA, 9279 bp, Artificial Sequence
  derived and/or modified sequence
atgagcgacgccaacaaggccgccatcgccgccgagaaggaggccctcaatctcaagttaccccccatcgtgcatctgcctgagaatattggcgtggataccccaacccagtccaaattgttgaagtatcggcgatctaaagaacaacaacagaagattaaccagctcgtaattgacggcgcgaagcgtaacctcgaccgcaccctaggaaagcggactcccctgctgccccccccggactatccacagactatgactagcgaaatgaagaaaaagggatttaactacatatatatgaagcaatgtgtcgagtcatctccgcttgtccccatccagcaggagtggctggaccacatgctacgactaatccccgagagtctgaaagaagggaaggaacgggaggagctgctggagtctctgatcaacgaggtgtcatccgacttcgagaatagcatgaagcgctacctggtccaatccgtcttagtgaagccccctgttaaatcgctggaagacgagggcggaccactgcctgagtctccagtgggtctggactattccaatccctggcactcctcttatgtgcaagcccggaatcagatcttctccaatctccacattatccaccctaccatgaagatgcttctagacctaggctacactaccttcgctgacactgtgctgttggactttacaggtattcgtgcgaagggtcccatcgactgcgagtccctgaagaccgacctgtctatccagacaagaaatgccgaggaaaagataatgaacacctggtaccctaaggtcatcaacctatttacaaaaaaggaagcactagaaggcgtcaaaccagaaaagctggatgccttttactcttgtgtgtcaaccctgatgtctaaccagttgaaagacctcctgaggcggaccgtggaaggatttgtgaagctgtttgaccccaaggaccagcagaggctgccgatttttaagattgagttgacattcgatgacgacaaaatggaattctaccctacgtttcaagaccttgaagataacgtgctgagcctagtagagcgaatcgctgaggctctccagaacgtacagaccatccccagctggctcagcggcacatctacgcccgttaacctcgacaccgaactcccagaacacgtactgcactgggccgtggacaccctaaaggccgccgtacaccgtaatctggaaggagcacgcaagcactatgaaacttacgttgaaaaatataactggttgctggacggtacggccgtcgaaaacattgagacattccagacagaggatcatacttttgatgagtatacagagttcatcgaaaaattcctgtctctcgctagcgagatcatgctgctcccacagtggattcattataccatggtgagacttgattgcgaggatcttaagaccgggctcaccaacaaagctaaggcctttgcaaatatcttattgaacgacattgctagcaagtaccgcaaagagaacgagtgcatctgcagcgaatttgaggcaattaaagagcatgccctgaaagtacctgaaacaactgaagagatgatggacttaatctcgtatgtcgaaaaagccagaacagttggcatcgaggaactcatcttaaggatacaggagtctaaaaggcaaatgtcctatttcctagacgtattcctgttcccccaggaggatttagccctgaatgctactgtgctgatgtggcctagaaagatcaatcccatttttgatgaaaacgacgagcttatcgagaacgccaagcacaagaaagaaaatgaactcatggctaaacgcgagaagctgattctcgaaatcgagaaagagtctcggagaatggaggaattcactgagttcgcggagttggagaggatgcaacagtacgttaccgacgtgcgccaattgcaaaaaaggatccaagagagcgaagaggccgtgcagtttattaacaaagaggaagagctcttcaaatgggaacttaccaaatatcccgagctggacaagctcaaagttaacatcgaaccataccaaaaattctttaattttgtgctcaagtggcagcgctctgagaaaaggtggatggacggtggcttcctagacttgaacggcgaatctatggaggcggacgttgaagaattttcaagggaaatctttaagactctcaaatttttccagacaaagctgaaaaaagagctgcaggaaaaaagaaaggccgcccgcaaacgtagtctggaggaggaaaagatcgaagaggaaccaaaagacaatgctacaatcactatgtgtaggatgcgtgcccggcactggaagcagatctctgagatcgtgggctatgatctcactcccgatagcggcactaccctccggaaggtgcttaaacttaacctcaccccctatctggaacaatttgaagtgatctccgcaggcgcctccaaggagtttagtctagaaaaggccatgaacactatgatcggcacttgggaggatatcgccttccacatttctctctacagagacactggagtttgcattcttagcagtgtggacgaaatacaggccattctggatgaccagatcattaagacccagaccatgagggggtctccctttattaagccttttgaacacgaaataaaggcctgggaggataggttgattaggatccaggaaacaatagacgagtggctgaaggtacaggcccagtggctgtaccttgagccaatcttttgctctgaagacatcatgcaacagatgccggaggaggggcgtcagttccaaaccgtggatcggcactggagagacataatgaagttttgcgctaaagaccctaaagttttagccgcaacctccctgaccgggttgctggagaaactccagaattgtaacgaactgctcgaaaaaatcatgaaggggctcaatgcgtacctagagaaaaagcgcctgttctttcctagattttttttcttgtcaaacgatgaaatgttagaaatacttagcgagacaaaggatcctctcagggttcagccacacctgaagaaatgctttgagggtatcgcaaaactggaattcctgcccaacctggacatcaaagctatgtacagcagtgagggcgaacgggtagagctgatagccctaatctctacaagcgccgcaagaggcgccgtcgagaaatggctcatacaggttgaggacctgatgctgagatctgtgcacgacgtaatagctgcggctcgcttggcgtaccctgagtcagcccgccgcgattgggtccgggagtggcccggccaggtcgtgctgtgtatctctcagatgttctggacctctgagactcaggaagtgatatctggagggaccgaaggcctgaagaagtattataaggaactccagaaccagttgaatgagattgtggagctcgtgcgcggtaaactgagcaagcaaacacggaccacgttgggagccttggtgacaatcgatgttcacgcccgggacgtcgtgatggacatgataaagatgggggtctcacacgataccgactttctgtggctggcccagctccgttattactgggagaatgagaatgcgcgtgtaaggatcatcaattgcaatgttaagtacgcttacgagtacctcggaaatagccctaggttagttatcaccccacttacggaccgatgctataggaccctgattggcgcattctacctcaatctgggcggcgccccagaggggcctgcaggcacaggtaagacagaaaccactaaagacttagctaaggcattagccgttcaatgcgttgtgtttaactgttcagacggcttggactacctcgcaatgggcaagttcttcaaggggctggcttcaagcggtgcctgggcatgctttgacgagttcaaccggattgaactggaggtgctgtctgtggtcgcccaacagatcttgtgtattcagagggccattcaacagaaactggtcgttttcgtgtttgagggaaccgaactgaaactgaaccctaattgcttcgttgcaattacaatgaatccggggtacgctggaagatcagagctaccagacaacctcaaggtgctgtttaggaccgtggcaatgatggtgccaaactatgcactcattgcggagattagcttatactcatatggctttctgaacgcacggccattgagtgtgaaaatcgtcatgacttatcggttgtgttccgagcagctgtcttcccagtttcattacgactacggtatgagagccgtaaaggccgtgttggtcgccgccggaaatctgaaactgaaatacccaaacgagaacgaagacattctacttctgagaagtattaaagacgtgaacgagcccaaattcctgtcccacgatattcccctgtttaacggcataacatcggatttgtttccaggcattaagcttccagaggccgattaccacgaattcctggaatgcgctcatgaggcttgcaatgttcacaatctgcaacctgtcaaatttttcttagaaaaaatcatccaaacctatgagatgatgatcgtgcggcacgggttcatgctggtcggagaaccgtttgccgctaaaaccaaagttctgcatgtgctggccgacaccctgaccttaatgaacgagcacggctatggtgaagaagagaaggtcatctaccggacagtgaacccaaagagcatcaccatgggccaattgtttgggcagtttgatcccgtttcacatgagtggaccgacgggattgttgccaacacctttcgagagttcgccttgtccgaaactcctgacagaaagtgggttgttttcgatggacccattgatacactgtggattgaaagcatgaacactgtgctggacgacaacaagaaactttgccttatgtccggtgagatcattcagatgtcaccccagatgagccttatttttgaaactatggatctcagtcaggcctcccctgctactgttagccggtgtggcatgatctacctggagccctctcagctggggtgggagcccctggtttcaagttggttgaacagtttgaagggccctctttgcgagccggagtaccaagcccttctcagaggcttattcgcatggctgataccaccatcgctcaatcaaagagtggaattatttcagctaaactatctttacacaactattgtgtcaaaaatcctgaagatcctgattacatttagaatcagcaattacttcaaatacgttccactgaagacccagtgcacttttataaaattttttctgcaccagcaggcctgttttatcttcagcctgatttggtccattggtgggtcctgtgacaccgacgggcgaagagttttcgacacgttcattagactgattattctcggtaaggatgatgaaaaccccgtgcccgactcagtcgggaagtgggaatgcccttttgatgaaaagggcttagtttacgactatatgtacgagctgaagaacaaggggagatgggtgcactggaacgaactgatcaagaatactaatctgggtgacaaacagattaagattcaggatataatcgttccaacaatggacacaatcagatacacgttcctcatggacttatcaatcacctatgcgaaaccactcctcttcgttggtccaaccggcaccggcaagtcggtgtacgtcaaagataagcttatgaatcatttggagaaagaccagtattttcccttctatattaacctatccgcccgcacaagcgctaatcaggtgcaaaatataattatggcgcgcctcgacaaaagacgtaagggagtgttcggacctcccatgggaaaaaaatgtatcatcttcattgatgacatgaatatgcccgctctggagaagtacggagcacaaccacccattgaactcctgcgccagttcttcgactgcggtcattggtatgacctcaaggataccagtaagattacgctggtcgacattgagttgattgccgctatgggcccgcccggggggggcagaaaccctgtgactcctcgctgcatccgtcacttcaatatctgctcaattaattctttttcagatgagacgatggtccgtattttcagtagcatcgtggctttctatttaaggacacatgagttcccccccgaatactttgtgattggaaatcagatagttaacgggaccatggagatctataaacagtctgtggaaaatcttctcccaaccccaaccaagtctcattacacattcaacctgagagacttctcccgcgtaatccgcggctgcctgctcatagagcgtgacgcagtcgctaacaagcataccatgattaggttgttcgttcacgaagtgctgcgggtgttctacgacaggctcattaacgacgatgatcgaagatggttattccagctgactaagactgtgataaaagaccatttcaaagagagctttcattcaattttttctcacttgcgcaaacaaaacgcgccagtcactgaagaagacttgaggaatctgatgttcggggattacatgaacccagatctggagggcgatgacagggtatacattgaaatcccaaatatacatcatttctctgatgtcgtcgatcagtgccttgatgagtataaccagactcacaagacacgaatgaacctcgtcatattccgctacgtgctcgagcacctgagccgcatctgcagggtgcttaagcagagcggaggaaacgccctgcttgtggggctgggcggttccgggagacagtccctgactcgccttgcaactagcatggccaaaatgcacatattccagcctgaaatctctaaatcttacggaatgaacgagtggcgtgaggacatgaaatcctttatcgctgtccctgtgacgaaccggatagtggataataagtctaaaatccttgagaagaggctcaggtatctcaatgaccactttacatataatctctactgtaacatatgccgttccttgttcgaaaaagacaagctcctgttctcctttttgttgtgcgccaaccttctcttggcgcgtaaggagatcgagtaccaagagctgatgtttctccttaccggcggagtgtccctgaaaagcgcagaaaagaatccagatcccacttggctgcaagacaaatcttgggaggaaatttgtcgcgctagtgagttccccgcatttcgcggactacggcagcacttctgcgagcacatctacgagtggagagagatctatgattcaaaggaaccccacaacgcaaagtttcctgcaccaatggataagaatctcaatgaactacaaaagatcatcattctacgctgcttgaggccagacaagatcaccccagccattacgaattatgtaactgacaagctggggaaaaaattcgtggagcctcctccatttgatctgacaaagtcgtatttagactcgaactgtacaatcccactgatttttgtgctttccccaggagccgatcctatggctagtctccttaaattcgccaacgataagagtatgagcgggaacaaattccaggcgatttcactcgggcaaggccaaggaccgattgcggccaagatgatcaaggccgccattgaggagggcacatgggtttgtcttcagaactgtcatctggcagtgagctggatgcccatgctggagaagatctgcgaggacttcacttcagagacctgcaattcctcgtttcggctctggctgacttcttatccaagttcaaagttcccagtaaccattcttcaaaatggcgtcaaaatgacgaatgagcccccaacaggactgcgattgaatctgctccaatcttacctgactgatcctgtgagtgaccccgagttctttaaaggttgcagaggcaaggaattagcatgggagaagctgttgtttggtgtgtgtttttttcacgcactcgtacaggagcgcaagaagttcggaccactcggatggaacataccctacggcttcaacgagagtgatcttcgaatcagcattcgccagcttcagctatttatcaatgaatatgatactattccctttgaggcaatttcctacctgaccggtgaatgcaactatggcggccgcgtaacggatgactgggaccggagactccttctgaccatgctggcagacttttacaatctgtatatagttgaaaaccctcattacaagtttagtccatctggcaattatttcgcaccaccaaaaggaacatacgaagactacatcgagtttataaaaaagctgccattcacccagcaccccgagatatttggtctccacgagaatgttgatatctccaaggacctacagcagacaaagactctgtttgagagtcttctgcttacacagggcgggtctaaacaaacaggcgcttctggttcaactgatcagattttgcttgaaatcactaaagacatcttgaacaagctcccctcagacttcgatattgagatggctctgaggaaatacccggtgcggtacgaagagagcatgaacaccgtgctggtgcaggagatggagaggttcaacaatctcatcatcaccatcagaaacaccttaagagacctggaaaaagctatcaaaggagtggtggtgatggattcagcactcgaggcactctccgggagccttttagttggtaaggtgcctgagatttgggccaagcgctcctacccctccttaaagccactgggctcttacataacagattttctagcccgtttaaacttcttacaggattggtacaatagcggcaagccttgtgtgttctggcttagtggattctttttcacacaggcgttcctgactggagctatgcagaactacgcccgcaaatataccacgcccatcgacttattgggctatgagttcgaagtgatcccgtcagatacgtccgacacctcccccgaagatggggtgtatatccacggactttatctagatggagccagatgggacagggagagtggcctcctggctgagcagtaccctaagctgctttttgatctcatgcccattatatggatcaagcctacccaaaaatctcgtattatcaagtccgatgcctatgtttgtcccttatataagactagcgaacggaaaggcacccttagtaccacaggacattctacaaatttcgttatagcaatgttgttaaaaaccgaccaacctacaaggcactggatcaaaaggggagtcgcattgttgtgtcagttagatgactag

SEQ ID NO: 109883 - DNA, 2355 bp, Artificial Sequence
  derived and/or modified sequence
atgagcgacgccaacaaggccgccatcgccgccgagaaggaggccctgaacctgaaactcccacccatcgttcacctaccagagaacataggagtggatactccaacccagagtaagctactgaagtaccggaggtctaaagagcagcagcaaaaaattaatcaattggtgattgatggtgcgaagagaaatttagaccgtacactcggcaagagaacaccgcttctgcctcctccagattatccccagaccatgacttctgagatgaaaaagaaaggattcaattacatttatatgaagcagtgtgttgaaagctcgcccttggtccccatccagcaggaatggctcgatcacatgctccgcctaatccctgaatcactgaaggaggggaaagaacgagaagagcttctggagagtctaatcaacgaagtttctagtgacttcgagaacagtatgaagagatacttggttcagtccgtgcttgtgaaaccccccgtgaaaagcctggaggatgaaggagggcctttgcctgaatcacccgttggactcgattattccaacccatggcactcatcatacgttcaggcccgcaaccaaatctttagcaaccttcatatcattcatccgaccatgaaaatgctgctggatctgggatatacaacgtttgccgacactgttctgctggacttcacaggcattcgggccaaggggccaatcgattgtgaatctttaaaaacggatctctctatacaaaccagaaatgccgaggagaagataatgaatacctggtatcccaaagtgatcaacctgtttaccaagaaggaggcactggagggcgtgaagccagagaaacttgacgctttctactcttgtgtgagtactctgatgtcaaaccagctgaaggatcttctgcggcggactgtggaggggtttgtcaaactcttcgatccaaaggaccagcagcggcttcccattttcaagatcgagctaacctttgacgatgataagatggagttttaccctacttttcaggacctggaagacaatgttctttcgctggtggaacggatcgcagaggcgttgcagaacgttcaaaccatccccagttggttgtccggtaccagcaccccggtaaacctggataccgagctgcctgaacacgttttgcactgggctgttgacactctcaaggctgccgtccacagaaatctggagggcgcaagaaaacattatgaaacctacgttgaaaaatataattggctcttggatgggacagccgtcgagaatatagagaccttccagaccgaggatcatacctttgatgagtacaccgaatttatagaaaagtttcttagcttggcctcggaaatcatgctcctgcctcagtggatccattacacaatggttaggctggactgtgaagatctgaagaccggactgactaacaaggctaaggctttcgctaacatactactgaatgatatcgcctcaaaataccgtaaggaaaacgaatgcatttgcagtgagttcgaagccatcaaggagcacgctctgaaggtacctgagacaactgaagaaatgatggaccttattagctatgtcgaaaaagcgagaaccgtaggtatcgaggagctcattctgcgcatccaggaatctaaaagacagatgagttattttcttgacgtttttctatttcctcaagaggaccttgccctgaatgcgactgtgctcatgtggccgcggaaaattaatcccatcttcgacgagaatgatgagttgatcgagaacgccaagcacaagaaggagaacgagctgatggctaaacgggaaaagctcatcctcgaaatcgagaaagaaagcagacggatggaagagtttacagagttcgcagagctggaacgtatgcagcagtatgtgactgacgtgcggcagttgcaaaagaggatccaggagagtgaggaggccgtccagttcatcaacaaagaagaggaactcttcaaatgggaactaaccaagtaccccgaactggacaaactgaaagtcaatatcgaaccgtatcaaaaattctttaactttgtgttgaaatggcagcgatccgagaaacgctggatggatgggggcttcctggatttgaatggagaatcgatggaagccgacgtggaagagttctctagggagatatttaagacactgaagttttttcaaactaaactgaaaaaagagctgcaggagaaaagaaaagccgcacggaaacgctcacttgaagaagagaagattgaggaggaacctaaggacaatgcaactataaccatgtgctccacggttatggaacaaataaaggcatttaaggtctag

SEQ ID NO: 109884 - DNA, 2040 bp, Artificial Sequence
  derived and/or modified sequence
atgttccttctgacgggtggtgtgtctctgaaatcagcagaaaaaaacccagatcccacctggctccaagataagtcttgggaggagatatgtcgcgcttctgagttccccgcattccgtggtctgcgccagcacttctgtgaacacatctatgaatggagggagatctacgactcaaaggagcctcacaacgcgaagttcccagctccaatggataaaaacctgaatgaactccagaagataatcatacttcgatgcttgaggcctgacaaaattaccccagcgattaccaattatgtgacagacaagctgggtaaaaaatttgtggaaccgccaccattcgacttgactaaaagttacctggactcgaattgtactattccacttatcttcgttctttcaccaggcgcagaccccatggcctcccttcttaagtttgctaatgacaaatctatgtccggcaacaagttccaggctatatcgctagggcaaggacagggccctattgccgctaagatgatcaaagcagctatagaagagggaacctgggtgtgcttacaaaattgccacttggctgtgtcctggatgccgatgctggagaagatttgcgaggatttcacctccgagacgtgtaatagttcttttaggttatggctcacaagctatccaagctctaagtttccggtcaccattctgcagaatggcgtgaaaatgactaacgagccgcctaccggccttcgcctcaatctactgcagagctatttaacggatcctgtttcggacccagagttttttaagggatgcagaggtaaggaactgctgttcatcaacgagtacgataccattccattcgaagctattagttacttgaccggagaatgcaactacggtggtagggtgaccgatgattgggaccgtcgcctgttactgaccatgctggcggatttttacaacttgtacattgtggaaaatcctcattataagttttcacccagtggcaactacttcgcccctcctaagggtacatatgaggactacatagagttcattaagaagctcccttttacccagcacccagaaatttttgggttacatgagaatgtcgacatcagcaaggacctacagcagacaaaaactttatttgaaagccttcttctgacacaaggcggttctaagcagacaggcgctagtggttcaactgatcagatccttcttgaaatcactaaagatatcctgaataagctaccctccgatttcgacatcgagatggcactccgtaagtatccagtccgatatgaagaaagcatgaacaccgtgcttgtgcaggaaatggagagattcaataatttgatcatcacaatcaggaacacgttgcgagatcttgagaaagccataaaaggagtggtggttatggatagcgccttagaagcactatccggatcgctgcttgttgggaaagttccggaaatttgggccaaaagatcatatccaagtttgaagccgttggggtcttatataacggatttcttagctcggcttaacttcctccaggactggtataatagtggaaagccctgcgtgttctggctctcaggtttcttttttactcaggccttcctaactggagccatgcagaattacgcaagaaagtatacgaccccaattgacctgctggggtatgagttcgaagtgattccttctgacacctcagacacctcccctgaggacggcgtgtacatccacggtctgtatctggatggggcaaggtgggacagggagtcaggacttcttgcagaacagtatcccaaactgctgtttgacctcatgccaattatttggataaaacccactcaaaagagtcgcattatcaagtccgatgcctatgtttgccccctgtacaaaaccagcgaacggaagggcacattatctaccaccggtcacagcacaaattttgtcatcgccatgcttttgaaaaccgaccagccaacaagacactggattaagcggggtgtggccctcctctgtcaactggatgattag

SEQ ID NO: 109885 - DNA, 9278 bp, Artificial Sequence
  derived and/or modified sequence
atgtccgatgccaacaaggccgctatagctgccgaaaaagaggccctcaacctgaaactgccacccatagtgcacttgcccgagaatatcggggtcgatacccccacccagtctaaactgcttaagtaccgcaggagcaaagaacagcaacagaagatcaatcagctggttatcgacggagccaaaagaaatctcgatcggaccttgggcaaaagaacgccgctgttgcccccaccggactaccctcagacaatgacatctgaaatgaaaaaaaagggttttaattacatatacatgaagcagtgtgttgagtcatcccctttagtccctatacagcaggagtggctggatcatatgctgcgacttattccagaatccttgaaggaaggaaaagagagggaggagctgctggagtctctgattaacgaagtctcttctgacttcgaaaatagcatgaagcgttacctggtgcaatctgttctggtgaagcccccagtcaaatctctcgaggacgaggggggacccctccccgaatcaccagtgggcctggattattctaacccatggcactcaagctacgtccaagcccgtaatcagattttcagtaatctccatattattcacccaacaatgaagatgctcttagaccttgggtatacaacatttgctgacacagttcttctggacttcaccggcatacgggcaaaaggccctatcgattgtgagtccctcaaaactgacctgagcatccagacgcgcaacgccgaggaaaaaattatgaacacgtggtacccaaaggtcataaacttgtttacgaagaaagaggccttggaaggcgtcaaaccggaaaagctggacgcattttatagctgtgtgagcaccttaatgagcaatcaacttaaggacctcctacggcgaactgtggaaggattcgtcaaactgttcgaccctaaggaccagcaaaggcttccgatttttaaaatcgaactgacatttgacgacgataaaatggagttttaccccacctttcaggatttagaagataacgtactctccctggtagagaggattgccgaagcattacagaatgttcagacaatcccatcttggctctctggcacctccactccagtgaatttggacacagagttacctgaacacgttctccactgggcagttgatacgctgaaggccgcagtgcaccggaatcttgagggagcaaggaagcactacgaaacttacgttgagaagtacaactggctgctcgatggcactgccgtcgaaaacatagagacgttccagacggaagatcacacttttgacgaatataccgagttcatcgaaaagttcctttcacttgcttcagaaatcatgctactgccacagtggattcactacaccatggtccgattagactgcgaagatctcaagactggactcacaaataaggcaaaggctttcgccaacatcttgctaaatgatatcgcctcaaagtacagaaaagaaaatgagtgtatctgcagcgagtttgaggccattaaggaacatgcactgaaagtgccagagacgaccgaagagatgatggacctgattagttacgtggaaaaggcacggacggtgggtatcgaagaactgatccttcgcatccaagagagtaaaagacagatgagttacttcctcgacgtcttcctgtttccccaggaggacctcgctttgaacgcaacagtcctcatgtggcctcgaaagataaatccgattttcgacgagaatgatgagctgattgagaatgcaaagcataaaaaagagaatgagttgatggccaagagagaaaaactcatcctggagattgagaaggagtcccgccgaatggaggaattcaccgaatttgccgagctagagcgcatgcagcagtatgtcacagatgtcagacagctccagaagcgcattcaggagtctgaagaagccgtccagttcatcaataaggaagaggaactttttaaatgggagcttacgaagtaccccgaattggacaaattgaaagtgaatattgagccataccagaagtttttcaattttgtactgaaatggcaacggtctgagaagcggtggatggatggcggtttcttagaccttaacggcgaatccatggaagccgatgttgaagagttctctcgggagatttttaaaacactgaagttctttcaaacaaaactgaaaaaggagcttcaagaaaagcgtaaggcagcccgtaagaggtctctggaggaggaaaagattgaagaagaaccaaaggacaacgcaactattacaatgtgcagaatgcgagcacggcattggaaacaaatctccgagatcgttggatacgacttgactccggattcaggaacgaccctacgaaaagttctgaagctcaatctgacaccgtatctcgagcaatttgaagtcatctccgcaggggcttctaaagagttctcactcgagaaggcgatgaacaccatgatcggtacatgggaggatatcgcattccatataagcttatatcgcgataccggcgtttgtattttgtcttccgtcgatgaaatccaagcgattctggacgaccagataatcaaaacgcagaccatgcgtggctccccctttatcaagcctttcgagcatgagatcaaggcttgggaagatcggctgatcaggattcaggagactattgatgagtggctcaaagtgcaagcccagtggctgtacctggagccaattttttgtagtgaggacatcatgcagcagatgcccgaagaaggtagacaatttcaaactgttgaccgacactggagggacataatgaagttctgtgccaaagatccaaaagtgctcgctgctactagcctgactgggttactcgagaagttacagaactgcaatgagctcctggaaaagattatgaaagggctgaacgcatatctggaaaagaaaaggctgttcttccccagatttttcttcctctcaaacgacgaaatgctggaaatactgagtgagactaaggatcccttaagggttcagccacacttgaaaaaatgtttcgagggcattgcgaagcttgagtttttgcccaacctggatatcaaggctatgtactcaagtgagggggagcgagtcgaattgatcgcgctaatttccacttctgctgcaagaggtgctgtcgaaaagtggcttatacaggttgaggacctgatgttacggtccgtgcatgatgtgatagccgctgccagactggcttatcccgaatcggccagacgggactgggtgcgagagtggccagggcaggtagtactgtgtataagtcaaatgttttggacaagcgagacgcaggaggtcatttctggaggaaccgagggcctcaaaaagtactataaggagttgcagaaccagctaaacgagattgtggagctagtgcggggtaagttgtccaaacaaactcggacaaccctgggcgctttagtgaccatcgacgtgcacgctcgggacgtggttatggacatgattaagatgggtgtatcacatgatactgacttcctgtggctggctcaactacggtattattgggagaacgagaacgctcgtgtccgaataatcaactgcaacgtgaaatatgcctacgagtacctgggaaacagccctagactggttatcacacctctgacggatagatgctacagaaccctgattggagccttttacctgaacctcggcggtgcgcctgagggaccagcagggacaggcaagactgagactacaaaagacctcgccaaagcactggccgtgcaatgtgttgtcttcaactgttccgacggccttgattacctcgctatggggaaattcttcaagggcctggcctcatctggggcatgggcttgttttgacgaattcaaccgcattgagttagaggtgctgtcggtagtggcccagcagatcctttgcattcagagagccattcagcagaagctcgtcgtgttcgtcttcgagggcaccgaattgaagcttaaccctaactgcttcgtggccattaccatgaacccagggtacgctggccgatcggagctcccagacaatctcaaagtgcttttcaggacagtggcaatgatggtaccgaactacgccttaatcgccgagatctcgttgtattcctacgggtttctgaatgcccgacctctcagcgtcaagatcgtaatgacataccgcctgtgtagcgaacagctgtcctcccagttccattacgattacggcatgagagctgttaaggccgtactcgttgctgctggtaacctgaagctaaaataccccaacgaaaacgaggatatcctgcttctccggtctatcaaagacgtgaatgagcccaaatttctgagccatgacatacctctcttcaatgggattacctcagatctgttcccagggatcaagctcccagaggccgattatcatgagttcttggaatgcgcccatgaggcatgtaacgtgcataacttgcaacccgtgaagtttttcttggagaaaatcatccagacatacgaaatgatgattgttaggcatggatttatgttagtgggggagccttttgctgccaaaactaaagttctgcatgtgctcgcagacacgcttacactgatgaatgagcatggctatggcgaagaagagaaggtgatctatcgaaccgttaatccaaaaagcattacaatgggacagctcttcggccagtttgatcccgtctcccatgagtggacggacgggattgtggctaacacctttcgcgaattcgcactttccgaaacacccgatcgcaagtgggtggtttttgatggacctatagataccctgtggatcgagtcaatgaatacggttcttgatgacaacaaaaagttatgcctgatgtctggtgaaattatccagatgtccccacaaatgtccttaatctttgaaacaatggacctgtcccaggcctcaccggcaaccgtttcccgttgcggaatgatttatctagagcctagccaactgggatgggaaccccttgtttcctcctggcttaactcccttaaggggcctttgtgtgagccggaataccaggctctgttgcggggactgttcgcctggttaatcccacccagtctgaatcaaagggtcgagctttttcagctcaattatctgtataccacaattgtttccaaaatactaaagatattaattacattccggatttcaaattacttcaagtacgtgcctctcaagacacaatgcacttttatcaagttctttctacatcagcaggcctgttttatctttagtctgatctggagcatcgggggtagctgtgacaccgatgggaggcgggtgtttgacacattcatccggctaatcattcttggaaaggacgacgaaaaccctgtcccagatagcgtagggaaatgggaatgtccgtttgacgagaaagggttggtgtacgattacatgtatgagctgaaaaataagggcaggtgggtgcactggaacgagcttatcaagaataccaatttgggggacaagcagatcaaaattcaggatataattgtacccactatggatacgatccggtatacatttcttatggatctaagtatcacttacgctaagcctctgctattcgttggccctaccgggacagggaaaagcgtgtatgtgaaggataaactgatgaatcatcttgaaaaagaccagtatttccccttctatattaatctgtccgcccgtacatctgcaaatcaggtgcagaacatcatcatggccagacttgacaagcggagaaagggggtgtttgggcctcccatggggaaaaagtgcattatcttcattgacgatatgaacatgccagccttggaaaaatatggcgcacaaccgcctatagagctcctgcgccagttctttgactgtggacactggtatgatctgaaggacacaagcaagatcacactggttgacatcgagctgatcgcagccatgggcccaccaggcggtgggcgtaatcctgtaacgcccagatgcatccggcatttcaacatctgctctataaacagcttcagtgacgaaacgatggtgcgaatattctctagtatcgttgccttttacctgcggacccacgagtttcctccagagtattttgtgatcgggaaccagatcgtgaacggaaccatggagatttacaagcagagcgtggagaatctgctgcctacccccaccaagtcccactacacattcaatctgagagacttctcaagagttattagagggtgtcttcttatagaaagggatgcggtagctaataagcacactatgatcagactgtttgttcacgaggtgcttcgtgtattctacgatcgattgatcaatgacgatgatcggaggtggttgtttcaactcaccaagaccgtcataaaagatcacttcaaagagtccttccactcaatctttagtcatcttcgcaagcagaatgccccagtaactgaggaagaccttagaaatctgatgtttggcgattacatgaatccagacctggaaggagacgacagagtctatattgaaattcccaatatccaccatttctctgacgttgtggaccagtgtctggacgagtacaatcagacccacaagacgcgtatgaatctcgtcatctttcggtatgtacttgaacacctgagtagaatttgcagagtcctgaaacagagtggcggtaacgcactcctggtgggactgggcggatctggacgacaaagcctcacacgcctcgccacaagtatggctaagatgcacattttccagccagaaatttcgaaaagctacggaatgaacgaatggagggaggatatgaagtccttcatcgccgtccctgtcacgaaccgcatcgtcgacaacaagtcgaaaatcttagagaaacggctcagataccttaatgatcatttcacctataacctgtactgtaacatctgccgcagtctcttcgagaaagacaagctactcttttcctttctgctgtgtgccaacctgttgctggccagaaaggaaatcgaataccaagaactcatgtttctcctgaccgggggagtctctctgaagagtgccgagaagaatccggatccgacctggctgcaagacaagtcctgggaggagatctgtcgcgcttctgaattccctgcattcaggggactaaggcagcatttttgcgaacatatttacgaatggcgggagatctatgactctaaggagccacacaatgcgaagttcccggcacctatggacaaaaacctgaacgagctgcagaagatcatcattctcagatgcttgagacccgataaaattacaccagccatcacgaactatgtgaccgataagctcgggaagaaattcgttgagccgccaccctttgatttgaccaaaagctatttggactccaactgtacgatccctcttatctttgtgttgtctccgggagccgatcctatggcctccctgctgaaattcgcgaatgataagtcaatgtcggggaataagtttcaggcaatttctttgggtcaaggccaaggaccgatagcagccaagatgattaaggccgctatcgaagaggggacgtgggtatgtttgcaaaattgccatctcgccgtgtcttggatgcccatgttggagaaaatctgcgaagattttaccagtgaaacttgtaactctagcttccgcctgtggctaacgtcatacccaagttctaagtttcctgtgactatcctgcagaatggcgtgaagatgacaaatgaaccgcctacggggctccgcctgaatttactccagagctatctgaccgacccagttagtgatcccgagttctttaaggggtgcagaggcaaagagctcgcgtgggaaaagttgcttttcggggtgtgctttttccacgcccttgtgcaagaacgcaagaagttcggcccacttggttggaatatcccttacggtttcaacgaatcagatcttcggattagcatcaggcagctacagctgtttattaacgaatatgacaccattccatttgaagctatcagttaccttactggggagtgtaactacgggggtcgggtgacagatgactgggatcggcgtttgctgttgacaatgttagctgatttttataacctttacatagtggagaacccacactacaagttttctccatctgggaactacttcgccccaccgaagggaacgtacgaagactacatagagttcatcaaaaagctcccatttacacagcacccggagatctttggcttgcacgagaacgtggacatttccaaagacctgcagcagactaagaccctcttcgaatcccttcttttaactcaaggcggatccaagcagaccggtgcgagtggctctactgaccaaattcttctggaaatcaccaaagacattctcaataagctcccctccgattttgacatcgagatggcacttcgaaagtatcctgtcagatatgaagagtctatgaatacagtcctcgtgcaggagatggaacgctttaataatctcataatcactatccggaatactctcagggacttagaaaaggcgatcaagggagtggtggtgatggactcagctctggaggccctgagcgggtcgctcctggtcgggaaggtaccagagatatgggctaagaggtcatatccatcactaaaacctttgggcagctacatcacagacttcctggcgcgtctgaatttcctacaggattggtacaacagtggcaagccctgtgtgttctggctgtctggctttttctttacacaagcttttctaaccggcgcaatgcaaaattacgcacggaaatacacaacccctatcgacctgctggggtatgaattcgaagtgatccctagtgacacatccgacacatcgcctgaggatggggtttatatccacggattgtatctggacggcgcaaggtgggacagagagagtggacttctggccgaacaatacccaaagctgctctttgatttgatgcccatcatctggatcaagccaacacagaaatctagaatcatcaagagtgatgcctacgtgtgccccctctacaaaacctctgagagaaaaggtaccctgtctacgaccggacactccaccaactttgtcatcgcaatgctgctgaagactgaccagcccactcgtcactggattaaacggggagtcgccctcctctgtcagctggatgacta

SEQ ID NO: 109886 - DNA, 2355 bp, Artificial Sequence
  derived and/or modified sequence
atgagtgatgccaacaaggctgctattgcagcagaaaaagaggcccttaatctgaagctgccacccatcgtgcatctgcctgagaacatcggtgtggacactcctacacagagtaagcttctcaagtacagacgcagcaaggaacaacagcaaaagattaaccaactggtcattgacggcgcaaagcgtaatctcgatcgcactcttggtaagagaactcccctgctgccaccaccagactatccacaaacaatgacatccgaaatgaagaagaaagggtttaactacatctacatgaaacagtgcgttgagtcttctccactggtcccaatacagcaggagtggctggatcacatgcttcggctgatccctgaatccttgaaggaaggcaaagagagagaagaattactggagagcctgataaacgaggtgagttcagattttgaaaatagtatgaagaggtatctggttcagtcagttttggttaaaccccctgtgaagagcttagaagacgagggcggtcccttaccagagagcccagtcgggcttgactacagtaacccttggcacagctcttacgtccaagctcggaatcagatttttagcaatctgcatatcatccacccaacaatgaaaatgctcttggacttaggttatacaacatttgctgataccgtcttactggattttaccggaatcagagcgaaagggccaatcgattgtgagtcccttaagacagatctatcaatccagacccgtaacgctgaggaaaaaatcatgaatacctggtaccccaaggttatcaacctatttaccaaaaaggaggccctggaaggagttaaaccagaaaagctggacgcattttactcatgcgtatcaaccctgatgagtaaccagctaaaggacctccttcgacgtacagtcgagggctttgtcaagctgtttgaccccaaggaccagcagcggctaccgatctttaagatcgagcttacgttcgatgacgataagatggaattctaccctacattccaggatctggaagataatgttctgtcactggtagaacgcatcgctgaagctctccagaatgtccagaccatcccatcctggcttagcgggacctccaccccagttaatcttgatacggagctgccagagcacgttctgcattgggctgttgacacactcaaggccgcagtacatcgtaatctagaaggagcaagaaagcattacgagacatacgtggaaaagtacaactggctgctggacgggaccgcagtggagaacattgagacgttccagactgaagatcatacctttgacgagtacacagagttcatcgaaaagttcctcagcctagcatccgagattatgctactcccgcagtggatccactatactatggtgcgcctggactgtgaagatctgaagaccggtctgactaataaagccaaggcatttgctaacatcctgctgaacgacattgctagcaaatatcgaaaggaaaacgagtgtatatgtagcgagttcgaggctatcaaagaacatgccctcaaggtccccgagactacggaggaaatgatggatttaattagttatgtcgagaaggcccgtacagtgggtatagaagagctgatcttaagaatccaggaaagtaaacgacaaatgagctactttctggacgtctttctatttcctcaggaagatctggcccttaacgctacagtgctcatgtggccacgaaagataaacccaatatttgacgagaacgatgaactcatcgagaatgccaagcacaagaaagagaacgaactgatggccaagcgggagaagctgatattggaaattgagaaggagtcgcggagaatggaggagttcaccgaattcgccgagctggagagaatgcagcaatacgtgactgacgtgcggcagctccagaagagaatccaggagagcgaagaggctgtccagttcataaataaagaagaagagctgtttaaatgggagctgactaagtatccagagttagataaattgaaggttaatatagagccgtaccagaaattctttaatttcgtgctcaagtggcaaaggagcgaaaagaggtggatggatggtggcttcctggacctgaatggggaaagcatggaagctgacgtcgaggagttttcccgtgagatttttaaaactttgaaattcttccagactaaattgaaaaaagaacttcaggagaagcggaaggccgcacgtaaacgaagcctggaggaggagaaaattgaggaggaacccaaggacaatgctacaattaccatgtgctcaacagtaatggagcagattaaagcctttaaagtttag

SEQ ID NO: 109887 - DNA, 2040 bp, Artificial Sequence
  derived and/or modified sequence
atgttcctgctgaccggcggcgtgagcctgaagagcgccgagaagaaccccgaccccacctggctgcaggacaagagctgggaggagatctgcagagccagcgagttccccgccttcagaggcctgagacagcacttctgcgagcacatctacgagtggagagagatctacgacagcaaggagccccacaacgccaagttccccgcccccatggacaagaacctgaacgagctgcagaagatcatcatcctgagatgcctgagacccgacaagatcacccccgccatcaccaactacgtgaccgacaagctgggcaagaagttcgtggagcccccccccttcgacctgaccaagagctacctggacagcaactgcaccatccccctgatcttcgtgctgagccccggcgccgaccccatggccagcctgctgaagttcgccaacgacaagagcatgagcggcaacaagttccaggccatcagcctgggccagggccagggccccatcgccgccaagatgatcaaggccgccatcgaggagggcacctgggtgtgcctgcagaactgccacctggccgtgagctggatgcccatgctggagaagatctgcgaggacttcaccagcgagacctgcaacagcagcttcagactgtggctgaccagctaccccagcagcaagttccccgtgaccatcctgcagaacggcgtgaagatgaccaacgagccccccaccggcctgagactgaacctgctgcagagctacctgaccgaccccgtgagcgaccccgagttcttcaagggctgcagaggcaaggagctgctgttcatcaacgagtacgacaccatccccttcgaggccatcagctacctgaccggcgagtgcaactacggcggcagagtgaccgacgactgggacagaagactgctgctgaccatgctggccgacttctacaacctgtacatcgtggagaacccccactacaagttcagccccagcggcaactacttcgccccccccaagggcacctacgaggactacatcgagttcatcaagaagctgcccttcacccagcaccccgagatcttcggcctgcacgagaacgtggacatcagcaaggacctgcagcagaccaagaccctgttcgagagcctgctgctgacccagggcggcagcaagcagaccggcgccagcggcagcaccgaccagatcctgctggagatcaccaaggacatcctgaacaagctgcccagcgacttcgacatcgagatggccctgagaaagtaccccgtgagatacgaggagagcatgaacaccgtgctggtgcaggagatggagagattcaacaacctgatcatcaccatcagaaacaccctgagagacctggagaaggccatcaagggcgtggtggtgatggacagcgccctggaggccctgagcggcagcctgctggtgggcaaggtgcccgagatctgggccaagagaagctaccccagcctgaagcccctgggcagctacatcaccgacttcctggccagactgaacttcctgcaggactggtacaacagcggcaagccctgcgtgttctggctgagcggcttcttcttcacccaggccttcctgaccggcgccatgcagaactacgccagaaagtacaccacccccatcgacctgctgggctacgagttcgaggtgatccccagcgacaccagcgacaccagccccgaggacggcgtgtacatccacggcctgtacctggacggcgccagatgggacagagagagcggcctgctggccgagcagtaccccaagctgctgttcgacctgatgcccatcatctggatcaagcccacccagaagagcagaatcatcaagagcgacgcctacgtgtgccccctgtacaagaccagcgagagaaagggcaccctgagcaccaccggccacagcaccaacttcgtgatcgccatgctgctgaagaccgaccagcccaccagacactggatcaagagaggcgtggccctgctgtgccagctggacgactag

SEQ ID NO: 109888 - DNA, 2355 bp, Artificial Sequence
  derived and/or modified sequence
atgagcgacgccaacaaggccgccatcgccgccgagaaggaggccctgaacctgaagctgccccccatcgtgcacctgcccgagaacatcggcgtggacacccccacccagagcaagctgctgaagtacagaagaagcaaggagcagcagcagaagatcaaccagctggtgatcgacggcgccaagagaaacctggacagaaccctgggcaagagaacccccctgctgcccccccccgactacccccagaccatgaccagcgagatgaagaagaagggcttcaactacatctacatgaagcagtgcgtggagagcagccccctggtgcccatccagcaggagtggctggaccacatgctgagactgatccccgagagcctgaaggagggcaaggagagagaggagctgctggagagcctgatcaacgaggtgagcagcgacttcgagaacagcatgaagagatacctggtgcagagcgtgctggtgaagccccccgtgaagagcctggaggacgagggcggccccctgcccgagagccccgtgggcctggactacagcaacccctggcacagcagctacgtgcaggccagaaaccagatcttcagcaacctgcacatcatccaccccaccatgaagatgctgctggacctgggctacaccaccttcgccgacaccgtgctgctggacttcaccggcatcagagccaagggccccatcgactgcgagagcctgaagaccgacctgagcatccagaccagaaacgccgaggagaagatcatgaacacctggtaccccaaggtgatcaacctgttcaccaagaaggaggccctggagggcgtgaagcccgagaagctggacgccttctacagctgcgtgagcaccctgatgagcaaccagctgaaggacctgctgagaagaaccgtggagggcttcgtgaagctgttcgaccccaaggaccagcagagactgcccatcttcaagatcgagctgaccttcgacgacgacaagatggagttctaccccaccttccaggacctggaggacaacgtgctgagcctggtggagagaatcgccgaggccctgcagaacgtgcagaccatccccagctggctgagcggcaccagcacccccgtgaacctggacaccgagctgcccgagcacgtgctgcactgggccgtggacaccctgaaggccgccgtgcacagaaacctggagggcgccagaaagcactacgagacctacgtggagaagtacaactggctgctggacggcaccgccgtggagaacatcgagaccttccagaccgaggaccacaccttcgacgagtacaccgagttcatcgagaagttcctgagcctggccagcgagatcatgctgctgccccagtggatccactacaccatggtgagactggactgcgaggacctgaagaccggcctgaccaacaaggccaaggccttcgccaacatcctgctgaacgacatcgccagcaagtacagaaaggagaacgagtgcatctgcagcgagttcgaggccatcaaggagcacgccctgaaggtgcccgagaccaccgaggagatgatggacctgatcagctacgtggagaaggccagaaccgtgggcatcgaggagctgatcctgagaatccaggagagcaagagacagatgagctacttcctggacgtgttcctgttcccccaggaggacctggccctgaacgccaccgtgctgatgtggcccagaaagatcaaccccatcttcgacgagaacgacgagctgatcgagaacgccaagcacaagaaggagaacgagctgatggccaagagagagaagctgatcctggagatcgagaaggagagcagaagaatggaggagttcaccgagttcgccgagctggagagaatgcagcagtacgtgaccgacgtgagacagctgcagaagagaatccaggagagcgaggaggccgtgcagttcatcaacaaggaggaggagctgttcaagtgggagctgaccaagtaccccgagctggacaagctgaaggtgaacatcgagccctaccagaagttcttcaacttcgtgctgaagtggcagagaagcgagaagagatggatggacggcggcttcctggacctgaacggcgagagcatggaggccgacgtggaggagttcagcagagagatcttcaagaccctgaagttcttccagaccaagctgaagaaggagctgcaggagaagagaaaggccgccagaaagagaagcctggaggaggagaagatcgaggaggagcccaaggacaacgccaccatcaccatgtgcagcaccgtgatggagcagatcaaggccttcaaggtgtag

SEQ ID NO: 109889 - DNA, 2255 bp, Artificial Sequence
  derived and/or modified sequence
tttaactttagtaacaaatccaagattttggaaaagcgcctacgatatttaaatgaccacttcacatacaacttatattgtaatatatgccgatcactatttgagaaggacaagctgttattttcctttttattatgtgccaatcttcttctggcaaggaaagagattgaataccaggaactgatgtttcttttaactggaggagtaagtcttaaaagtgctgagaaaaatcctgatccaacttggctacaggacaaaagctgggaggaaatctgtcgggcaagtgaatttcctgccttcagaggactcaggcaacatttttgtgaacatatatatgaatggcgagaaatctatgacagtaaagagccacataatgctaaatttccagcaccaatggataagaacctaaatgaactacagaaaataataattcttcggtgtttaagacctgataagataaccccagctataacaaactatgtaactgacaaactagggaaaaagtttgtagagcctccaccatttgatttgacaaagagttacttggattcaaattgcaccattcccttaatttttgttctatctccaggagcagatcctatggccagcctgctgaaatttgcaaatgataaatctatgtctggaaataagtttcaagctatttcactgggacagggacaaggaccgattgcagcaaaaatgattaaagcagcaattgaagaaggaacttgggtgtgcctacagaattgccatcttgcagtgtcctggatgcccatgttggaaaaaatatgtgaagattttacctctgaaacctgtaactcatcctttaggctttggctgacaagctatccatcttcaaaattcccagtaacaattctacagaatggagtaaaaatgactaatgaacctcccacgggtcttcggctgaatctccttcaatcatatctcactgatccagtttctgatcctgagtttttcaagggatgccgtggaaaggaactgttatttatcaatgaatatgatacaattccatttgaagctatatcttacctgactggggagtgtaattatggaggaagagtgacagacgattgggacagacgtcttctattaaccatgctggctgacttttataatctgtacatagttgaaaaccctcattataagttttctcccagtggaaactattttgcacctcctaaaggcacttatgaggactacattgaattcattaagaaacttccatttactcaacaccctgagatatttggattacatgaaaacgttgacatctccaaggatcttcaacaaacaaaaaccctctttgagtccttgctcctcacccagggaggctccaaacagacaggagcctcaggaagtactgatcagattctgttagaaattaccaaagatatcctcaacaagctccctagtgatttcgacattgaaatggcactacggaagtatcctgtgagatatgaagaaagcatgaatactgtgttagtacaagaaatggaaagatttaacaatttaattataactatacgtaacactctacgggaccttgaaaaagctattaagggtgtggttgtgatggattctgcattggaggcactctccggtagcttacttgttggaaaggttccagaaatatgggccaaacgttcatacccaagccttaagcccctgggaagttacatcacagatttcctagcccggttgaactttttacaggactggtataattcaggaaaaccttgtgtgttttggctgtcaggtttctttttcactcaggcctttttaactggagctatgcagaattatgccagaaaatataccacccctattgatttgctaggatatgaatttgaggttatcccatctgatacatctgacacatcaccagaagatggtgtttatatccacggactgtatctcgatggcgcacgctgggaccgagaaagtggattgcttgctgaacaatatcccaaacttctgtttgacctgatgcccatcatatggataaaaccaactcaaaaatctcggattataaagtcggatgcctatgtctgtcccctctacaagacaagtgaacgtaaaggaactctttccactacgggacattctactaactttgtcattgcaatgttgttaaaaacagaccaacctactcggcactggatcaagcgcggggttgctttgctttgtcagttggatgactaaattggacaaatttataaaacatccaaaagttt

SEQ ID NO: 109890 - DNA, 2613 bp, Artificial Sequence
  derived and/or modified sequence
gcccttctccagctactcgtttgagagccggtggcgttccggaggtttctccctcgttatccccctgcctttcacctgaggagaggctctgactgtctctctctctctctggcgtctgcgcagcggggaagtagtgagaaacaatcagagtacagagtattttaatctttaggggatcaagatgtcagatgcaaacaaagctgccattgcagcagaaaaggaagctctgaacttgaagttaccccccattgtccatctcccagaaaacataggcgttgatacaccaacacaaagtaagctgctaaaatacagaagatccaaggagcagcagcagaaaattaatcagttagtaattgatggagccaaaagaaatttagacagaacactgggtaaaagaacacctctattaccaccacctgattatcctcaaactatgaccagtgaaatgaaaaaaaaaggattcaactatatttatatgaagcaatgtgtagaaagtagtcctttagtacctattcagcaggaatggctggatcacatgttaaggctgatacctgagtctttaaaggaagggaaagaaagagaagaacttcttgaaagtctcataaatgaggtgtcaagtgactttgaaaacagcatgaagagatatttggtgcagagcgttcttgtgaaaccaccagttaaatcgcttgaagatgaaggaggtcctttacctgaatctcctgtaggcctagattattctaatccttggcattctagctatgtgcaggcaagaaatcaaatattctctaatttgcacattattcatccaactatgaaaatgttactggaccttggttatacaacatttgctgatacagttttgttggacttcacaggaattagagctaaaggtccaattgactgtgaatcactgaaaactgatctatcaatacaaactagaaacgcagaagagaagataatgaatacatggtatccaaaggttataaatctctttaccaagaaggaggcactagaaggtgttaaacctgaaaaattggatgcattttatagctgtgtttccacacttatgtcaaatcagctaaaggatctattaaggagaactgtagaaggatttgtaaaactctttgacccaaaagatcaacaaaggctgccaatatttaagatagaattgacatttgatgacgacaaaatggaattttatcctacctttcaagatttggaagataatgtcttgagtttggtggaacgaatagccgaagctctgcagaatgtccaaacaatcccctcttggctatcaggaacttcaacaccagtaaatcttgacacagaacttcctgaacacgtgttacactgggctgttgatacactgaaggcagcagtacatcggaacttagaaggtgcaagaaagcattatgagacatatgttgaaaaatataattggctccttgatgggactgcagttgagaatatagagacttttcagacagaagatcatacttttgatgaatatacagagtttatagaaaaatttctcagtcttgcctcagaaataatgcttttgcctcagtggattcattacactatggtgcgtttggattgtgaagatttgaagacaggcctgacaaataaagcaaaagcctttgcaaacatattattaaatgacatagcttcaaaatatagaaaagaaaatgaatgtatttgcagtgaatttgaagcaattaaagaacatgcattaaaagtccctgaaacaacagaagagatgatggatctgatatcttatgtagaaaaagcccggactgtaggaatcgaagagttgattttaaggatccaggaatctaaacgccaaatgagttactttttagatgttttcctatttcctcaagaagacttagctttaaatgcaactgtcctcatgtggcctaggaaaattaatcccatctttgatgaaaatgatgagctaattgagaatgctaaacataaaaaagaaaatgaactaatggccaagagagagaaacttattttggaaatagaaaaagaatcacgccgcatggaggagtttacagaatttgcagagctggagcgcatgcaacagtatgtgacagatgtaagacaactacaaaaacgtattcaggaatctgaagaagcagtgcagtttattaataaagaagaggaacttttcaagtgggaattgacaaaatatcctgaactggataaattaaaagttaacattgagccctatcagaagttttttaattttgttttgaagtggcagcgatcagaaaaacggtggatggatggagggtttttggacctcaatggggaaagcatggaggctgatgtggaagagttttcccgagaaatttttaagacactaaaatttttccaaacgaagctaaagaaagaattacaagaaaaaagaaaggcagcaagaaaacggtctttggaagaagagaaaattgaagaagaaccaaaagacaatgctactattactatgtgcagtacagtcatggaacagataaaagcttttaaggtataaatatatataataacattttaatattatagctatcttctcaacttttctgttacctaatatataaattataaagccta

SEQ ID NO: 109891 - DNA, 1791 bp, Artificial Sequence
  derived and/or modified sequence
atgacgagcccttcccccaggatacagatcatatctaccgatagtgctgtagcttcgccccaacggatccagattgtcacggatcagcagactggccagaaaattcagattgtgactgcagtggacgctagcgggagccctaaacaacaatttatcctcaccagcccagatggcgctggtaccggcaaggtgatcctggcaagccccgagacctcgtccgctaagcaactgatattcactacttcagacaatctggtgcccggccggatccaaatcgtgaccgattctgcctcagtagaacggctgctgggaaaaactgacgtgcagcggccccaggttgttgaatactgtgttgtgtgcggggacaaggcttccggcaggcattatggagccgtgagttgcgagggctgtaagggctttttcaagcgctccgtgcggaagaacctaacgtactcctgtcgatctaaccaggactgcataattaataagcatcacaggaaccggtgtcagttctgcaggcttaaaaagtgcctggagatgggaatgaagatggaatctgtgcagtccgagcgcaagcccttcgacgtgcagcgcgaaaagcccagtaactgtgctgcttctaccgaaaagatatatatcaggaaggatctcaggagtcccctgatcgccactcccaccttcgtagctgacaaagatggagccaggcaaaccgggcttcttgatccaggcatgctggtgaatattcaacagcctctgattagagaggatggaaccgtcttactggcaaccgactccaaggcagagacgagtcaaggagccttgggaacactcgctaatgtggttacctcgctggctaatctttcagagagtctaaacaacggggatactagtgagatccagcccgaggaccaaagtgcctcagagattacccgtgcctttgacactttggccaaagccctaaacactacggacagcagttcttccccctctttggccgatgggatagatacttcaggaggtggcagcattcatgttatttcccgcgatcagtcaacaccgatcatcgaggtggagggtcccctgctgtccgacacacatgttacctttaaattgacgatgcctagccccatgcctgagtatttaaacgtgcactacatctgcgagtctgctagtcggctgctgttcctcagcatgcattgggctcggtctattcccgctttccaggcccttggccaggactgcaacacaagtctggtccgcgcttgctggaacgagctattcacattaggcttggctcagtgcgctcaggttatgagtctgagcacaatcttagccgctatcgtgaaccacttacaaaactcaattcaggaggacaagctgagtggggatcggattaagcaggtgatggaacatatctggaaattacaggaattctgcaactccatggctaagctggatatcgacggatacgagtatgcttacctaaaggctatcgtgctcttttcacccgatcacccagggctgacgtcaaccagccagatcgagaaattccaggagaaggcgcagatggaacttcaagactacgtacagaagacttattctgaggacacctacagattggctcgcatactggttcgtttgcctgccctacggttgatgagcagcaacatcacagaagaattattctttacggggctgattgggaacgtgagcatcgattccatcataccatatattctaaagatggaaacagctgagtataacgggcagatcacaggcgcctcgctctag

SEQ ID NO: 109892 - DNA, 1791 bp, Artificial Sequence
  derived and/or modified sequence
atgacgagtccctctcctcgaattcagattatctctaccgacagcgccgtcgcctctcctcagaggatccagattgtgacagatcagcagaccggtcagaaaattcagattgtgacagccgttgatgcgtcaggctcgcctaagcaacagttcattctgacaagcccagatggggctgggacgggaaaagtcatcctggctagcccagagacttcctcagcaaagcagcttatttttaccacttctgataacctggtgcccgggcgaatacaaattgtgaccgatagcgcttccgtagagcgcttgttagggaaaaccgacgtacagagacctcaagtcgttgagtactgtgtggtctgcggggacaaggccagtggccgccactacggagccgtgagctgtgaggggtgtaaggggttctttaagcgttcagtgcgcaagaatctgacatactcctgccggtcgaatcaagattgtattattaataagcatcaccggaaccgttgccagttctgccgacttaaaaagtgcttggaaatgggcatgaaaatggaatctgtgcagtccgaaagaaaaccattcgacgtgcaacgcgaaaaaccgagtaattgcgcggcaagcacagagaagatatatatacggaaagacctgcgtagcccactgatcgccactcctacattcgtcgctgataaagacggtgccagacagaccggcttgctcgatccggggatgcttgtcaatatccagcagcccctgatccgcgaagatggaactgtgctgctggctaccgacagcaaggccgagacgagccaaggggcccttggcaccttagccaatgtagtcaccagcctggctaacctgtctgaaagccttaataacggggatacctccgagattcagcctgaggatcaatctgcatccgagatcactagagccttcgatactctcgcgaaagcgctcaacaccacagattcaagctcatctccttccctcgctgacggcattgacacctctggtggcggtagtattcatgtgataagtcgggaccagagcaccccaatcattgaggtagagggacccctactgtccgatacacatgttacctttaaactgacaatgcctagccccatgcccgagtatctgaacgtgcattatatctgcgaatctgcctctagactgctgttcctctctatgcattgggctcgatctataccagcatttcaggctctcggccaggattgcaatacttccctagtgcgggcctgctggaatgaactcttcacccttggactggctcagtgcgctcaggtgatgtccctctccacaatcttggccgccattgtgaaccatctccaaaacagtatacaggaggataaactgtctggagatcgcataaagcaggtgatggaacatatctggaagctgcaggagttttgtaacagcatggcaaagctggatattgatggttacgaatacgcctatcttaaagccatcgtgctgttctcccccgaccatcctggcttaaccagcacctcccagattgaaaagtttcaagagaaagctcaaatggagcttcaggactacgtgcagaagacgtattccgaggatacctacagacttgccagaatcctcgttcgactcccggcacttcgattgatgagttcgaacataacagaagaactgttctttactggtctgattggaaatgtttcaattgatagcataatcccgtacattctcaaaatggagacagcagagtacaatggacagataactggggcatctctttag

SEQ ID NO: 109893 - DNA, 1791 bp, Artificial Sequence
  derived and/or modified sequence
atgacctctccctcccctagaatccagataatcagcacggacagtgcggtagcatcacctcaaagaattcaaatcgtgaccgaccagcagaccgggcaaaagatccaaatcgtgaccgctgtggacgccagtgggagtccgaaacagcaatttattctgaccagtcccgatggggccggaactggtaaggtgattcttgcttccccagagaccagctccgccaagcagttaatatttacaacgtccgacaacctggtgccaggcagaatccagattgtgactgactcagcctctgtcgagaggctcctcggcaagactgatgtgcaacgcccccaggttgtcgagtattgtgtggtctgtggcgataaagcgtccggtaggcactatggcgccgtgagttgtgaaggctgcaagggctttttcaaacggtccgtccgcaagaatttaacatacagctgtcgctctaatcaagactgcattatcaataagcaccacaggaaccgctgccagttttgccgcttaaaaaagtgtctggagatgggcatgaaaatggaaagcgtacagtcggagcgcaaaccgttcgatgtgcagagagaaaagcctagcaattgtgctgcctcaacggaaaaaatatatatcagaaaggaccttaggagtccccttatcgcaactccaaccttcgtggccgacaaggacggggcccgtcagaccggcctgttggaccctggaatgctggttaatattcagcaacccctgatccgggaagatggtactgtgctcctcgccacggatagcaaggccgaaactagccagggcgcacttgggactctggcgaatgtggttacctcgttggcaaacctgagcgagagcctgaataacggagacacgagcgagattcagcctgaggaccagtccgcctctgagatcacacgagcttttgacaccctcgccaaggctctcaatactactgactcaagctctagcccctccctcgccgatggcattgacacttctggcggggggagtatccacgtgatttctagagaccaaagtacaccaatcattgaagtcgagggcccactcctgtccgacacccacgtgacgtttaagctgaccatgccctctccaatgccagaatacctgaatgttcactatatttgcgagtctgcctctaggctcctattcctctctatgcactgggcaagatctattcctgcgtttcaagctttggggcaggactgcaacacttctctggtccgggcttgttggaatgaactttttaccctgggccttgcccagtgtgcccaggtgatgagcctgtcaactatcttggctgccatcgtgaaccacctacagaacagcatccaggaggacaaactgtctggcgacaggatcaagcaagttatggagcacatttggaaacttcaggagttctgcaacagtatggcaaagttggatatcgacggatatgagtacgcttacctgaaggccattgtgctatttagtccagatcatcccggattgacatctacatcgcaaatcgaaaagtttcaagaaaaggcccagatggagctacaggactatgttcaaaaaacatactccgaggacacctacagactggcacggatattggtgcggttacccgccctgagactgatgtcgtccaacatcactgaagaacttttcttcacgggactaataggcaatgtcagcattgacagtattatcccctatatcctcaaaatggaaaccgcggagtacaatggacagattaccggagcgtcactgtag

SEQ ID NO: 109894 - DNA, 1791 bp, Artificial Sequence
  derived and/or modified sequence
atgaccagccccagcccccgcatccagatcatcagcacagattctgctgtggccagcccccagaggatccagatcgtgacagaccagcagacaggccagaagatccagatcgtgacagctgtggatgccagcggcagccccaagcagcagttcatcctgaccagcccagatggagctggcaccgggaaggtgatcctggccagccctgagaccagcagcgccaagcagctgatcttcaccaccagtgacaacctggtgcccggccgcatccagatcgtgacagacagcgcctctgtggagcggctgctgggcaagacagatgtgcagaggccccaggtggtggagtactgtgtggtgtgtggggacaaggccagcggccgccactatggagctgtgtcctgtgagggctgcaagggcttcttcaagaggtctgtgaggaagaacctgacctacagctgccgcagcaaccaggactgcatcatcaacaagcaccacaggaaccgctgccagttctgccgcctgaagaagtgcctggagatgggcatgaagatggagagcgtgcagagcgagaggaagccctttgatgtgcagcgggagaagcccagcaactgtgccgccagcacagagaagatctacatcaggaaggacctgcggagccccctcatcgccacccccacctttgtggccgacaaggatggagcccggcagacaggcctgctggaccccggcatgctggtgaacatccagcagcccctcatcagagaagatggcaccgtgctgctggccacagacagcaaggccgagaccagccagggcgccctgggcaccctggccaacgtggtgaccagcctggccaacctgtctgagagcctgaacaatggagacaccagcgagatccagcctgaggaccagagcgccagcgagatcacccgggcctttgacaccctggccaaggccctgaacaccacagacagcagcagcagccccagcctggctgatggcatcgacaccagcggcggcggcagcatccacgtgatcagccgggaccagagcacccccatcatcgaggtggagggccccctgctgagtgacacccacgtgaccttcaagctgaccatgcccagccccatgcctgagtacctgaatgtgcactacatctgtgagagcgccagccggctgctcttcctgtccatgcactgggcccggagcatcccagccttccaggccctgggccaggactgcaacaccagcctggtgcgggcctgctggaatgagctgttcaccctgggcctggcccagtgtgcccaggtgatgagcctgagcaccatcctggccgccatcgtgaaccacctgcagaacagcatccaggaggacaagctgagcggggaccgcatcaagcaggtgatggagcacatctggaagctgcaggagttctgcaacagcatggccaagctggacattgatggctatgaatatgcctacctgaaggccatcgtgctcttctccccagaccaccctggcctgaccagcaccagccagatcgagaagttccaggagaaggcccagatggagctgcaggactatgtgcagaagacctacagcgaggacacctaccgcctggcccgcatcctggtgcggctgcctgccctgcggctgatgagcagcaacatcacagaggagctgttcttcaccggcctgattggaaatgtgtccattgacagcatcatcccctacatcctgaagatggagacagctgagtacaacggccagatcaccggggccagcctgtag

SEQ ID NO: 109895 - DNA, 1791 bp, Artificial Sequence
  derived and/or modified sequence
atgaccagccccagcccccggatccagatcatcagcaccgacagcgcggtggcatctccccaacgcattcaaatcgtgactgaccaacagactggtcagaagattcagatcgttaccgcggtggacgcctcaggtagcccgaaacagcagtttattttgacttcaccggacggagcgggcacaggaaaggttatacttgcttctccggagactagttcagccaagcagctgatcttcactacatctgacaacctcgtgcccggccgtatccaaattgtaacggatagtgcgtctgtcgagagactgcttggtaagaccgacgtgcaacgcccccaggtagtcgaatactgcgtcgtttgcggcgataaagccagcgggcgccattatggcgccgtgtcatgtgagggctgtaaaggattctttaaacggagcgtgaggaagaacctgacctatagctgccgaagcaaccaggactgcatcatcaacaagcatcaccgtaatcgatgccagttttgtcggctcaagaaatgcctggaaatgggcatgaagatggaatcggttcagtcagaacgcaaaccttttgacgtgcagcgagaaaaaccttcaaactgtgccgcatctaccgaaaagatttacatccgaaaagacttgagatcaccgctgatagcgacccccaccttcgtggcggacaaggacggggccagacaaaccggacttctggaccccggaatgcttgtcaacatccagcagcccttgattagagaggatggtaccgtcttgcttgccacagactccaaggctgaaacaagccagggagccctcggaacattagccaacgtcgttacgtccctggcaaacctttccgaatccctgaacaacggtgatacttctgaaatccaacccgaggatcagtcagcttcggagataacccgcgccttcgatacgctagctaaggcactgaacactaccgattcatcctccagcccgtccctggccgatggcatcgatacgtcaggaggtggatcaatacacgtcatcagccgtgatcaaagtactcctattatcgaagtggagggaccactcctttctgatacccatgtgaccttcaagctgacaatgccatcgcctatgcccgaatatttaaatgtgcattacatttgcgagtccgcttcaagattgctctttctgtctatgcactgggctcgcagcatccccgcctttcaggcgcttggtcaggactgtaacacatctttagtccgggcttgctggaatgagctgttcactctgggactggcccaatgtgcacaggtgatgtcactctcaaccattctggccgctattgtcaaccacctccagaatagcatccaggaggacaagctgtctggcgatcggattaaacaggtgatggagcacatttggaaacttcaggaattctgtaacagcatggctaagctcgacatagacgggtatgaatacgcttacctgaaggcgatcgttctctttagtcccgaccacccaggcttgactagtacgtcgcaaatcgagaagttccaggaaaaggcccagatggaactccaggattacgtgcagaaaacttacagcgaggacacatacagactggcaaggattctcgtacgcctgcctgcactccgattgatgagttccaacatcacagaggagctcttcttcactggtctgattggaaatgtgtctatcgattctatcattccatacattctcaaaatggagacagctgagtacaatggccagattacaggggcctccctgtag

SEQ ID NO: 109896 - DNA, 1791 bp, Artificial Sequence
  derived and/or modified sequence
atgaccagccccagcccccggatccagatcatcagcaccgacagcgctgtggccagcccacaaagaatccagatcgtgactgaccaacagaccgggcaaaagatccagattgtcacagctgtcgacgcctcgggtagtcctaagcaacagttcattctgactagccctgacggcgcagggacagggaaggtgatactggcttccccggagacatcttcggccaagcagctgatcttcaccacctcggataatctcgtcccaggaagaatccagatcgttaccgattctgcaagcgtggagaggttgcttggaaaaactgacgtgcagagaccacaggtagttgagtattgtgtggtgtgcggtgacaaggcctccgggagacattatggggcggtctcctgtgaaggctgtaaggggttctttaaacgatctgtgcggaagaatctgacatatagctgtcggtctaaccaggactgcatcatcaacaaacaccacaggaacaggtgtcagttctgtagactcaaaaagtgtctggaaatgggaatgaaaatggagtcggtgcaatctgaaagaaagccattcgatgttcagagggagaaaccgagcaattgtgccgccagcaccgagaagatttatatacggaaagatctcaggtcccctctaattgcgacgcccacatttgttgccgataaggacggagcaaggcaaacaggactactggatcctggcatgttggtgaatatccaacagccattgatacgagaggacggaaccgttctgctggctacagacagcaaagccgaaacctcacagggcgcactagggacactggcaaatgtggtgacaagcctggccaatctaagtgagtcactgaataatggggacacctctgaaatccagccagaggatcagtctgcctccgagattactcgggccttcgacaccctagcaaaggcacttaatactactgactcatccagctcaccgtcactggctgatggcattgacacaagtggtggaggctctatccacgtgatcagtagggaccagtctaccccaattatcgaggttgagggacctctgctttcagatacacatgtgaccttcaaactcacaatgccctcccccatgcccgaatatctcaacgtacactatatctgcgagtccgcatcaagacttcttttcctgtcaatgcactgggcccgcagcatccctgcattccaggctcttggccaggactgcaatacaagtctggttcgcgcctgctggaatgagctgttcactctgggcctggcccagtgcgcgcaagtaatgtccctatctaccatcctggctgcgatcgttaaccatttgcagaattccatccaggaggacaagctgagcggcgaccgcatcaaacaagtaatggagcatatttggaaactgcaggagttctgcaatagcatggcaaagctggatattgacggttacgagtatgcctacctcaaagctattgtccttttttctcccgaccatcccggcctaacatcaactagtcagattgagaagtttcaggagaaggcacaaatggagctccaggactatgtacagaagacttattccgaggacacctacagactggcacgtattcttgtcaggttgcccgcacttaggttgatgagctctaatatcaccgaagagctgttttttaccgggctgattgggaacgtctcaatcgattccattattccctacatcctgaagatggagaccgcagagtacaatggccaaatcactggcgcatctctttag

SEQ ID NO: 109897 - DNA, 1791 bp, Artificial Sequence
  derived and/or modified sequence
atgaccagccccagcccccggatccagatcatcagcaccgacagcgcggttgcctctccgcagcgcatccagattgtcacagatcaacagacaggtcaaaagatccaaatcgtgacggcagttgacgcctcggggtccccgaaacagcagttcattctgacaagccctgacggtgccggcactggaaaagtgatcctcgcgtctcccgagaccagctctgccaagcagctcatcttcaccacctccgataacctggtgccaggacggatacagattgttaccgatagcgccagcgtggagcgacttctaggtaagaccgatgtgcagcgcccgcaggtggtggagtactgtgtggtatgcggtgataaggcatccggtaggcattacggcgccgtttcctgcgagggctgtaaggggtttttcaaaagaagtgtgcgaaagaatctcacctattcctgtagatctaaccaagattgcataatcaataagcaccatcgcaaccgatgtcagttctgtagacttaagaagtgcctggagatgggaatgaaaatggaatctgtccagagcgaacggaagccattcgatgtccagcgggaaaaacccagtaactgcgctgcaagcacagaaaagatttatattcggaaggatcttagaagccccctgatcgccactccgactttcgtggccgacaaggatggagcccggcaaacagggcttctggacccgggcatgctggtgaacatccagcagcccctgattcgcgaggacggtaccgtccttctcgccacagatagtaaagcagagacttcccagggcgctttaggtacacttgcaaacgtcgttacaagcctggccaacctttctgagtccttaaataatggcgacacgtctgagatccaacccgaggaccagtctgcctcagaaattacgagagccttcgacacacttgcaaaagctctcaacacaaccgattcttcgtcttctcccagccttgccgatggtattgatacttctgggggaggtagcatccatgttatcagcagggaccagtcaactcccatcattgaggttgagggcccactgcttagcgacactcacgttacatttaagttgaccatgcccagcccgatgccagaatacctcaatgtgcattatatttgtgaatccgcgtcccgactgctgttcctttctatgcactgggcgcggtcaatccctgcgtttcaggctttgggacaggactgcaacacttctttggtacgcgcctgctggaatgaactgtttacactgggactggcgcagtgtgcccaagtgatgtcgttatcaactatcctcgcagccatcgtgaaccatcttcagaacagcatccaggaggataaattgtccggagatcggatcaagcaggtcatggagcatatttggaagctgcaggagttctgtaattctatggctaagttggacatcgatggatatgaatacgcttacttaaaggctattgttctgtttagtccagaccatccaggactgacgtctacaagtcaaattgaaaagttccaagaaaaagcgcagatggagctccaggattatgtgcagaaaacttatagcgaggacacatatcgcctggcacgcattttggtgagactacctgctcttcggctaatgtcatccaacatcaccgaggaactgtttttcacagggctgattggaaatgtgtccatcgattcgatcataccatacattttgaagatggagacagctgagtataacgggcagattaccggcgcatccctctag

SEQ ID NO: 109898 - DNA, 1791 bp, Artificial Sequence
  derived and/or modified sequence
atgaccagcccctccccacgcatccagataatctccaccgactctgctgtagcctcacctcagcgcattcagattgtcacagaccagcagacaggacagaaaatccagatagtcaccgcagtggacgcctccggatcccccaaacagcagttcatcctgaccagcccagatggagctggaactgggaaggtgatcctggcttccccagagacatccagcgccaagcaactcatattcaccacctcagacaacctcgtccctggcaggatccagattgtcacggattctgcctctgtggagcgtttactggggaagacggacgtccagcggccccaggtggtagagtactgtgtggtctgtggcgacaaagcctccggccgtcactatggggctgtcagttgtgaaggttgcaaaggtttcttcaaaaggagtgtgaggaaaaatttgacctacagctgccggagcaaccaagactgcatcatcaataaacatcaccggaaccgctgtcagttttgccggctgaaaaaatgcttagagatgggcatgaaaatggaatctgtgcagagtgaacggaagcccttcgatgtgcaacgggagaaaccaagcaattgtgctgcttcaactgagaaaatctatatccggaaagacctgagaagtcccctgatagctactcccacgtttgtggcagacaaagatggagcaagacaaacaggtcttcttgatccagggatgcttgtgaacatccagcagcctttgatacgtgaggatggtacagttctcctggccacggattctaaggctgaaacaagccagggagctctgggcacactggcaaatgtagtgacctcccttgccaacctaagtgaatctttgaacaacggtgacacttcagaaatccagccagaggaccagtctgcaagtgagataactcgggcatttgataccttagctaaagcacttaataccacagacagctcctcttctccaagcttggcagatgggatagacaccagtggaggagggagcatccacgtcatcagcagagaccagtcgacacccatcattgaggttgaaggccccctcctttcagacacacacgtcacatttaagctaacaatgcccagtccaatgccagagtacctcaacgtgcactacatctgtgagtctgcatcccgtctgcttttcctctcaatgcactgggctcggtcaatcccagcctttcaggcacttgggcaggactgcaacaccagccttgtgcgggcctgctggaatgagctcttcaccctcggcctggcccagtgtgcccaggtcatgagtctctccaccatcctggctgccattgtcaaccacctgcagaacagcatccaggaagataaactttctggtgaccggataaagcaagtcatggagcacatctggaagctgcaggagttctgtaacagcatggcgaagctggatatagatggctatgagtatgcataccttaaagctatagttctctttagccccgatcatccaggtttgaccagcacaagccagattgaaaaattccaagaaaaggcacagatggagttgcaggactatgttcagaaaacctactcagaagacacctaccgattggcccggatcctcgttcgcctgccggcactcaggctgatgagctccaacataacagaagaacttttttttactggtctcattggcaatgtttcgatagacagcataatcccctacatcctcaagatggagacagcagagtataatggccagatcaccggagccagtctatag

SEQ ID NO: 109899 - DNA, 1791 bp, Artificial Sequence
  derived and/or modified sequence
atgacctccccctcacccagaatccagatcattagcaccgattctgccgtggcctccccacagcggatccagattgtcaccgaccagcagacagggcagaagattcagatcgtaacagccgttgacgctagcgggagtcccaaacagcagtttatccttacctcgccagatggagccggtacaggaaaggtcatcctggcaagtcctgaaacttcgtccgccaagcagctgatctttactacgtccgataacttagtgcctggtcgcattcagatcgttactgattcagctagcgtggaacggctgctaggcaagaccgacgtgcagagaccgcaggtggtcgaatattgtgtggtgtgcggagacaaagcgagtggccgacactatggggctgtttcttgcgaggggtgtaagggcttttttaaacgcagcgtacgcaagaacctcacatacagttgcaggagcaatcaagactgcattataaacaagcaccatagaaacaggtgccagttctgcaggctcaaaaaatgtctagagatggggatgaaaatggaatcagtgcagtccgaacgcaagcccttcgacgtccagcgcgagaagccttctaactgcgctgcgtcaacggagaaaatatatatccgaaaagaccttcgctctcctttaatcgccacccccacttttgtcgcagacaaggatggggctaggcagaccggtctgctagaccccggaatgctggttaacatacaacaaccactaattagagaagatgggactgtcctgctggcaaccgactccaaggctgagacgtctcagggtgctctaggaacgctcgccaatgtagttacctctcttgccaacctgtctgagagcctcaataacggtgacacatccgaaatccagcccgaggaccagagtgctagcgaaatcacaagggccttcgataccctagccaaggccctcaataccactgacagctcttcatccccttcactagctgacggcatcgatacttccggagggggaagtatccatgtgatatcacgcgatcaatctacacctataatcgaggtggaggggccattgcttagcgacacacacgtgactttcaaactgacaatgccatccccaatgcctgaatacctgaatgtacactacatatgtgagtctgcctcaaggcttctgttcctttcaatgcactgggccaggtccattccggcttttcaggccctgggacaggattgcaacactagtcttgtgcgcgcttgttggaacgagctgttcaccctcggccttgcccaatgcgcacaggtgatgtccctcagcacaatccttgccgcaattgtgaatcatttgcagaattctatccaggaagacaagctctccggcgacagaatcaaacaggttatggaacatatatggaagctccaggaattttgtaattcgatggcaaagctggatatcgacggctatgaatacgcctatctgaaggcaatcgtgctgtttagcccggatcaccccggtctaacatcaactagtcagatcgagaagttccaggagaaagcacagatggagctgcaggattacgtgcaaaaaacctatagtgaggatacctaccggttagccagaatactggttcggctcccggcacttaggctcatgagttcaaatatcactgaggaactgttttttacagggctcattggtaacgtgtctatcgattctataatcccgtacatactgaaaatggagaccgccgagtacaatggccaaatcaccggcgctagcctgtag

SEQ ID NO: 109900 - DNA, 1791 bp, Artificial Sequence
  derived and/or modified sequence
atgactagtcccagcccacgcattcagatcatttccacagattccgcagtggccagcccccagcggattcagattgtcacagatcagcagactggtcagaagatacaaatcgtgacagctgtggacgcctccggcagccccaaacagcagtttattcttacatcccccgacggcgctggaacggggaaggtgattttggcatctccggagacctcatccgccaaacaacttatctttactacctccgataacttagtgcccggacggattcagatcgtcactgactctgcgagcgtggagaggctgctcgggaaaacagacgttcagaggccacaagtggtagagtattgcgtggtgtgcggagacaaagcttccggacgtcactacggtgcagtgagttgtgagggttgcaaaggcttctttaagcggagcgtcaggaagaacctgacttacagttgcaggagtaaccaggattgcattatcaacaagcaccaccgaaaccggtgccagttttgtagactgaagaaatgtctggaaatgggcatgaaaatggagtcagtgcagtccgaacggaaacctttcgacgtgcagagagaaaagccgtctaactgcgctgcaagtacagagaagatctatatcagaaaagacctccggtccccacttattgccacgcctacatttgttgccgataaggacggcgctcggcaaactggtttactggatccaggcatgcttgtcaatattcaacagccccttattagggaagacggaaccgtcctgcttgccacagattccaaagcggaaacaagccagggcgctctgggcaccctggccaatgtcgtgacttctctagcgaacctctctgaatcactgaacaatggcgatacaagtgaaattcagcctgaggaccagagtgcaagtgaaatcacaagagcttttgacaccttagctaaagccctcaacacgaccgattcttcaagtagcccctccctggccgacgggattgatacatctgggggtgggtcaatccatgtgataagcagggaccagtcaacgcccataattgaagtagaggggcctctgctaagcgacacacacgtgactttcaagttaacgatgccctccccaatgcccgagtatcttaatgtgcactatatctgcgagtctgctagtcggttactgtttctttctatgcactgggcacgaagcatcccagcatttcaagccctcggacaggattgtaatactagcctcgtgcgggcttgttggaatgagctgttcaccctgggacttgcgcagtgcgctcaggtcatgtcgctaagtacaatcttagccgctatcgtcaatcatctgcaaaactcaattcaggaagacaaattgtcaggcgaccgtattaagcaggtgatggagcacatttggaaactgcaggagttctgcaactctatggcaaaactcgacatcgacggttacgagtacgcatacctgaaggcaatcgtcctttttagtccggaccatcccggtttaacttctactagtcagattgagaagttccaggaaaaggcccagatggagctgcaggactatgtacaaaaaacttacagcgaggatacctacaggctggcgagaattcttgtgcggcttccagcccttaggctaatgagctctaatattaccgaggagcttttctttactggattgataggcaatgtgagtatagactccatcatcccatacattctgaagatggagacagctgagtacaatggtcaaatcacaggcgcatctctgtag

SEQ ID NO: 109901 - DNA, 1791 bp, Artificial Sequence
  derived and/or modified sequence
atgaccagcccttctccccgaattcagataatctcaactgattcagccgtcgcgtctccccagaggattcagatagtgactgaccaacagacaggacagaaaattcaaattgtgaccgcagttgacgcatctggaagtccaaaacagcaattcatcttaacaagccctgatggggctggcacaggcaaagtcattctcgccagtcctgaaactagttcagctaagcaacttatctttaccacctccgataacctcgttccgggaaggatacagatcgtcaccgatagcgcctctgtagaacggctgctcggcaagaccgacgtacagagaccgcaagtggttgaatactgtgttgtgtgcggagataaggcgtctggccgtcactatggtgctgtcagttgcgaggggtgtaagggtttctttaagagaagcgtgaggaaaaacctgacatacagctgccgctcgaatcaggactgcattattaataagcaccacaggaacagatgccagttctgcaggctgaagaaatgcctggaaatgggcatgaaaatggagtccgtgcagagcgagaggaagccgtttgacgtgcaaagagagaaacccagcaattgcgctgcctctaccgaaaagatttacatccgcaaggacctccgatccccgctgatcgctacaccaacatttgtggctgataaggacggcgctcgccagaccggcctgcttgacccaggcatgctggtgaatattcaacaacccctgataagggaggacggcacggtgctgcttgcaacggattccaaggccgaaacatctcagggcgcactgggaacactcgctaacgtggtgacgagtctcgcgaacctgtctgagagcctgaacaatggcgacaccagcgaaatccagccagaagaccagagtgcttcagaaatcaccagggcctttgacacactggctaaagccctgaatacgaccgactcaagttccagtccctccctagcagatgggatagatacatctgggggaggatcaatccacgttatctctcgagaccagtcaacaccaattatagaagtcgagggtccactactcagtgacactcacgttactttcaagctcactatgccctcccctatgcctgagtacttaaacgtgcactacatttgcgagagtgcttcaagactcctgttcctgagcatgcactgggctcggagcattcccgcattccaggcactgggccaagactgcaacacctccctcgtacgcgcttgctggaatgaactctttacgttaggattggcccagtgcgctcaggtgatgagtctgagcacaattttggcggctattgtgaatcacctccaaaattctatccaggaggataaattatccggggaccgaattaagcaggtgatggaacacatctggaaattgcaggaattctgtaatagcatggctaagctggatatagacgggtatgagtatgcgtacctgaaggccatcgtactgttttcccctgaccacccgggtctgacatcaacttcccaaatcgaaaaatttcaagagaaggctcagatggaattgcaggactatgttcaaaagacatacagcgaggacacctaccgactcgctcgcatcctggtgcgcttacctgccttgagactgatgagctccaacattacagaggaactgttcttcacaggactgattggaaacgttagcattgattcaatcatcccctacatcctgaaaatggaaacagccgagtataatggacagattaccggggcatcattgtag

SEQ ID NO: 109902 - DNA, 1791 bp, Artificial Sequence
  derived and/or modified sequence
atgaccagccccagccccagaatccagatcatcagcaccgacagcgccgtggccagcccccagagaatccagatcgtgaccgaccagcagaccggccagaagatccagatcgtgaccgccgtggacgccagcggcagccccaagcagcagttcatcctgaccagccccgacggcgccggcaccggcaaggtgatcctggccagccccgagaccagcagcgccaagcagctgatcttcaccaccagcgacaacctggtgcccggcagaatccagatcgtgaccgacagcgccagcgtggagagactgctgggcaagaccgacgtgcagagaccccaggtggtggagtactgcgtggtgtgcggcgacaaggccagcggcagacactacggcgccgtgagctgcgagggctgcaagggcttcttcaagagaagcgtgagaaagaacctgacctacagctgcagaagcaaccaggactgcatcatcaacaagcaccacagaaacagatgccagttctgcagactgaagaagtgcctggagatgggcatgaagatggagagcgtgcagagcgagagaaagcccttcgacgtgcagagagagaagcccagcaactgcgccgccagcaccgagaagatctacatcagaaaggacctgagaagccccctgatcgccacccccaccttcgtggccgacaaggacggcgccagacagaccggcctgctggaccccggcatgctggtgaacatccagcagcccctgatcagagaggacggcaccgtgctgctggccaccgacagcaaggccgagaccagccagggcgccctgggcaccctggccaacgtggtgaccagcctggccaacctgagcgagagcctgaacaacggcgacaccagcgagatccagcccgaggaccagagcgccagcgagatcaccagagccttcgacaccctggccaaggccctgaacaccaccgacagcagcagcagccccagcctggccgacggcatcgacaccagcggcggcggcagcatccacgtgatcagcagagaccagagcacccccatcatcgaggtggagggccccctgctgagcgacacccacgtgaccttcaagctgaccatgcccagccccatgcccgagtacctgaacgtgcactacatctgcgagagcgccagcagactgctgttcctgagcatgcactgggccagaagcatccccgccttccaggccctgggccaggactgcaacaccagcctggtgagagcctgctggaacgagctgttcaccctgggcctggcccagtgcgcccaggtgatgagcctgagcaccatcctggccgccatcgtgaaccacctgcagaacagcatccaggaggacaagctgagcggcgacagaatcaagcaggtgatggagcacatctggaagctgcaggagttctgcaacagcatggccaagctggacatcgacggctacgagtacgcctacctgaaggccatcgtgctgttcagccccgaccaccccggcctgaccagcaccagccagatcgagaagttccaggagaaggcccagatggagctgcaggactacgtgcagaagacctacagcgaggacacctacagactggccagaatcctggtgagactgcccgccctgagactgatgagcagcaacatcaccgaggagctgttcttcaccggcctgatcggcaacgtgagcatcgacagcatcatcccctacatcctgaagatggagaccgccgagtacaacggccagatcaccggcgccagcctgtag

SEQ ID NO: 109903 - DNA, 1586 bp, Artificial Sequence
  derived and/or modified sequence
gctgagctgagctggggcgcggccgcctgtctgcacagacagcaccatgtcgctcatggtcgtcagcatggcgtgtgttgggttcttcttgctgcagggggcctggccacatgagggagtccacagaaaaccttccctcctggcccacccaggtcccctggtgaaatcagaagagacagtcatcctgcaatgttggtcagatgtcaggtttgagcacttccttctgcacagagaggggaagtataaggacactttgcacctcattggagagcaccatgatggggtctccaaggccaacttctccatcggtcccatgatgcaagaccttgcagggacctacagatgctacggttctgttactcactccccctatcagttgtcagctcccagtgaccctctggacatcgtcatcacaggtctatatgagaaaccttctctctcagcccagccgggccccacggttttggcaggagagagcgtgaccttgtcctgcagctcccggagctcctatgacatgtaccatctatccagggagggggaggcccatgaacgtaggttctctgcagggcccaaggtcaacggaacattccaggccgactttcctctgggccctgccacccacggaggaacctacagatgcttcggctctttccgtgactctccctatgagtggtcaaactcgagtgacccactgcttgtttctgtcacaggaaacccttcaaatagttggccttcacccactgaaccaagctccaaaaccggtaaccccagacacctgcatgttctgattgggacctcagtggtcaaaatccctttcaccatcctcctcttctttctccttcatcgctggtgctccaacaaaaaaaatgctgctgtaatggaccaagagcctgcagggaacagaacagtgaacagcgaggattctgatgaacaagaccatcaggaggtgtcatacgcataattggatcactgtgttttcacacagagagaaatcactcgcccttctgagaggcccaagacacccccaacagataccagcatgtacatagaacttccaaatgctgagcccagatccaaagttgtcttctgtccacgagcaccacagtcaggccttgaggggatcttctagggagacaacagccctgtctcaaaaccgggttgccagctcccatgtaccagcagctggaatctgaaggcatcagtcttcatcttagggcatcgctcttcctcacaccacgaatctgaacatgcctctctcttgcttacaaatgtctaaggtccccactgcctgctggagagaaaacacactcctttgcttagcccacaattctccatttcacttgacccctgcccacctctccaacctaactagcttacttcctagtctacctgaggctgcaatcacactgaggaactcacaattccaaacatacaagaggctccctcttaacacagcacttagacacgtgctgttccacctcccttcagactatctttcagccttctgccagcagtaaaacttataaattttttaaataatttcaatgtagttttcccgccttcaaataaacatgtctgccctcatg

SEQ ID NO: 109904 - DNA, 1586 bp, Artificial Sequence
  derived and/or modified sequence
gctgaactgagctggggcgcagccgcctgtctgcaccggcagcaccatgtcgctcatggtcgtcagcatggcgtgtgttgggttcttcttgctgcagggggcctggccacatgagggagtccacagaaaaccttccctcctggcccacccaggtcccctggtgaaatcagaagagacagtcatcctgcaatgttggtcagatgtcaggtttgagcacttccttctgcacagagaggggaagtataaggacactttgcacctcattggagagcaccatgatggggtctccaaggccaacttctccatcggtcccatgatgcaagaccttgcagggacctacagatgctacggttctgttactcactccccctatcagttgtcagctcccagtgaccctctggacatcgtcatcacaggtctatatgagaaaccttctctctcagcccagccgggccccacggttttggcaggagagagcgtgaccttgtcctgcagctcccggagctcctatgacatgtaccatctatccagggagggggaggcccatgaacgtaggttctctgcagggcccaaggtcaacggaacattccaggccgactttcctctgggccctgccacccacggaggaacctacagatgcttcggctctttccgtgactctccctatgagtggtcaaactcgagtgacccactgcttgtttctgtcacaggaaacccttcaaatagttggccttcacccactgaaccaagctccaaaaccggtaaccccagacacctgcatgttctgattgggacctcagtggtcaaaatccctttcaccatcctcctcttctttctccttcatcgctggtgctccaacaaaaaaaatgctgctgtaatggaccaagagcctgcagggaacagaacagtgaacagcgaggattctgatgaacaagaccatcaggaggtgtcatacgcataattggatcactgtgttttcacacagagagaaatcactcgcccttctgagaggcccaagacacccccaacagataccagcatgtacatagaacttccaaatgctgagcccagatccaaagttgtcttctgtccacgagcaccacagtcaggccttgaggggatcttctagggagacaacagccctgtctcaaaaccgggttgccagctcccatgtaccagcagctggaatctgaaggcatcagtcttcatcttagggcatcgctcttcctcacaccacgaatctgaacatgcctctctcttgcttacaaatgtctaaggtccccactgcctgctggagagaaaacacactcctttgcttagcccacaattctccatttcacttgacccctgcccacctctccaacctaactagcttacttcctagtctacctgaggctgcaatcacactgaggaactcacaattccaaacatacaagaggctccctcttaacacagcacttagacacgtgctgttccacctcccttcagactatctttcagccttctgccagcagtaaaacttataaattttttaaataatttcaatgtagttttcccgccttcaaataaacatgtctgccctcatg

SEQ ID NO: 109905 - DNA, 1559 bp, Artificial Sequence
  derived and/or modified sequence
tgtctgcacagacagcaccatgtcgctcatggtcgtcagcatggcgtgtgttgggttcttcttgctgcagggggcctggccacatgagggagtccacagaaaaccttccctcctggcccacccaggtcccctggtgaaatcagaagagacagtcatcctgcaatgttggtcagatgtcaggtttgagcacttccttctgcacagagaggggaagtataaggacactttgcacctcattggagagcaccatgatggggtctccaaggccaacttctccatcggtcccatgatgcaagaccttgcagggacctacagatgctacggttctgttactcactccccctatcagttgtcagctcccagtgaccctctggacatcgtcatcacaggtctatatgagaaaccttctctctcagcccagccgggccccacggttttggcaggagagagcgtgaccttgtcctgcagctcccggagctcctatgacatgtaccatctatccagggagggggaggcccatgaacgtaggttctctgcagggcccaaggtcaacggaacattccaggccgactttcctctgggccctgccacccacggaggaacctacagatgcttcggctctttccgtgactctccctatgagtggtcaaactcgagtgacccactgcttgtttctgtcacaggaaacccttcaaatagttggccttcacccactgaaccaagctccaaaaccggtaaccccagacacctgcatgttctgattgggacctcagtggtcaaaatccctttcaccatcctcctcttctttctccttcatcgctggtgctccaacaaaaaaaatgctgctgtaatggaccaagagcctgcagggaacagaacagtgaacagcgaggattctgatgaacaagaccatcaggaggtgtcatacgcataattggatcactgtgttttcacacagagaaaaatcactcgcccttctgagaggcccaagacacccccaacagataccagcatgtacatagaacttccaaatgctgagcccagatccaaagttgtcttctgtccacgagcaccacagtcaggccttgaggggatcttctagggagacaacagccctgtctcaaaaccgggttgccagctcccatgtaccagcagctggaatctgaaggcatcagtcttcatcttagggcatcgctcttcctcacaccacgaatctgaacatgcctctctcttgcttacaaatgtctaaggtccccactgcctgctggagagaaaacacactcctttgcttagcccacaattctccatttcacttgacccctgcccacctctccaacctaactggcttacttcctagtctacctgaggctgcaatcacactgaggaactcacaattccaaacatacaagaggctgcctcttaacacagcacttagacacgtgctgttccacctcccttcagactatctttcagccttctgccagcagtaaaacttataaattttttaaataatttcaatgtagttttcccgccttcaaataaacatgtctgccctcatg

SEQ ID NO: 109906 - DNA, 1586 bp, Artificial Sequence
  derived and/or modified sequence
gctgagctgagctggggcgcggccgcctgtctgcaccggcagcaccatgtcgctcatggtcatcatcatggcgtgtgttgggttcttcttgctgcagggggcctggccacaggagggagtccacagaaaaccttccttcctggccctcccaggtcacctggtgaaatcagaagagacagtcatcctgcaatgttggtcggatgtcatgtttgagcacttccttctgcacagagaggggaagtttaacaacactttgcacctcattggagagcaccatgatggggtttccaaggccaacttctccattggtcccatgatgcctgtccttgcaggaacctacagatgctacggttctgttcctcactccccctatcagttgtcagctcccagtgaccctctggacatggtgatcataggtctatatgagaaaccttctctctcagcccagccgggccccacggttcaggcaggagagaatgtgaccttgtcctgcagctcccggagctcctatgacatgtaccatctatccagggaaggggaggcccatgaacgtaggctccctgcagtgcgcagcatcaacggaacattccaggccgactttcctctgggccctgccacccacggagggacctacagatgcttcggctctttccgtgacgctccctacgagtggtcaaactcgagtgatccactgcttgtttccgtcacaggaaacccttcaaatagttggccttcacccactgaaccaagctccaaaaccggtaaccccagacacctacatgttctgattgggacctcagtggtcaaaatccctttcaccatcctcctcttctttctccttcatcgctggtgctccgacaaaaaaaatgctgctgtaatggaccaagagcctgcagggaacagaacagtgaacagcgaggattctgatgaacaagaccatcaggaggtgtcatacgcataattggatcactgtgttttcacacagagaaaaatcactcgcccttctgagaggcccaagacacccccaacagataccagcatgtacatagaacttccaaatgctgagcccagatccaaagttgtcttctgtccacgagcaccacagtcaggccttgaggggatcttctagggagacaacagccctgtctcaaaaccgggttgccagctcccatgtaccagcagctggaatctgaaggcatcagtcttcatcttagggcatcgctcttcctcacaccacgaatctgaacatgcctctctcttgcttacaaatgtctaaggtccccactgcctgctggagagaaaacacactcctttgcttagcccacaattctccatttcacttgacccctgcccacctctccaacctaactggcttacttcctagtctacctgaggctgcaatcacactgaggaactcacaattccaaacatacaagaggctgcctcttaacacagcacttagacacgtgctgttccacctcccttcagactatctttcagccttctgccagcagtaaaacttataaattttttaaataatttcaatgtagttttcccgccttcaaataaacatgtctgccctcatg

SEQ ID NO: 109907 - DNA, 372 bp, Artificial Sequence
  derived and/or modified sequence
atggtcgacggcagaactcgcactattattaacgacattttcttcaccgagcccacgcctgaaatgtcctcactgcccgtacgttctcatagctcactctcgctcaatctggtgagcttgatggtcatttgtagaggaattattaagttagtgatccacttccgcatgtactgtcccccacggcttaaggctaagcatatagaacccaccctgcggccagttcccctgaaggaactccgcatatcacactggcctaacgaatgtattaggcactctgcatccgtgcctatggctaccggagccaacggcctcgagaccaaggatgagaccaagaggaatgcagaaaagtgcgcgtgcagcgtctttttgtag

SEQ ID NO: 109908 - DNA, 1720 bp, Artificial Sequence
  derived and/or modified sequence
aatgtaaagtttttccagtgaaacaaaacgtaagaatctgagtttgtttttcaaagatcactaaattttagttatgattatatcacattttccaaaatgtgtggcagtttttgccctccttgctctgagtgttggtgcactggacacttttattgctgcagtatatgagcatgcggtgatattaccaaacagaacagaaacacctgtttcaaaagaagaagctttgctcctgatgaacaagaacatagatgttttggagaaagcagttaagctggcagcgaagcagggtgcacatatcattgtgaccccagaagatggaatctatggttggatcttcaccagggagagcatttacccctatctagaggatataccagaccctggagtgaactggattccatgtagagacccctggagattcggcaacacaccagtgcaacaaagactcagctgcctggccaaggacaactctatctatgtcgtggctaatattggggacaagaagccatgcaatgccagtgactctcagtgtccccctgatggccgttaccaatacaacactgatgtggtgtttgattctcagggaaaactgttggcacgctaccataagtacaatctttttgcacctgaaattcagtttgatttccccaaggattcagaacttgtgacttttgacactccctttgggaagtttggcatttttacttgctttgacattttttctcatgacccagctgtggtggtggtggatgagtttcaattgacagcattctctaccccacagcatggtacaacacgctgcccctcctctcggctgttcccttccattcagcatgggccaaggccatgggagtcaatctacttgctgcaaatacccacaacaccagcatgcacatgacagggagtggaatctacgccccagaagcagtcaaggtgtaccactatgacatggaaacagagagtggtcagctgttgctatcagaactgaagtctcggccccgccgtgagcccacctaccctgcagctgttgactggcatgcgtatgccagcagtgtcaagccattttcctctgaacagtcagattttctggggatgatttattttgatgagtttaccttcaccaagcttaagagaaatacaggaaattacacagcttgccagaaagatctgtgttgtcacttaacttacaagatgtctgagaagcgaacagacgagatctatgccctaggtgcttttgatggactgcacacagtagaaggccaatattacttacagatatgtgcattactgaagtgtcaaaccactgacctggaaacgtgtggagaacctgtggggtcagcttttaccaagtttgaagacttctccctcagtggcacatttggaacgcgttatgttttcccacagatcattctaagtgggagtcagcttgcccctgaaagacattatgagatttcaagagatggacgcttgaggagccgaagtggagcccctttgcctgtcttagttatggccctgtatggaagagtgtttgagaaggaccctccacgcttagggcagggatctgggaaattccagtgatctcctttagcagagcccttttaggattagcctggctaagaaaggaagaaaaaaaagagatccgttagtgtctgtttagaaaagatgttataaacttacagaaacaaatataataaactgaagcagatttgaaaagcaacaa

SEQ ID NO: 109909 - DNA, 1214 bp, Artificial Sequence
  derived and/or modified sequence
atgattatatcacattttccaaaatgtgtggcagtttttgccctccttgctctgagtgttggtgcactggacacttttattgctgcagtatatgagcatgcggtgatattaccaaacagaacagaaacacctgtttcaaaagaagaagctttgctcctgatgaacaagaacatagatgttttggagaaagcagttaagctggcagcgaagcagggtgcacatatcattgtgaccccagaagatggaatctatggttggatcttcaccagggagagcatttacccctatctagaggatataccagaccctggagtgaactggattccatgtagagacccctggagattcggcaacacaccagtgcaacaaagactcagctgcctggccaaggacaactctatctatgtcgtggctaatattggggacaagaagccatgcaatgccagtgactctcagtgtccccctgatggccgttaccaatacaacactgatgtggtgtttgattctcagggaaaactgttggcacgctaccataagggagtggaatctacgccccagaagcagtcaaggtgtaccactatgacatggaaacagagagtggtcagctgttgctatcagaactgaagtctcggccccgccgtgagcccacctaccctgcagctgttgactggcatgcgtatgccagcagtgtcaagccattttcctctgaacagtcagattttctggggatgatttattttgatgagtttaccttcaccaagcttaagagaaatacaggaaattacacagcttgccagaaagatctgtgttgtcacttaacttacaagatgtctgagaagcgaacagacgagatctatgccctaggtgcttttgatggactgcacacagtagaaggccaatattacttacagatatgtgcattactgaagtgtcaaaccactgacctggaaacgtgtggagaacctgtggggtcagcttttaccaagtttgaagacttctccctcagtggcacatttggaacgcgttatgttttcccacagatcattctaagtgggagtcagcttgcccctgaaagacattatgagatttcaagagatggacgcttgaggagccgaagtggagcccctttgcctgtcttagttatggccctgtatggaagagtgtttgagaaggaccctccacgcttagggcagggatctgggaaattccagtga

SEQ ID NO: 109910 - protein, 216 aa, Artificial Sequence
  derived and/or modified sequence
MAGSVLLDKRFRAECKNYGVIIPYPPSNRYETLLKQRHVQLLGRSIDLNRLITQRISAAMYKSLDQAISRFESEDLTSIVELEWLLEINRLTHRLLCKHMTLDSFDAMFREANHNVSAPYGRITLHVFWELNFDFLPNYCYNGSTNRFVRTASFHPRTTTRQTCQRPALLPLWIQASQHCLQPHLQLLQEFRGATSFQDYADSWVIRASLWSWRNC

SEQ ID NO: 109911 - protein, 1178 aa, Artificial Sequence
  derived and/or modified sequence
MTTHVTLEDALSNVDLLEELPLPNEQPNRVEIYEKTVEVLEPEVTKLMKFMYFQRKAIERFCSEVKRLCHAERRKDFVSEAYLLTLGKFINMFAVLDELKNMKCSVKNDHSAYKRAAQFLRKMADPQSIQESQNLSMFLANHNRITQCLHQQLEVIPGYEELLADIVNICVDYYENKMYLTPSEKHMLLKVMGFGLYLMDGNVSNIYKLDAKKRINLSKIDKFFKQLQVVPLFGDMQIELARYIKTSAHYEENKSKWTCTQSSISPQYNICEQMVQIRDDHIRFISELARYSNSEVVTGSGLDSQKSDEEYRELFDLALRGLQLLSKWSAHVMEVYSWKLVHPTDKFCNKDCPGTAEEYERATRYNYTSEEKFAFVEVIAMIKGLQVLMGRMESVFNQAIRNTIYAALQDFAQVTLREPLRQAVRKKKNVLISVLQAIRKTICDWEGGREPPNDPCLRGEKDPKGGFDIKVPRRAVGPSSTQLYMVRTMLESLIADKSGSKKTLRSSLDGPIVLAIEDFHKQSFFFTHLLNISEALQQCCDLSQLWFREFFLELTMGRRIQFPIEMSMPWILTDHILETKEPSMMEYVLYPLDLYNDSAYYALTKFKKQFLYDEIEAEVNLCFDQFVYKLADQIFAYYKAMAGSVLLDKRFRAECKNYGVIIPYPPSNRYETLLKQRHVQLLGRSIDLNRLITQRISAAMYKSLDQAISRFESEDLTSIVELEWLLEINRLTHRLLCKHMTLDSFDAMFREANHNVSAPYGRITLHVFWELNFDFLPNYCYNGSTNRFVRTAIPFTQEPQRDKPANVQPYYLYGSKPLNIAYSHIYSSYRNFVGPPHFKTICRLLGYQGIAVVMEELLKIVKSLLQGTILQYVKTLIEVMPKICRLPRHEYGSPGILEFFHHQLKDIIEYAELKTDVFQSLREVGNAILFCLLIEQALSQEEVCDLLHAAPFQNILPRVYIKEGERLEVRMKRLEAKYAPLHLVPLIERLGTPQQIAIAREGDLLTKERLCCGLSMFEVILTRIRSYLQDPIWRGPPPTNGVMHVDECVEFHRLWSAMQFVYCIPVGTNEFTAEQCFGDGLNWAGCSIIVLLGQQRRFDLFDFCYHLLKVQRQDGKDEIIKNVPLKKMADRIRKYQILNNEVFAILNKYMKSVETDSSTVEHVRCFQPPIHQSLATTC

SEQ ID NO: 109912 - DNA, 3537 bp, Artificial Sequence
  derived and/or modified sequence
atgaccacccacgtgaccctggaagatgcgctaagcaacgttgatctgctggaggagctaccattgccgaacgagcagcctaaccgagtggaaatttacgagaaaacagtagaagtgctcgaacccgaggtgaccaagcttatgaaatttatgtattttcaacgaaaagcgattgaaaggttctgtagcgaagttaagcgtttatgtcacgcggaacggagaaaggatttcgtgagcgaggcatatctgctgacgctaggcaaattcataaatatgttcgcggttctggacgagctgaagaatatgaagtgttcagttaaaaatgatcactccgcatataagcgcgccgcccaatttctgcgcaagatggccgatccgcagagcattcaagagtctcaaaacttgagcatgtttctggcaaaccacaatcgcattacgcagtgcctccatcagcagctagaagtcatcccagggtacgaggagctgcttgcagacatcgttaacatttgcgtggactattacgaaaacaaaatgtacctgaccccctccgaaaaacatatgttgctgaaggttatgggctttggtctgtatttaatggacgggaacgtgtcaaatatttacaagctggatgctaaaaaacggattaaccttagcaaaatcgataagttttttaagcagctgcaggtcgtgccactctttggcgacatgcagatcgagttagctcggtatattaaaacgtctgcacattacgaggagaataagagcaagtggacgtgcacacagtcatccatttcaccgcaatataacatatgcgaacaaatggtccagatccgcgacgatcacattaggtttatctcagagctcgccagatattcgaactcagaggtggtgacaggatccggacttgatagtcagaaatcggacgaagagtaccgtgaactgttcgatctcgcccttagaggattgcagctgttgagcaagtggtcagcccatgtgatggaggtctactcctggaaactagttcaccccacagacaagttctgtaataaggactgcccaggaactgctgaagagtacgagagagctacacgctacaactacacatccgaagagaagtttgcttttgtagaggttattgccatgatcaaggggctccaggtgctcatgggtaggatggaatcggtgtttaaccaagcgatacgcaatacgatttatgccgccctgcaagatttcgcccaagttacactccgcgaaccgttgaggcaggccgtccggaaaaaaaaaaacgtgctgatctccgtgctccaagccattcggaaaacaatttgtgattgggagggtggtagagaacctccaaacgacccctgtctcagaggagagaaggacccaaaaggaggattcgacataaaggttccccgccgggctgtgggccccagctctacccagctgtatatggttagaactatgctggagtcccttatcgcagacaaatcggggtccaagaaaactctccgcagtagtctggatggacccatagtcctcgcaattgaggactttcacaaacagtcattcttcttcacccatctgctcaatatcagcgaagctctgcagcagtgctgtgacctcagccagttgtggtttcgcgaattcttcctcgaactgaccatgggacgcagaatacaatttcccatagagatgagtatgccatggatcctgactgaccacattctggaaactaaagaaccctcaatgatggagtacgtcttatacccacttgacctttacaacgatagtgcatattacgcactgacaaaattcaaaaaacaatttctgtacgatgagattgaggcggaggtaaacctgtgttttgaccagttcgtatataagctggctgaccagattttcgcatactacaaagcaatggcagggagtgtgctgctggacaagagatttagagccgaatgcaaaaactatggagtgattattccgtatccaccaagtaatcggtacgagacccttctcaagcagaggcacgtgcagctgctggggcggtcgatcgacctgaatcggcttatcacgcagcgcatctccgctgcaatgtataaatcgctcgatcaagctatcagcagattcgaaagcgaagacttgacaagtatagtcgaactggaatggctgctggaaatcaaccgcttgacccacaggctgttgtgtaagcacatgacccttgacagttttgatgccatgttccgagaagctaatcacaacgtttccgctccctatggcagaattaccctacacgtcttttgggaactaaacttcgactttctccctaactactgttacaatggtagcactaatagatttgtgcggaccgctatccctttcacccaggaaccccagagagacaaacccgcaaatgtgcagccatactatctgtatggctccaagcccttgaacattgcttattctcatatctacagctcatatcgcaacttcgtcgggcccccccactttaagacaatctgtcgcctcttgggctaccagggtattgccgtggtcatggaggaattacttaagattgtaaaatcactgctgcaggggactatacttcaatatgtgaaaacactgatcgaagtgatgcctaagatttgtcgtcttccaagacacgaatatgggagcccagggattcttgaatttttccatcatcagttgaaagacattattgagtatgctgaactgaagacagatgtgtttcagtctttaagagaagtgggcaacgcaatccttttttgcctcctgatcgaacaagctctctcccaggaggaagtttgtgatcttctgcatgcagcccccttccagaacattcttccaagagtgtacattaaggaaggagagagattggaggtgcgcatgaagagactggaagccaaatatgcccctctccatctggtccctctgatcgaacgcctcggcaccccacagcagatcgccattgcacgggagggagatctgctgactaaagagcggctgtgctgcggcctgtccatgttcgaggtgattctcacccgcatacggtcctaccttcaggatccaatctggaggggtccgcctcctacgaacggcgtgatgcatgtggacgagtgcgtggaattccatcgcctgtggtcagccatgcaattcgtctactgcatccctgtggggacaaacgagttcactgccgaacagtgctttggggatggtctgaactgggctggctgctcaatcatagttctgctaggacaacagcggcgctttgacctgtttgacttctgctaccaccttctgaaggttcagcgccaggacgggaaggatgaaattataaagaatgtgcccttgaaaaagatggccgatcgcatcagaaagtaccagattcttaacaatgaggtgtttgccattttaaacaagtacatgaagtctgtcgagaccgattcctctacagttgaacacgtgaggtgcttccagccacctattcaccagtcactggcgacaacatgctag

SEQ ID NO: 109913 - DNA, 3537 bp, Artificial Sequence
  derived and/or modified sequence
atgaccacccacgtgaccctggaggatgccctgagcaatgtggacctgctggaggagctgcccctgcccaatgagcagcccaacagagtggagatctatgagaagacagtggaggtgctggagcctgaggtgaccaagctgatgaagttcatgtacttccagaggaaggccatcgagcgcttctgcagcgaggtgaagaggctgtgccacgccgagaggaggaaggactttgtgtctgaggcctacctgctgaccctgggcaagttcatcaacatgtttgctgtgctggatgagctgaagaacatgaagtgcagcgtgaagaatgaccacagcgcctacaagagagctgcccagttcctgaggaagatggctgacccccagagcatccaggagagccagaacctgtccatgttcctggccaaccacaaccgcatcacccagtgcctgcaccagcagctggaggtgattcctggctatgaggagctgctggccgacatcgtgaacatctgtgtggactactatgagaacaagatgtacctgaccccatctgagaagcacatgctgctgaaggtgatgggcttcggcctgtacctgatggatggaaatgtgagcaacatctacaagctggatgccaagaagaggatcaacctgagcaagattgacaagttcttcaagcagctgcaggtggtgcccctgtttggagacatgcagatcgagctggcccgctacatcaagaccagcgcccactatgaggagaacaagagcaagtggacctgcacccagagcagcatcagcccccagtacaacatctgtgagcagatggtgcagatcagagatgaccacatccgcttcatcagcgagctggcccgctacagcaacagcgaggtggtgacaggcagcggcctggacagccagaagagtgatgaggagtaccgggagctgtttgacctggccctgcggggcctgcagctgctgagcaagtggagcgcccacgtgatggaggtgtacagctggaagctggtgcaccccacagacaagttctgcaacaaggactgccctggaacagctgaggagtatgagcgggccacccgctacaactacaccagcgaggagaagtttgcctttgtggaggtgattgccatgatcaagggcctgcaggtgctgatgggccgcatggagagcgtcttcaaccaggccatccggaacaccatctatgctgccctgcaggactttgcccaggtgaccctgcgggagcccctgcggcaggccgtgaggaagaagaagaatgtgctgatctctgtgctgcaggccatcaggaagaccatctgtgactgggagggcggccgggagcccccaaatgacccctgcctgcggggggagaaggaccccaagggcggctttgacatcaaggtgcccaggagagctgtgggccccagcagcacccagctgtacatggtgaggaccatgctggagagcctgattgctgacaagagcggcagcaagaagaccctgcggagcagcctggatggccccatcgtgctggccatcgaggacttccacaagcagagcttcttcttcacccacctgctgaacatcagcgaggccctgcagcagtgctgtgacctgagccagctgtggttccgggagttcttcctggagctgaccatgggccgccgcatccagttccccatcgagatgtccatgccctggatcctgacagaccacatcctggagaccaaggagcccagcatgatggagtatgtgctgtaccccctggacctgtacaatgacagcgcctactatgccctgaccaagttcaagaagcagttcctgtatgatgaaattgaagctgaggtgaacctgtgctttgaccagtttgtgtacaagctggccgaccagatctttgcctactacaaggccatggccggctctgtgctgctggacaagcgcttccgggcagagtgcaagaactacggcgtcatcatcccctacccacccagcaacagatatgagaccctgctgaagcagagacatgtgcagctgctgggccgcagcattgacctgaacagactcatcacccagaggatctctgctgccatgtacaagagcctggaccaggccatcagcagatttgaaagtgaggacctgaccagcatcgtggagctggagtggctgctggagatcaaccggctgacccaccggctgctgtgcaagcacatgaccctggacagctttgatgccatgttccgggaggccaaccacaacgtgtctgccccctacggccgcatcaccctgcacgtgttctgggagctgaactttgacttcctgcccaactactgctacaacggcagcaccaacagatttgtgaggacagccatccccttcacccaggagccccagagggacaagccagccaacgtgcagccctactacctgtatggcagcaagcccctgaacatcgcctacagccacatctacagcagctacagaaactttgtgggccccccccacttcaagaccatctgccgcctgctgggctaccagggcattgctgtggtgatggaggagctgctgaagatcgtgaagagcctgctgcagggcaccatcctgcagtatgtgaagaccctgattgaggtgatgcccaagatctgccgcctgcccaggcatgaatatggcagccctggcatcctggagttcttccaccaccagctgaaggacatcatcgagtatgcagagctgaagacagatgtgttccagagcctgcgggaggtgggcaatgccatcctcttctgcctgctgattgagcaggccctgagccaggaggaggtgtgtgacctgctgcatgctgcccccttccagaacatcctgccccgggtgtacatcaaggagggggagcggctggaggtgaggatgaagaggctggaggccaagtatgcccccctgcacctggtgcccctgattgagcggctgggcaccccccagcagatcgccatcgcccgggagggggacctgctgaccaaggagcggctgtgctgcggcctgtccatgtttgaagtcatcctgacccgcatccgcagctacctgcaggaccccatctggaggggccccccacccaccaacggggtgatgcacgtggatgaatgtgtggagttccaccggctgtggagcgccatgcagtttgtgtactgcatccctgtgggcaccaatgagttcaccgctgagcagtgctttggagatggcctgaactgggccggctgcagcatcatcgtgctgctgggccagcagaggagatttgacctgtttgacttctgctaccacctgctgaaggtgcagaggcaggacggcaaggatgagatcatcaagaatgtgcccctgaagaagatggctgaccgcatcaggaagtaccagatcctgaacaatgaggtgtttgccatcctgaacaagtacatgaagtctgtggagacagacagcagcacagtggagcacgtgcgctgcttccagccccccatccaccagagcctggccaccacctgctag

SEQ ID NO: 109914 - DNA, 3537 bp, Artificial Sequence
  derived and/or modified sequence
atgaccacccacgtgaccctggaggacgccctgagcaacgtggacctgctcgaggagctaccacttccaaacgaacagcccaaccgcgtcgagatctatgagaaaactgtagaggtcctcgagccggaggtgacaaagttaatgaaattcatgtatttccaaagaaaggcgattgagagattttgttccgaagtgaaacggctgtgccacgccgagaggaggaaagatttcgtgtctgaggcctacctgctcacgctgggcaaatttatcaatatgttcgctgtcttggatgagctgaaaaacatgaaatgctccgtcaagaatgatcatagcgcctacaagcgggccgcccagttcctacgcaagatggcagaccctcagtcaatacaggagagccagaatctgtccatgtttcttgcgaaccataaccgcataacgcagtgtcttcaccagcaactggaggtcattcctggctacgaagaactactcgctgatatcgttaacatttgcgtggactactacgagaataaaatgtatctgacaccctcagagaagcatatgttactgaaggtgatggggttcggactctatctgatggatggcaatgtatccaatatatacaaactggatgctaagaagcgcattaatctgtcgaagatcgataaattcttcaagcagctccaagtggtgcccctgttcggggatatgcaaatcgagctggccagatatattaagacctccgcccactacgaagaaaacaagtcaaaatggacctgcacccagtcttctattagcccccagtataacatttgcgaacagatggtgcagattagagatgaccatattaggtttatcagcgaactcgctcgatacagtaactctgaggtggtgacggggtcaggattagactcacagaagagcgacgaggagtaccgagagctctttgacctggccctgcgaggattacaactgctcagtaaatggagcgcgcatgttatggaagtgtatagctggaaactagtgcacccaacagacaagttttgcaacaaagattgcccgggaaccgcagaagaatatgagagggccaccagatataactatacaagcgaagagaagttcgcttttgtggaagtcattgctatgattaagggactgcaggtgttgatggggcgcatggagtcagtcttcaaccaggcaatacgaaacaccatctacgcagccctgcaggattttgcgcaggtaacgctgcgcgagccactcagacaggccgtgaggaaaaaaaagaacgtcctgatctccgttctacaagcaattcgcaagaccatttgcgattgggaaggggggagagagccacctaacgatccatgtctacgaggggagaaagatccaaaaggtggcttcgatatcaaagtgcctcgcagggccgtcggtccctcctctacccagttatatatggttcgcaccatgcttgagtcactcatcgctgataaaagtgggagcaaaaagaccctgaggtcctctctggacggaccgattgtgctggctattgaagatttccataagcagagtttcttcttcacccatttgctgaatatcagcgaagcattacagcagtgttgtgatctttctcagctgtggtttcgcgagttcttccttgaactgactatgggtcggaggatccagttcccaatagaaatgtcgatgccgtggattctgaccgatcatatcctcgaaacaaaagagccctccatgatggagtatgtgctgtatccactcgatctctacaatgattctgcttattatgctctgacgaaatttaaaaaacagttcttatatgacgagattgaggccgaggtaaatctgtgctttgaccagttcgtgtataagctcgctgaccagatctttgcttattacaaagccatggctgggagcgtccttctggacaaaagattccgagccgaatgtaaaaactatggtgtgattataccctatcccccatccaatagatatgagacccttctaaagcagcgccacgtccagctgctcggcagatctatcgatttgaaccgcttgatcacacagaggatctcagctgcgatgtacaaatcactggatcaggcgataagccgctttgagtctgaagacctcactagtatagtagagcttgagtggctgctagaaattaatagactcacgcaccgcctgttatgtaagcatatgacactggacagctttgatgccatgtttagggaggccaatcacaatgtctctgctccctacggcaggataacactgcacgttttttgggaactcaatttcgattttctgcccaattactgctacaacggaagtactaacaggtttgtgagaacggccattccgttcactcaggaacctcaacgagataagcctgctaatgttcagccttactacttgtacggatccaaacctttgaacatcgcgtactctcacatctattccagttacaggaacttcgtgggccctcctcactttaaaaccatctgccggcttctaggctaccaagggatcgctgtagtaatggaggaactgctgaagattgttaagtccctattgcagggcaccatactgcagtacgttaagaccctgatcgaggtgatgcccaaaatctgccgtttaccacgacatgagtatgggtcacccgggatcctagaatttttccatcaccagctgaaagacataatagaatatgccgagttgaaaactgacgttttccagtcattgcgcgaggtgggaaacgccatcctcttttgcctgctgatcgagcaggcactgagtcaggaggaggtgtgcgacctgctccacgcagcgccttttcagaacatcctcccgcgggtgtacataaaagagggagagcggcttgaggtccgaatgaaaagactggaagccaaatatgccccccttcacctcgtgccactcatcgagcggttaggcactccacaacagattgccattgcccgagagggtgaccttctaacaaaagaacgcctctgttgcggcttgagcatgttcgaggtgatcctgacgagaatcagaagctaccttcaagaccctatatggagaggacctcctccaacaaacggggtcatgcacgtggacgagtgcgtggagtttcatcgcttatggagtgccatgcagtttgtttattgtattcctgtgggtacaaacgaattcacagccgaacagtgttttggtgacggcctaaactgggctgggtgttctatcatcgtgctcttgggccagcagaggagattcgacctatttgacttctgttatcatttgttaaaggttcaaaggcaggacggtaaggacgagattatcaagaatgtacctttgaagaagatggcagaccgcattcgtaaatatcaaatactcaacaacgaagtctttgcaatactgaataaatatatgaagagtgtcgaaacagattcatcaacagtggaacatgttagatgttttcaaccgccaatacatcagtcattagctacaacctgttag

SEQ ID NO: 109915 - DNA, 3537 bp, Artificial Sequence
  derived and/or modified sequence
atgaccactcacgtcactctggaggacgctttatctaacgtagacctccttgaggagctccctctaccaaacgagcagcccaacagggtggaaatctacgaaaaaaccgtggaggtcttagagccggaagttacaaagctgatgaagttcatgtacttccaacggaaggcaatagagagattttgctccgaggtgaagaggttatgccacgcagaacgaagaaaggacttcgtgtccgaagcctacctgttaactctgggtaagttcattaatatgtttgccgttctggacgaattaaagaacatgaagtgcagtgtgaagaacgatcactccgcctataagagggccgctcagtttctgaggaagatggctgacccgcagtcaattcaagagtcgcagaatttgtccatgtttttggcaaatcacaatcggatcacccagtgcctgcaccagcagttggaagtgatcccaggttatgaagaactcctggcagatatcgtgaacatatgtgttgattattacgagaacaaaatgtacctgacaccgtccgagaagcatatgctgctcaaggtaatgggctttgggttgtatctgatggatgggaatgtgagcaatatttataagctcgatgctaagaagagaatcaatctttctaagatcgacaaatttttcaagcagctgcaggtggtgcccctcttcggagacatgcagatcgaactagctcgatacataaagaccagtgctcattacgaggagaacaagagtaagtggacctgcacccagagttcaatatcaccacagtataatatttgcgaacagatggtgcaaatcagggacgatcatatccgttttattagcgaactcgcgaggtactctaattccgaggtggtgactggttctggcttagactcccagaaatctgatgaagaatatagagagctcttcgatttggctctgagaggattgcagctgctgtcgaaatggtccgcacatgtgatggaggtgtatagctggaagctagtgcaccctacagacaagttctgtaacaaggattgtcccggaaccgcagaagaatacgaaagagccacgaggtacaattacacctccgaggaaaagttcgcctttgtagaggttatagccatgatcaaggggctccaggtgctgatggggcgaatggaaagtgtgttcaatcaggctatacggaacactatttacgccgctctgcaggatttcgcccaggtgacactgcgagaacccctccgccaagctgtaagaaaaaagaagaacgtgctgatttccgtgctgcaggcaattagaaagacgatctgtgactgggagggaggtcgcgagccgcctaacgacccctgcctgagaggggagaaggatcctaagggcggttttgatataaaggtgcccagacgggcagtgggcccaagcagcacacagctgtacatggtgaggaccatgttggaatctctgattgctgataaatctggaagcaaaaaaaccctccgcagctcattagatggccctattgtcttagccatcgaggatttccataagcagtctttcttcttcacccacctgctgaacatcagcgaggccctgcagcagtgctgcgacctcagccaactgtggtttcgcgagttcttcctagagctcacaatgggtcgcagaattcagtttccaatcgaaatgagcatgccctggatcctgaccgatcatatcctggaaacgaaggagccctctatgatggagtatgtgttgtacccattggacttgtataacgatagcgcttactacgccctaaccaagtttaaaaagcagttcctgtacgatgagattgaggctgaggtcaatctgtgttttgaccagttcgtatacaaactagctgatcagattttcgcttactacaaggctatggctggttccgtattgctggacaaaaggtttcgtgccgaatgtaagaactatggagtcattatcccctacccaccgagcaaccgatatgagactctcctaaaacagagacatgtgcaattgctgggacggagcatcgatttgaatcggctgatcacccagagaatctccgctgccatgtataagtcactagaccaggcaatttccagattcgagagtgaggacctcaccagtatcgtggagctcgaatggctgctggagataaatagactcacccataggttactgtgtaagcacatgacactggactcatttgatgcaatgttccgggaggcaaatcacaatgtcagcgccccttatggcaggattacgcttcacgtcttttgggagctgaatttcgactttctgcccaattactgttacaatggatctactaacagatttgtacgaactgctatcccattcacacaggagccccaaagggacaagccggcaaatgtgcaaccttattatctgtatggaagtaagcctctcaatattgcatacagccatatttattcctcatacagaaattttgttggacccccacactttaagaccatttgtagactgttaggatatcaagggattgcagtcgtgatggaggaacttctaaaaatcgtaaagagtctgctgcaagggaccatactacagtatgtcaagactctgatcgaagttatgcccaagatttgtagactccccaggcacgagtatggatctcccggaatcctggagttcttccaccatcagcttaaagacatcatcgaatatgccgagctgaagaccgatgtcttccagtctttgagagaagtcggcaatgccatcctgttctgtctcctgatcgagcaggccctctcgcaggaggaggtgtgcgacttacttcatgcagctccttttcagaatatccttccgagagtgtacatcaaggaaggcgagcgtctggaagtcagaatgaaacggcttgaagcaaagtacgcgcctctgcaccttgtgcccctgatcgagcgactgggcaccccacagcagatcgctatcgctagagagggcgacctcctgacgaaggagagattatgctgcggattgtccatgtttgaggtaattctgacacgcatcagaagctacttacaagaccccatttggcgcggacctccgcctactaatggcgtgatgcacgtggacgaatgcgtggagtttcataggctgtggagcgccatgcagttcgtttactgcatcccagtggggacaaatgaatttacagcagaacagtgtttcggtgacggtcttaactgggccggttgttcgattattgtgttattggggcagcaaagacgctttgaccttttcgacttttgctaccacctgctcaaggtacagcgccaggacggtaaagatgagatcataaaaaatgtcccccttaagaagatggccgacaggattcggaaatatcagattctgaataatgaagtatttgcgatcttgaacaagtatatgaagtctgtggagaccgactcatccactgtagaacatgttcgctgctttcagcccccaattcaccagagcctggctactacgtgttag

SEQ ID NO: 109916 - DNA, 4102 bp, Artificial Sequence
  derived and/or modified sequence
cggggccggggcggggccgagcgcggcgcagcggagcggggcagagcatcctgcgccccggcgcggggccctgcggtagcctcaggcccctcccctggacccgccgcagagccagtgcagaatacagaaactgcagccatgaccacgcacgtcaccctggaagatgccctgtccaacgtggacctgcttgaagagcttcccctccccgaccagcagccatgcatcgagcctccaccttcctccatcatgtaccaggctaactttgacacaaactttgaggacaggaatgcatttgtcacgggcattgcaaggtacattgagcaggctacagtccactccagcatgaatgagatgctggaggaaggacatgagtatgcggtcatgctgtacacctggcgcagctgttcccgggccattcccaggtgaaatgcaacgagcagcccaaccgagtagagatctatgagaagacagtagaggtgctggagccggaggtcaccaagctcatgaagttcatgtattttcagcgcaaggccatcgagcggttctgcagcgaggtgaagcggctgtgccatgccgagcgcaggaaggactttgtctctgaggcctacctcctgacccttggcaagttcatcaacatgtttgctgtcctggatgagctaaagaacatgaagtgcagcgtcaagaatgaccactctgcctacaagagggcagcacagttcctgcggaagatggcagatccccagtctatccaggagtcgcagaacctttccatgttcctggccaaccacaacaggatcacccagtgtctccaccagcaacttgaagtgatcccaggctatgaggagctgctggctgacattgtcaacatctgtgtggattactacgagaacaagatgtacctgactcccagtgagaaacatatgctcctcaaggtgatgggctttggcctctacctaatggatggaaatgtcagtaacatttacaaactggatgccaagaagagaattaatcttagcaaaattgataaattctttaagcagctgcaggtggtgccccttttcggcgacatgcagatagagctggccagatacattaagaccagtgctcactatgaagagaacaagtccaagtggacgtgcacccagagcagcatcagcccccagtacaatatctgcgagcagatggttcagatccgggatgaccacatccgcttcatctccgagctcgctcgctacagcaacagtgaggtggtgacgggctcagggctggacagccagaagtcagacgaggagtatcgcgagctcttcgacctagccctgcggggtctgcagcttctatccaagtggagcgcccacgtcatggaggtgtactcttggaagctggttcatcccacagacaagttctgcaacaaggactgtcctggcaccgcggaggaatatgagagagccacacgctacaattacaccagtgaggaaaaatttgccttcgttgaggtgatcgccatgatcaaaggcctgcaggtgctcatgggcaggatggagagcgtcttcaaccaggccatcaggaacaccatctacgcggcattgcaggacttcgcccaggtgacgctgcgtgagcccctgcggcaggcggtacggaagaagaagaatgtcctcatcagcgtcctacaggcaattcgaaagaccatctgtgactgggagggagggcgagagccccctaatgacccatgcttgagaggggagaaggaccccaaaggtggatttgatatcaaggtgccccggcgtgctgtggggccatccagcacacagctgtacatggtgcggaccatgcttgaatcactcattgcagacaaaagcggctccaagaagaccctgaggagcagcctggatggacccattgtcctcgccatagaggactttcacaaacagtccttcttcttcacacatctgctcaacatcagtgaagccctgcagcagtgttgtgacctctcccagctctggttccgagaattcttcctggagttaaccatgggccgacgaatccagttccccatcgagatgtccatgccctggattctaacggaccatatcctggaaaccaaagaaccttccatgatggagtatgtcctctaccctctggatctgtacaacgacagcgcctactatgctctgaccaagtttaaaaagcagttcctgtacgatgagatagaagctgaggtgaacctgtgttttgatcagtttgtctacaagctggcagaccagatctttgcttactacaaagccatggctggcagtgtcctgttggataaacgttttcgagctgagtgtaagaattatggcgtcatcattccgtatccaccgtccaatcgctatgaaacactgctgaagcagagacacgtccagctgttgggtagatcaattgacttgaacagactcattacccagcgcatctctgccgccatgtataaatccttggaccaagctatcagccgctttgagagtgaggacctgacctccattgtggagctggagtggctgctggagattaaccggctcacgcatcggctgctctgtaagcatatgacgctggacagcttcgatgccatgttccgagaggccaatcacaatgtgtccgccccctatggccgtatcaccctgcatgtcttctgggaactgaactttgactttctccccaactactgctacaatgggtccactaaccgttttgtgcggactgcctcctttcacccaagaaccacaacgagacaaacctgccaacgtccagccttattacctctatggatccaagcctctcaacattgcctacagccacatctacagctcctacaggaatttcgtggggccacctcatttcaagactatgcagactcctgggttatcagggcatcgctgtggtcatggaggaactgctaaagattgtgaagagcttgctccaaggaaccattctccagtatgtgaaaacactgatagaggtgatgcccaagatatgccgcttgccccgacatgagtatggctccccagggatcctggagttcttccaccaccagctgaaggacatcattgagtacgcagagctcaaaacagacgtgttccagagcctgagggaagtgggcaatgccatcctcttctgcctcctcatagagcaagctctgtctcaggaggaggtctgcgatttgctccatgccgcacccttccaaaacatcttgcctagagtctacatcaaagagggggagcgcctggaggtccggatgaaacgtctggaagccaagtatgccccgctccacctggtccctctgatcgagcggctggggacccctcagcaaatcgccattgctcgcgagggtgacctcctgaccaaggagcggctgtgctgtggcctgtccatgttcgaggtcatcctgacccgcattcggagctacctgcaggaccccatctggcggggcccaccgcccaccaatggcgtcatgcacgtcgatgagtgtgtggagttccaccggctgtggagcgccatgcagttcgtgtactgcatccctgtgggaaccaacgagttcacagctgagcagtgtttcggcgatggcttgaactgggctggttgctccatcattgtcctgctgggccagcagcgtcgctttgacctgttcgacttctgttaccacctgctaaaagtgcagaggcaggacgggaaggatgaaatcattaagaatgtgcccctgaagaagatggccgaccggatcaggaagtatcagatcttgaacaatgaggtttttgccatcctgaacaaatacatgaagtccgtggagacagacagttccactgtggagcatgtgcgctgcttccagccacccatccaccagtccttggccaccacttgctaagcagaagatcctgcagacccttatctggaggaggaagagaagcaggagagagaaagccacagccagcctgccataggatccaactggacaacgtgtgggatggacctggaaacaagcacctccccaaacacatcaccactccctagggcggggcctgtgcatgctctcccatgacatctccatgctggtttctccatagcataaatg

SEQ ID NO: 109917 - DNA, 6135 bp, Artificial Sequence
  derived and/or modified sequence
atgaccacgcacgtcaccctggaagatgccctgtccaacgtggacctgcttgaagagcttcccctccccaacgagcagcccaaccgagtagagatctatgagaagacagtagaggtgctggagccggaggtcaccaagctcatgaagttcatgtattttcagcgcaaggccatcgagcggttctgcagcgaggtgaagcggctgtgccatgccgagcgcaggaaggactttgtctctgaggcctacctcctgacccttggcaagttcatcaacatgtttgctgtcctggatgagctaaagaacatgaagtgcagcgtcaagaatgaccactctgcctacaagagggcagcacagttcctgcggaagatggcagatccccagtctatccaggagtcgcagaacctttccatgttcctggccaaccacaacaggatcacccagtgtctccaccagcaacttgaagtgatcccaggctatgaggagctgctggctgacattgtcaacatctgtgtggattactacgagaacaagatgtacctgactcccagtgagaaacatatgctcctcaaggtgatgggctttggcctctacctaatggatggaaatgtcagtaacatttacaaactggatgccaagaagagaattaatcttagcaaaattgataaattctttaagcagctgcaggtggtgccccttttcggcgacatgcagatagagctggccagatacattaagaccagtgctcactatgaagagaacaagtccaagtggacgtgcacccagagcagcatcagcccccagtacaatatctgcgagcagatggttcagatccgggatgaccacatccgcttcatctccgagctcgctcgctacagcaacagtgaggtggtgacgggctcagggctggacagccagaagtcagacgaggagtatcgcgagctcttcgacctagccctgcggggtctgcagcttctatccaagtggagcgcccacgtcatggaggtgtactcttggaagctggttcatcccacagacaagttctgcaacaaggactgtcctggcaccgcggaggaatatgagagagccacacgctacaattacaccagtgaggaaaaatttgccttcgttgaggtgatcgccatgatcaaaggcctgcaggtgctcatgggcaggatggagagcgtcttcaaccaggccatcaggaacaccatctacgcggcattgcaggacttcgcccaggtgacgctgcgtgagcccctgcggcaggcggtacggaagaagaagaatgtcctcatcagcgtcctacaggcaattcgaaagaccatctgtgactgggagggagggcgagagccccctaatgacccatgcttgagaggggagaaggaccccaaaggtggatttgatatcaaggtgccccggcgtgctgtggggccatccagcacacagctgtacatggtgcggaccatgcttgaatcactcattgcagacaaaagcggctccaagaagaccctgaggagcagcctggatggacccattgtcctcgccatagaggactttcacaaacagtccttcttcttcacacatctgctcaacatcagtgaagccctgcagcagtgttgtgacctctcccagctctggttccgagaattcttcctggagttaaccatgggccgacgaatccagttccccatcgagatgtccatgccctggattctaacggaccatatcctggaaaccaaagaaccttccatgatggagtatgtcctctaccctctggatctgtacaacgacagcgcctactatgctctgaccaagtttaaaaagcagttcctgtacgatgagatagaagctgaggtgaacctgtgttttgatcagtttgtctacaagctggcagaccagatctttgcttactacaaagccatggctggcagtgtcctgttggataaacgttttcgagctgagtgtaagaattatggcgtcatcattccgtatccaccgtccaatcgctatgaaacactgctgaagcagagacacgtccagctgttgggtagatcaattgacttgaacagactcattacccagcgcatctctgccgccatgtataaatccttggaccaagctatcagccgctttgagagtgaggacctgacctccattgtggagctggagtggctgctggagattaaccggctcacgcatcggctgctctgtaagcatatgacgctggacagcttcgatgccatgttccgagaggccaatcacaatgtgtccgccccctatggccgtatcaccctgcatgtcttctgggaactgaactttgactttctccccaactactgctacaatgggtccactaaccgttttgtgcggactgccattcctttcacccaagaaccacaacgagacaaacctgccaacgtccagccttattacctctatggatccaagcctctcaacattgcctacagccacatctacagctcctacaggaatttcgtggggccacctcatttcaagactatctgcagactcctgggttatcagggcatcgctgtggtcatggaggaactgctaaagattgtgaagagcttgctccaaggaaccattctccagtatgtgaaaacactgatagaggtgatgcccaagatatgccgcttgccccgacatgagtatggctccccagggatcctggagttcttccaccaccagctgaaggacatcattgagtacgcagagctcaaaacagacgtgttccagagcctgagggaagtgggcaatgccatcctcttctgcctcctcatagagcaagctctgtctcaggaggaggtctgcgatttgctccatgccgcacccttccaaaacatcttgcctagagtctacatcaaagagggggagcgcctggaggtccggatgaaacgtctggaagccaagtatgccccgctccacctggtccctctgatcgagcggctggggacccctcagcaaatcgccattgctcgcgagggtgacctcctgaccaaggagcggctgtgctgtggcctgtccatgttcgaggtcatcctgacccgcattcggagctacctgcaggaccccatctggcggggcccaccgcccaccaatggcgtcatgcacgtcgatgagtgtgtggagttccaccggctgtggagcgccatgcagttcgtgtactgcatccctgtgggaaccaacgagttcacagctgagcagtgtttcggcgatggcttgaactgggctggttgctccatcattgtcctgctgggccagcagcgtcgctttgacctgttcgacttctgttaccacctgctaaaagtgcagaggcaggacgggaaggatgaaatcattaagaatgtgcccctgaagaagatggccgaccggatcaggaagtatcagatcttgaacaatgaggtttttgccatcctgaacaaatacatgaagtccgtggagacagacagttccactgtggagcatgtgcgctgcttccagccacccatccaccagtccttggccaccacttgctaagcagaagatcctgcagacccttatctggaggaggaagagaagcaggagagagaaagccacagccagcctgccataggatccaactggacaacgtgtgggatggacctggaaacaagcacctccccaaacacatcaccactccctagggcggggcctgtgcatgctctcccatgacatctccatgctggtttctccatagcataaatgaaaaaaaaaaaaaaaaagtaaacagggcagtgtgtgctttttcttttctcccccctcaactatattaagaactcctagtttcaccctttctccatcccatcatcccacctatctgtggttgcttcccaagacctcctcccaagatagacatctcctacccagtgcccttgtgtgaccccaggactcaagtctcagactgtgaacagatgtggccatgcccagagacgccagcctggccagaagggcatgcctcagcttactacttcatctctcctggttccctccctgcagtgccccgggtgtcatcttctcccactctgggtaccagggattctaccacataggcttcccaaagccccattctaactcccctctctcagggaagccctagagagaggtccaaaaagcattcacagctgtatcacactctatgcaggtggggtaggagactgatcaggcctgctgtggggaagcagtatgtatgaacacagccagaaatgtcatagtccaaacaggatgctttcaggccatctcagctgcttgatggtgagatggttcccttattccttcaggaaaggcttagcattgggccacataggggaagcagctttgaacaaatcagtcatagcactgcctatagcattagccagtgaccaaattagggacaacgtcttggcacagaattgcttatcaaggaacatttccacaagaaagaaaatattaaggggttatttccacagaagcccaaaacgtcttggaaacacagaggtgaggaggaggaatagtaattgtcaatgagcttttaataccaagatacaccccctgcccccaaagaagagtcctcttttagggaatcagaaccttcattgtcctagaagctgaaagattcttggaacattttagcttttactctcaacttgctgttctctttacattccttaagttagactttcgggtgtggcttctctcccaggggtaacatttacttccattttctagactgaaccaaaagtcttctgcagaatctcccaccgagtgtggtaagaaggaaggacaaaaggctttaggatataaatttcatgttacagagcatgtcattgtcaaaggaaatctgtggccctgagattttaagaacataaaatgtgacatttgatatttctccagcccagggaagtaagatggttagcaatggttgccttaatcaaatggtcccatttttaaccccaaaggaagtgcccacagcaagaggtttgtgtgatgcacttatgtcctccggtgaggaaagggggccacatatgaaaggccccttaggtcagatcctgagagtagcacatttgagtgcagattcctgggccccacctcaaacctactaattctgaatctctgggaatagggccaggaaatctgccctttctacaaactacccaagttgttctgttgcacatcaatgtttgggaaccactgctgtaagggaatcattctggtcaccttgagctttgagctaccactaagccatgaaagaaaatacatcatacagggaagagagaagggaggaggttccaagtagtaactggcagatcctcctgtctggaggtaccaccttctattctggtttctgacttttccttcttgatgaccatagatgtgttccagaggcaaaagagacacattatcccagatggcagaacatgctttcaaaacatataaaatgtcaaagttccagatccttctacatctttagtcctgtctgaggatggtagctggctctctgtagctgatagatggctagagttccatccaaatccttgaccacgacttcatggagatttgaataatctatttgatgagatttctatttcaataacccacctctctcaccccacattcatatccctaaatttgaccctctgggccgagtcacattaccttcaggagacttgatcccagtagactgaggtcttccctttcagcagaaagatttcatttccctggcttgccagtggcactgatttccgaacacccaatgagtttaatattctttcctccttggcattactgccccagcctctttttattttttttgtgtgtgtctaataaccaggaaaaaaataaagcttaggttttaaaaagttttaaaaataatctgtttcagaaactgtcaaatgtaccatatttgtattaagagttgttgggaatttttgtacaatgaatttacatttatttatggtgacatatttacgcttgtgatcaaataatgatgttaaattcttaaatcatatttgctatgcagctgaagatgatattttgatttgtattttgggggtacctgtgttgagttgataaacatttccatcttcattaaaactgcttccaaactagtaaaaccagcaa

SEQ ID NO: 109918 - DNA, 3537 bp, Artificial Sequence
  derived and/or modified sequence
atgaccacccacgtgaccctggaggacgccctgagcaacgtggacctgctggaggagctgcccctgcccaacgagcagcccaacagagtggagatctacgagaagaccgtggaggtgctggagcccgaggtgaccaagctgatgaagttcatgtacttccagagaaaggccatcgagagattctgcagcgaggtgaagagactgtgccacgccgagagaagaaaggacttcgtgagcgaggcctacctgctgaccctgggcaagttcatcaacatgttcgccgtgctggacgagctgaagaacatgaagtgcagcgtgaagaacgaccacagcgcctacaagagagccgcccagttcctgagaaagatggccgacccccagagcatccaggagagccagaacctgagcatgttcctggccaaccacaacagaatcacccagtgcctgcaccagcagctggaggtgatccccggctacgaggagctgctggccgacatcgtgaacatctgcgtggactactacgagaacaagatgtacctgacccccagcgagaagcacatgctgctgaaggtgatgggcttcggcctgtacctgatggacggcaacgtgagcaacatctacaagctggacgccaagaagagaatcaacctgagcaagatcgacaagttcttcaagcagctgcaggtggtgcccctgttcggcgacatgcagatcgagctggccagatacatcaagaccagcgcccactacgaggagaacaagagcaagtggacctgcacccagagcagcatcagcccccagtacaacatctgcgagcagatggtgcagatcagagacgaccacatcagattcatcagcgagctggccagatacagcaacagcgaggtggtgaccggcagcggcctggacagccagaagagcgacgaggagtacagagagctgttcgacctggccctgagaggcctgcagctgctgagcaagtggagcgcccacgtgatggaggtgtacagctggaagctggtgcaccccaccgacaagttctgcaacaaggactgccccggcaccgccgaggagtacgagagagccaccagatacaactacaccagcgaggagaagttcgccttcgtggaggtgatcgccatgatcaagggcctgcaggtgctgatgggcagaatggagagcgtgttcaaccaggccatcagaaacaccatctacgccgccctgcaggacttcgcccaggtgaccctgagagagcccctgagacaggccgtgagaaagaagaagaacgtgctgatcagcgtgctgcaggccatcagaaagaccatctgcgactgggagggcggcagagagccccccaacgacccctgcctgagaggcgagaaggaccccaagggcggcttcgacatcaaggtgcccagaagagccgtgggccccagcagcacccagctgtacatggtgagaaccatgctggagagcctgatcgccgacaagagcggcagcaagaagaccctgagaagcagcctggacggccccatcgtgctggccatcgaggacttccacaagcagagcttcttcttcacccacctgctgaacatcagcgaggccctgcagcagtgctgcgacctgagccagctgtggttcagagagttcttcctggagctgaccatgggcagaagaatccagttccccatcgagatgagcatgccctggatcctgaccgaccacatcctggagaccaaggagcccagcatgatggagtacgtgctgtaccccctggacctgtacaacgacagcgcctactacgccctgaccaagttcaagaagcagttcctgtacgacgagatcgaggccgaggtgaacctgtgcttcgaccagttcgtgtacaagctggccgaccagatcttcgcctactacaaggccatggccggcagcgtgctgctggacaagagattcagagccgagtgcaagaactacggcgtgatcatcccctacccccccagcaacagatacgagaccctgctgaagcagagacacgtgcagctgctgggcagaagcatcgacctgaacagactgatcacccagagaatcagcgccgccatgtacaagagcctggaccaggccatcagcagattcgagagcgaggacctgaccagcatcgtggagctggagtggctgctggagatcaacagactgacccacagactgctgtgcaagcacatgaccctggacagcttcgacgccatgttcagagaggccaaccacaacgtgagcgccccctacggcagaatcaccctgcacgtgttctgggagctgaacttcgacttcctgcccaactactgctacaacggcagcaccaacagattcgtgagaaccgccatccccttcacccaggagccccagagagacaagcccgccaacgtgcagccctactacctgtacggcagcaagcccctgaacatcgcctacagccacatctacagcagctacagaaacttcgtgggccccccccacttcaagaccatctgcagactgctgggctaccagggcatcgccgtggtgatggaggagctgctgaagatcgtgaagagcctgctgcagggcaccatcctgcagtacgtgaagaccctgatcgaggtgatgcccaagatctgcagactgcccagacacgagtacggcagccccggcatcctggagttcttccaccaccagctgaaggacatcatcgagtacgccgagctgaagaccgacgtgttccagagcctgagagaggtgggcaacgccatcctgttctgcctgctgatcgagcaggccctgagccaggaggaggtgtgcgacctgctgcacgccgcccccttccagaacatcctgcccagagtgtacatcaaggagggcgagagactggaggtgagaatgaagagactggaggccaagtacgcccccctgcacctggtgcccctgatcgagagactgggcaccccccagcagatcgccatcgccagagagggcgacctgctgaccaaggagagactgtgctgcggcctgagcatgttcgaggtgatcctgaccagaatcagaagctacctgcaggaccccatctggagaggccccccccccaccaacggcgtgatgcacgtggacgagtgcgtggagttccacagactgtggagcgccatgcagttcgtgtactgcatccccgtgggcaccaacgagttcaccgccgagcagtgcttcggcgacggcctgaactgggccggctgcagcatcatcgtgctgctgggccagcagagaagattcgacctgttcgacttctgctaccacctgctgaaggtgcagagacaggacggcaaggacgagatcatcaagaacgtgcccctgaagaagatggccgacagaatcagaaagtaccagatcctgaacaacgaggtgttcgccatcctgaacaagtacatgaagagcgtggagaccgacagcagcaccgtggagcacgtgagatgcttccagccccccatccaccagagcctggccaccacctgctag

SEQ ID NO: 109919 - protein, 1278 aa, Artificial Sequence
  derived and/or modified sequence
MTTHVTLEDALSNVDLLEELPLPDQQPCIEPPPSSIMYQANFDTNFEDRNAFVTGIARYIEQATVHSSMNEMLEEGHEYAVMLYTWRSCSRAIPRVKCNEQPNRVEIYEKTVEVLEPEVTKLMKFMYFQRKAIERFCSEVKRLCHAERRKDFVSEAYLLTLGKFINMFAVLDELKNMKCSVKNDHSAYKRAAQFLRKMADPQSIQESQNLSMFLANHNRITQCLHQQLEVIPGYEELLADIVNICVDYYENKMYLTPSEKHMLLKVMGFGLYLMDGNVSNIYKLDAKKRINLSKIDKFFKQLQVVPLFGDMQIELARYIKTSAHYEENKSKWTCTQSSISPQYNICEQMVQIRDDHIRFISELARYSNSEVVTGSGLDSQKSDEEYRELFDLALRGLQLLSKWSAHVMEVYSWKLVHPTDKFCNKDCPGTAEEYERATRYNYTSEEKFAFVEVIAMIKGLQVLMGRMESVFNQAIRNTIYAALQDFAQVTLREPLRQAVRKKKNVLISVLQAIRKTICDWEGGREPPNDPCLRGEKDPKGGFDIKVPRRAVGPSSTQACQWSPRALFHPTGGTQGRRGCRSLLYMVRTMLESLIADKSGSKKTLRSSLDGPIVLAIEDFHKQSFFFTHLLNISEALQQCCDLSQLWFREFFLELTMGRRIQFPIEMSMPWILTDHILETKEPSMMEYVLYPLDLYNDSAYYALTKFKKQFLYDEIEAEVNLCFDQFVYKLADQIFAYYKAMAGSVLLDKRFRAECKNYGVIIPYPPSNRYETLLKQRHVQLLGRSIDLNRLITQRISAAMYKSLDQAISRFESEDLTSIVELEWLLEINRLTHRLLCKHMTLDSFDAMFREANHNVSAPYGRITLHVFWELNFDFLPNYCYNGSTNRFVRTAIPFTQEPQRDKPANVQPYYLYGSKPLNIAYSHIYSSYRNFVGPPHFKTICRLLGYQGIAVVMEELLKIVKSLLQGTILQYVKTLIEVMPKICRLPRHEYGSPGILEFFHHQLKDIIEYAELKTDVFQSLREVGNAILFCLLIEQALSQEEVCDLLHAAPFQNILPRVYIKEGERLEVRMKRLEAKYAPLHLVPLIERLGTPQQIAIAREGDLLTKERLCCGLSMFEVILTRIRSYLQDPIWRGPPPTNGVMHVDECVEFHRLWSAMQFVYCIPVGTNEFTAEQCFGDGLNWAGCSIIVLLGQQRRFDLFDFCYHLLKVQRQDGKDEIIKNVPLKKMADRIRKYQILNNEVFAILNKYMKSVETDSSTVEHVRCFQPPIHQSLATTC

SEQ ID NO: 109920 - protein, 952 aa, Artificial Sequence
  derived and/or modified sequence
EKRRRWTCTQSSISPQYNICEQMVQIRDDHIRFISELARYSNSEVVTGSGLDSQKSDEEYRELFDLALRGLQLLSKWSAHVMEVYSWKLVHPTDKFCNKDCPGTAEEYERATRYNYTSEEKFAFVEVIAMIKGLQVLMGRMESVFNQAIRNTIYAALQDFAQVTLREPLRQAVRKKKNVLISVLQAIRKTICDWEGGREPPNDPCLRGEKDPKGGFDIKVPRRAVGPSSTQACQWSPRALFHPTGGTQGRRGCRSLLYMVRTMLESLIADKSGSKKTLRSSLDGPIVLAIEDFHKQSFFFTHLLNISEALQQCCDLSQLWFREFFLELTMGRRIQFPIEMSMPWILTDHILETKEPSMMEYVLYPLDLYNDSAYYALTKFKKQFLYDEIEAEVNLCFDQFVYKLADQIFAYYKAMAGSVLLDKRFRAECKNYGVIIPYPPSNRYETLLKQRHVQLLGRSIDLNRLITQRISAAMYKSLDQAISRFESEDLTSIVELEWLLEINRLTHRLLCKHMTLDSFDAMFREANHNVSAPYGRITLHVFWELNFDFLPNYCYNGSTNRFVRTAIPFTQEPQRDKPANVQPYYLYGSKPLNIAYSHIYSSYRNFVGPPHFKTICRLLGYQGIAVVMEELLKIVKSLLQGTILQYVKTLIEVMPKICRLPRHEYGSPGILEFFHHQLKDIIEYAELKTDVFQSLREVGNAILFCLLIEQALSQEEVCDLLHAAPFQNILPRVYIKEGERLEVRMKRLEAKYAPLHLVPLIERLGTPQQIAIAREGDLLTKERLCCGLSMFEVILTRIRSYLQDPIWRGPPPTNGVMHVDECVEFHRLWSAMQFVYCIPVGTNEFTAEQCFGDGLNWAGCSIIVLLGQQRRFDLFDFCYHLLKVQRQDGKDEIIKNVPLKKMADRIRKYQILNNEVFAILNKYMKSVETDSSTVEHVRCFQPPIHQSLATTC

SEQ ID NO: 109921 - DNA, 3837 bp, Artificial Sequence
  derived and/or modified sequence
atgaccacccacgtcacgctcgaggatgccctctctaacgtggacctgctcgaagaactgcctctgcctgaccagcaaccttgtattgagcctccgccaagttctattatgtatcaggctaatttcgatacgaatttcgaggataggaatgcattcgttaccggaatcgctcggtacatcgagcaggcaacagtgcacagcagcatgaacgagatgctggaagagggccatgagtacgccgtgatgctgtacacttggaggtcttgttcccgcgccatccctagagtgaaatgcaatgaacaaccaaaccgggtggagatatatgagaaaacggtggaggtactggaacccgaagttaccaaactgatgaagttcatgtatttccagagaaaagctattgagagattctgttcagaggtaaagcgcttgtgtcatgctgagaggaggaaagattttgtgtcagaagcgtacctgctgacactcgggaaatttatcaatatgtttgccgtcctggacgaactgaaaaatatgaagtgttctgtgaagaatgatcatagcgcctacaaacgggctgctcaatttcttcgcaagatggctgacccacagagcatccaggagagtcagaacctgagtatgtttttggccaaccacaatcggatcacgcagtgtctgcatcagcagctcgaagtaataccggggtacgaggagctgcttgctgacatcgtaaacatctgtgtggactattatgagaacaagatgtatctgaccccctctgagaagcacatgctgttgaaggtgatgggctttggcttatatctgatggacggcaacgtctcgaacatatataagttggacgccaagaaacgaattaacctatcaaagatcgataagttcttcaagcagttgcaggtggtgccactgtttggcgacatgcaaatcgagcttgcacgctatataaaaactagcgcacactatgaagagaacaaatctaaatggacctgtacccaatctagtatctccccccagtacaatatctgcgagcaaatggtccagatccgagacgatcacatccgctttatttccgaactcgctcgctactcaaacagtgaagtagtgactggcagcggcctggactctcagaagtctgacgaggagtatcgagagctcttcgaccttgctctccgtggccttcagttgctatcaaagtggagcgcccacgtgatggaggtatattcgtggaagttggtccacccaactgacaaattttgcaacaaagactgcccaggcacggctgaagagtacgaaagggctacccggtacaattacacttctgaagagaagtttgccttcgtggaagtgattgctatgatcaagggactgcaggtgcttatggggagaatggaatcagtctttaaccaggccatccgcaataccatttacgcggccctgcaggacttcgctcaagtgaccctgcgcgagcccctcagacaggccgtgcggaaaaagaagaatgtgttgatttccgttcttcaggctataagaaaaaccatttgcgactgggaaggcggccgcgaacctccgaacgacccctgtttgcgcggcgagaaggacccgaaggggggttttgatattaaagtgcccaggcgcgctgtaggcccttcgagtacccaggcctgtcaatggtcgccacgggccttgttccatcccaccggggggactcaggggagaagaggatgccggagcttgctttacatggtgaggacgatgcttgagtcattaatcgccgacaagagtggcagcaaaaagactctgcggtcttcccttgatggaccaattgtcctggcaatcgaagatttccacaagcagtctttcttttttacccacctgcttaatatctccgaggccctgcagcagtgttgtgacttgtctcagctatggtttcgcgagttctttctggagctaacaatgggccgtcgtatacaatttccgatcgagatgtccatgccatggattctcacggaccacattctcgagacaaaggagcccagtatgatggaatacgtgttataccctttggacctgtacaacgattcagcttactacgccttaacaaagttcaagaagcaattcctttacgatgagatcgaggcagaggtgaacctatgttttgatcagtttgtctacaagctggccgatcagatttttgcatactataaggcaatggcaggatccgtgctgctggataagcgcttcagagctgaatgtaaaaattacggggtcatcatcccgtacccaccatctaaccgctacgaaacgctgctaaaacagagacatgtacagttgttgggccgtagtattgatttaaacaggctgataacacaacgaatatcagcagcaatgtacaagtccctggatcaggccatatctcgctttgaatcagaagatctcacgagcatcgttgaacttgagtggctgctagagataaatagattgacccaccgccttctgtgcaagcatatgacacttgattcattcgacgccatgttcagggaagctaaccataatgtgtctgcaccatacggcagaatcactttgcacgtgttttgggaactgaactttgactttctcccaaattactgctataatggttctaccaacagattcgtgcggaccgccattcctttcactcaggaaccccagagagataagccagcaaatgtgcaaccttactatttgtacgggtccaaacctctgaacattgcgtattcacacatctacagttcttatagaaatttcgtgggtcctccccatttcaaaacaatctgccggttgctgggttaccagggcatcgcagtggtgatggaggagctgctgaaaatcgtcaagtccctcctgcaaggcactatcctgcagtatgttaagacactgatcgaggttatgcccaagatttgtcgtcttcccaggcatgagtacgggtctcctgggatcctagaatttttccatcatcagctgaaagacatcatcgagtatgcagagttgaaaaccgatgtgtttcaatcactgagagaagtggggaacgccatcctgttctgtctactcattgagcaagccctcagccaagaggaagtttgtgatctgttacacgccgccccctttcagaacatattgccacgggtgtacatcaaggaaggagagcggcttgaggtgcgcatgaagcgcctggaggccaagtatgcccccctgcacttggttccgttaattgagagactcggcacaccacaacagattgccattgcaagagagggggatcttctcactaaggagcgactttgctgcggtttgagcatgttcgaggtgatcctgacccggattcgcagctatctgcaggaccctatttggcgcggtccccctccaacaaatggtgtcatgcatgtggatgaatgtgtcgaatttcaccggctgtggtctgcaatgcagttcgtctattgcataccggtgggaacgaacgagttcacagcggaacagtgctttggggatggcttgaattgggctggttgctcaatcatcgtacttctcggacagcagcgccgcttcgatctgttcgatttctgctatcacttgctcaaggtccagcgccaagacggaaaggatgagataatcaagaatgtgccactgaaaaaaatggcggacaggattaggaagtaccagatactgaacaacgaggtcttcgctatcctaaacaagtatatgaagtccgtggaaactgactctagtacagtggagcacgtgcggtgtttccaaccgcccatacatcagtctctcgccaccacatgctag

SEQ ID NO: 109922 - DNA, 2859 bp, Artificial Sequence
  derived and/or modified sequence
gagaaacggcgccgctggacctgcacccagagtagcatttctccccagtacaatatttgcgagcagatggtgcagatccgagacgatcacatccgatttataagcgagcttgcccggtactctaactctgaagtcgtaaccggatccggattggattcacagaagtctgacgaagagtacagagagctcttcgatcttgcgctgcgcgggttgcagctgctgtcaaagtggtcagctcatgtgatggaagtgtactcctggaagcttgtacacccaactgataaattttgtaacaaggactgtcccggtacggccgaggagtacgagagggccactcgctacaattatacttccgaggaaaaattcgcatttgtggaggtaatcgctatgattaagggccttcaggtactcatgggaaggatggagagcgtgttcaaccaggctatccggaataccatctacgccgcgcttcaggatttcgcccaagtcactctgcgagaaccgttaaggcaagcagtccggaaaaaaaagaatgtccttattagtgtgctgcaggcaataagaaagaccatttgcgattgggagggcggacgagagcctccaaatgatccatgcctgcgcggggaaaaggatccaaagggcggatttgatatcaaggtgccaaggcgtgccgtagggccatcttccacacaggcctgccaatggagtccacgcgctctgtttcaccctacggggggaacacagggccgcaggggctgccgaagccttctgtacatggtaaggacaatgctggagtcactcattgccgataagtctgggagtaagaagacgctgaggagctcactggatggacccatagttctggccattgaagactttcacaagcagagtttctttttcacccatctacttaatatcagtgaggccctccaacagtgttgtgacttgtcccagctgtggtttcgggagttctttttagagctcacgatgggccgacggatccagtttcccattgagatgagcatgccctggatactcaccgaccacatactcgagactaaagaaccatcaatgatggagtatgtcttatacccactcgacctatacaacgactcggcctattatgcactcacaaagttcaagaaacagtttctttacgatgaaatcgaggccgaagtgaacctgtgttttgatcagtttgtgtataagctcgcagaccaaatctttgcctattataaagctatggccggtagtgtgttgctggataagcgatttagagctgagtgtaagaattatggcgtcattattccgtaccccccttccaatcggtacgagacactcctcaagcagagacacgtgcagctgttgggcaggtccattgatcttaatcgcttaatcactcagcgtattagcgcagccatgtataagagtctcgaccaagctatatccagattcgagagcgaggatctgacatcgattgttgaactggagtggttgctggagatcaaccgcttgacgcacaggttgctgtgcaagcacatgacgcttgactcttttgacgccatgttccgggaagccaatcacaacgttagcgctccctacgggagaatcactctccacgtgttctgggagcttaactttgattttctccccaattattgctataatggaagcacgaacagattcgtacggactgccataccattcactcaagaaccgcagagggataaacctgcaaacgtgcagccctactatttgtatgggagtaagcctcttaacatcgcctactctcatatttactcaagctaccggaactttgttgggccaccgcatttcaagactatctgcaggctgctgggctaccagggaatcgccgtagtgatggaggagctcctcaaaatcgtcaagtcactcctgcagggcacaatcttgcagtatgtcaagacacttatcgaggttatgcctaaaatatgccggttacctcgccatgagtacggatcacccggaatcctggaattcttccatcaccagctgaaggacattattgaatatgctgaactaaagaccgatgtgttccaaagcttgcgggaggtcggaaatgcaatcttgttttgcttattaatcgagcaggctctatctcaagaggaagtgtgcgacttgctccacgcagctccattccaaaatattctgccacgcgtgtatattaaggagggtgagagactggaggtgcggatgaagagactcgaagccaagtacgctcccctccatctggtgccgctgattgagagactcggcactccacagcagattgctattgccagggaaggggacctgttgaccaaggaaagactgtgctgtggcctgtccatgtttgaggtaatccttacgcgcatacgctcctatctccaggaccccatatggagaggacctccacctacaaacggggtcatgcacgtagatgagtgtgtcgagttccacaggctgtggtctgccatgcagtttgtgtactgtattcctgtggggacaaacgaatttacagccgagcagtgcttcggggatggcctcaactgggccggatgctccatcatcgtccttctggggcaacaacgtagattcgatctgtttgatttttgctaccatcttctgaaggttcaacgccaggacggaaaagatgagattataaagaatgtgcccctcaaaaagatggcagacaggatacgaaagtatcagattctgaataacgaggtcttcgcaatcttgaacaaatacatgaagtctgttgaaacagactcttctaccgttgagcacgtacggtgcttccagcccccgatccaccaatctctcgctacgacttgctag

SEQ ID NO: 109923 - DNA, 3837 bp, Artificial Sequence
  derived and/or modified sequence
atgaccacccacgtgaccctggaggatgccctgagcaatgtggacctgctggaggagctgcccctgcctgaccagcagccctgcatcgagcccccacccagcagcatcatgtaccaggccaactttgacaccaactttgaagatagaaatgcctttgtgacaggcatcgcccgctacatcgagcaggccaccgtgcacagctccatgaatgagatgctggaggagggccatgaatatgctgtgatgctgtacacctggaggagctgcagccgggccatcccccgggtgaagtgcaatgagcagcccaacagagtggagatctatgagaagacagtggaggtgctggagcctgaggtgaccaagctgatgaagttcatgtacttccagaggaaggccatcgagcgcttctgcagcgaggtgaagaggctgtgccacgccgagaggaggaaggactttgtgtctgaggcctacctgctgaccctgggcaagttcatcaacatgtttgctgtgctggatgagctgaagaacatgaagtgcagcgtgaagaatgaccacagcgcctacaagagagctgcccagttcctgaggaagatggctgacccccagagcatccaggagagccagaacctgtccatgttcctggccaaccacaaccgcatcacccagtgcctgcaccagcagctggaggtgattcctggctatgaggagctgctggccgacatcgtgaacatctgtgtggactactatgagaacaagatgtacctgacccccagcgagaagcacatgctgctgaaggtgatgggcttcggcctgtacctgatggatggaaatgtgagcaacatctacaagctggatgccaagaagaggatcaacctgagcaagattgacaagttcttcaagcagctgcaggtggtgcccctgtttggagacatgcagatcgagctggcccgctacatcaagaccagcgcccactatgaggagaacaagagcaagtggacctgcacccagagcagcatcagcccccagtacaacatctgtgagcagatggtgcagatcagagatgaccacatccgcttcatcagcgagctggcccgctacagcaacagcgaggtggtgactggaagtggcctggacagccagaagagtgatgaggagtaccgggagctgtttgacctggccctgcggggcctgcagctgctgagcaagtggagcgcccacgtgatggaggtgtacagctggaagctggtgcaccccacagacaagttctgcaacaaggactgccccggcacagctgaggagtatgaaagagccacccgctacaactacaccagcgaggagaagtttgcctttgtggaggtgattgccatgatcaagggcctgcaggtgctgatgggccgcatggagagcgtcttcaaccaggccatccggaacaccatctatgctgccctgcaggactttgcccaggtgaccctgcgggagcccctgcggcaggccgtgaggaagaagaagaatgtgctgatctctgtgctgcaggccatcaggaagaccatctgtgactgggagggcggccgggagcccccaaatgacccctgcctgcggggggagaaggaccccaagggcggctttgacatcaaggtgccccggcgggctgtgggccccagcagcacccaggcctgccagtggagcccccgggccctcttccaccccaccggcggcacccagggccggcggggctgccgcagcctgctgtacatggtgaggaccatgctggagagcctgattgctgacaagagcggcagcaagaagaccctgcggagcagcctggatggccccatcgtgctggccatcgaggacttccacaagcagagcttcttcttcacccacctgctgaacatcagcgaggccctgcagcagtgctgtgacctgagccagctgtggttccgggagttcttcctggagctgaccatgggccgccgcatccagttccccatcgagatgtccatgccctggatcctgacagaccacatcctggagaccaaggagcccagcatgatggagtatgtgctgtaccccctggacctgtacaatgacagcgcctactatgccctgaccaagttcaagaagcagttcctgtatgatgaaattgaagctgaggtgaacctgtgctttgaccagtttgtgtacaagctggccgaccagatctttgcctactacaaggccatggccggctctgtgctgctggacaagcgcttccgggcagagtgcaagaactacggcgtcatcatcccctacccacccagcaacagatatgagaccctgctgaagcagagacatgtgcagctgctgggccgcagcattgacctgaacagactcatcacccagaggatctctgctgccatgtacaagagcctggaccaggccatcagcagatttgaaagtgaggacctgaccagcatcgtggagctggagtggctgctggagatcaaccggctgacccaccggctgctgtgcaagcacatgaccctggacagctttgatgccatgttccgggaggccaaccacaacgtgtctgccccctacggccgcatcaccctgcacgtgttctgggagctgaactttgacttcctgcccaactactgctacaacggcagcaccaacagatttgtgaggacagccatccccttcacccaggagccccagagggacaagccagccaacgtgcagccctactacctgtatggcagcaagcccctgaacatcgcctacagccacatctacagcagctacagaaactttgtgggccccccccacttcaagaccatctgccgcctgctgggctaccagggcattgctgtggtgatggaggagctgctgaagatcgtgaagagcctgctgcagggcaccatcctgcagtatgtgaagaccctgattgaggtgatgcccaagatctgccgcctgcccaggcatgaatatggcagccctggcatcctggagttcttccaccaccagctgaaggacatcatcgagtatgcagagctgaagacagatgtgttccagagcctgcgggaggtgggcaatgccatcctcttctgcctgctgattgagcaggccctgagccaggaggaggtgtgtgacctgctgcatgctgcccccttccagaacatcctgccccgggtgtacatcaaggagggggagcggctggaggtgaggatgaagaggctggaggccaagtatgcccccctgcacctggtgcccctgattgagcggctgggcaccccccagcagatcgccatcgcccgggagggggacctgctgaccaaggagcggctgtgctgcggcctgtccatgtttgaagtcatcctgacccgcatccgcagctacctgcaggaccccatctggaggggccccccacccaccaacggggtgatgcacgtggatgaatgtgtggagttccaccggctgtggagcgccatgcagtttgtgtactgcatccctgtgggcaccaatgagttcaccgctgagcagtgctttggagatggcctgaactgggccggctgcagcatcatcgtgctgctgggccagcagaggagatttgacctgtttgacttctgctaccacctgctgaaggtgcagaggcaggacggcaaggatgagatcatcaagaatgtgcccctgaagaagatggctgaccgcatcaggaagtaccagatcctgaacaatgaggtgtttgccatcctgaacaagtacatgaagtctgtggagacagacagcagcacagtggagcacgtgcgctgcttccagccccccatccaccagagcctggccaccacctgctag

SEQ ID NO: 109924 - DNA, 2859 bp, Artificial Sequence
  derived and/or modified sequence
gagaagagaagacgctggacctgcacccagagcagcatcagcccccagtacaacatctgtgagcagatggtgcagatcagagatgaccacatccgcttcatcagcgagctggcccgctacagcaacagcgaggtggtgactggaagtggcctggacagccagaagagtgatgaggagtaccgggagctgtttgacctggccctgcggggcctgcagctgctgagcaagtggagcgcccacgtgatggaggtgtacagctggaagctggtgcaccccacagacaagttctgcaacaaggactgccccggcacagctgaggagtatgaaagagccacccgctacaactacaccagcgaggagaagtttgcctttgtggaggtgattgccatgatcaagggcctgcaggtgctgatgggccgcatggagagcgtcttcaaccaggccatccggaacaccatctatgctgccctgcaggactttgcccaggtgaccctgcgggagcccctgcggcaggccgtgaggaagaagaagaatgtgctgatctctgtgctgcaggccatcaggaagaccatctgtgactgggagggcggccgggagcccccaaatgacccctgcctgcggggggagaaggaccccaagggcggctttgacatcaaggtgccccggcgggctgtgggccccagcagcacccaggcctgccagtggagcccccgggccctcttccaccccaccggcggcacccagggccggcggggctgccgcagcctgctgtacatggtgaggaccatgctggagagcctgattgctgacaagagcggcagcaagaagaccctgcggagcagcctggatggccccatcgtgctggccatcgaggacttccacaagcagagcttcttcttcacccacctgctgaacatcagcgaggccctgcagcagtgctgtgacctgagccagctgtggttccgggagttcttcctggagctgaccatgggccgccgcatccagttccccatcgagatgtccatgccctggatcctgacagaccacatcctggagaccaaggagcccagcatgatggagtatgtgctgtaccccctggacctgtacaatgacagcgcctactatgccctgaccaagttcaagaagcagttcctgtatgatgaaattgaagctgaggtgaacctgtgctttgaccagtttgtgtacaagctggccgaccagatctttgcctactacaaggccatggccggctctgtgctgctggacaagcgcttccgggcagagtgcaagaactacggcgtcatcatcccctacccacccagcaacagatatgagaccctgctgaagcagagacatgtgcagctgctgggccgcagcattgacctgaacagactcatcacccagaggatctctgctgccatgtacaagagcctggaccaggccatcagcagatttgaaagtgaggacctgaccagcatcgtggagctggagtggctgctggagatcaaccggctgacccaccggctgctgtgcaagcacatgaccctggacagctttgatgccatgttccgggaggccaaccacaacgtgtctgccccctacggccgcatcaccctgcacgtgttctgggagctgaactttgacttcctgcccaactactgctacaacggcagcaccaacagatttgtgaggacagccatccccttcacccaggagccccagagggacaagccagccaacgtgcagccctactacctgtatggcagcaagcccctgaacatcgcctacagccacatctacagcagctacagaaactttgtgggccccccccacttcaagaccatctgccgcctgctgggctaccagggcattgctgtggtgatggaggagctgctgaagatcgtgaagagcctgctgcagggcaccatcctgcagtatgtgaagaccctgattgaggtgatgcccaagatctgccgcctgcccaggcatgaatatggcagccctggcatcctggagttcttccaccaccagctgaaggacatcatcgagtatgcagagctgaagacagatgtgttccagagcctgcgggaggtgggcaatgccatcctcttctgcctgctgattgagcaggccctgagccaggaggaggtgtgtgacctgctgcatgctgcccccttccagaacatcctgccccgggtgtacatcaaggagggggagcggctggaggtgaggatgaagaggctggaggccaagtatgcccccctgcacctggtgcccctgattgagcggctgggcaccccccagcagatcgccatcgcccgggagggggacctgctgaccaaggagcggctgtgctgcggcctgtccatgtttgaagtcatcctgacccgcatccgcagctacctgcaggaccccatctggaggggccccccacccaccaacggggtgatgcacgtggatgaatgtgtggagttccaccggctgtggagcgccatgcagtttgtgtactgcatccctgtgggcaccaatgagttcaccgctgagcagtgctttggagatggcctgaactgggccggctgcagcatcatcgtgctgctgggccagcagaggagatttgacctgtttgacttctgctaccacctgctgaaggtgcagaggcaggacggcaaggatgagatcatcaagaatgtgcccctgaagaagatggctgaccgcatcaggaagtaccagatcctgaacaatgaggtgtttgccatcctgaacaagtacatgaagtctgtggagacagacagcagcacagtggagcacgtgcgctgcttccagccccccatccaccagagcctggccaccacctgctag

SEQ ID NO: 109925 - DNA, 3837 bp, Artificial Sequence
  derived and/or modified sequence
atgaccacccacgtgaccctggaggacgccctgagcaacgtggacctgctggaggagctcccacttcccgatcagcagccatgcatcgaaccccccccatcctctattatgtatcaggcgaatttcgacactaattttgaggacagaaatgcttttgttacaggaatcgcccggtatattgaacaagccacggtccacagctcgatgaatgaaatgctggaggaaggtcatgagtacgccgtaatgctctacacttggcgctcctgctcaagagcaattcctcgggtgaaatgcaacgaacagcccaatagagtagagatttatgagaaaactgtcgaggtgctggaacccgaggtgacgaagctaatgaagttcatgtattttcagaggaaagcaatcgagaggttctgcagcgaggtgaagcggctttgccacgcggagcgccgcaaggacttcgtaagcgaagcttacctgctaaccctcggaaagttcataaacatgtttgccgtgctggacgaacttaagaacatgaaatgctctgtgaagaacgatcattcggcatacaaaagagcagcacagttcctcagaaagatggcggacccacagtctatccaagagagtcagaatctgagcatgttcctggcaaaccataatcgaatcacgcagtgtctgcatcaacagctcgaggtaatcccagggtatgaagagctcctggcagatatcgttaatatctgtgtagattactatgagaataagatgtacttgactccgagtgagaagcatatgcttctgaaagtcatgggttttggcctataccttatggatgggaacgtgagcaacatttacaagctcgatgccaaaaagcgtattaacctttcaaaaatagataagttctttaagcagctgcaagtggtgcctctgttcggggatatgcagatagagctggcaagatatatcaaaaccagcgcccattacgaggagaacaaatccaagtggacttgtactcagtccagcatttcacctcagtataacatctgcgagcagatggtccagatccgtgatgaccacatccgcttcatcagcgagctggcgcggtacagtaactccgaggtagtgaccggctccggccttgacagccagaagtccgacgaagaatacagggaactctttgatctcgcgctgcggggcctccaactactgagtaaatggagtgctcacgtcatggaggtctattcctggaaactcgttcaccctactgataaattttgcaacaaagactgtcctggcaccgcagaagaatatgagagagccacacgttacaactacaccagtgaggaaaagtttgccttcgtggaagtgattgctatgattaaagggctccaggtactgatggggagaatggagagtgtgttcaatcaggccattcgaaacactatatatgcagcacttcaggactttgcacaggtgaccctccgggagccccttaggcaagccgtaagaaaaaagaagaatgtgttgatttcagtactgcaggccatccgcaagaccatttgtgattgggagggcgggagggagccaccaaacgacccctgccttcgtggggaaaaggatcctaagggaggattcgacataaaagtgccacggagagccgttggaccaagtagtacccaggcctgtcagtggtcgcccagggccctgtttcaccctactggcgggacccaaggccgtcgtgggtgcaggagtttactgtatatggtaaggactatgctggagtccttgattgcggacaagtccggttcaaagaaaacactccgttcttctctcgacggaccaatcgtgttagccatcgaagactttcacaaacagagtttcttcttcacccatctgctcaacatcagcgaagctctccaacagtgttgtgaccttagccaactttggttcagggagttttttctcgagctcacaatgggaagacggatccagttcccaatcgaaatgtcaatgccttggatactcaccgatcacatattagaaaccaaggaaccttctatgatggaatacgtcttgtacccccttgacctctataatgatagcgcttattatgccctgacaaagtttaaaaaacagtttctgtatgacgagattgaggctgaggtaaacttgtgcttcgaccagttcgtgtataagctcgctgatcaaattttcgcgtattacaaagccatggccgggtcagtgctgctggataagaggttcagggcagagtgtaaaaactatggggtcatcattccttacccaccctcaaaccgctatgaaaccctactgaagcagcgccacgtgcagcttctaggtcgctccattgaccttaaccggctaatcacccagaggatctcagcagcaatgtacaaatcccttgaccaggccatctctaggttcgaatccgaggacttgaccagtatagtggaactcgagtggttgcttgaaattaacaggcttactcaccgcctgctgtgcaagcacatgacgctcgattcattcgatgctatgtttagagaagccaatcataatgtgtctgccccatatggccggattactctgcacgtcttctgggagctgaattttgacttcctcccaaattattgttacaatgggtcaactaaccgattcgttagaactgctatccccttcacacaagagccgcagcgggacaagcctgccaacgttcagccatactacctctacggatctaaaccacttaacatcgcatactctcatatttattcgagttatagaaatttcgtgggcccccctcacttcaaaaccatatgtagacttcttggataccaggggatcgcagtagtcatggaagaactcttgaagatcgtcaagagcctgctgcagggaacaatcctccagtatgtgaaaaccctcatcgaagtcatgccaaaaatatgcagattgcctcgacacgagtatggttcaccggggatcttggaattcttccaccatcagctgaaagatatcatcgaatatgcggagctgaagactgacgtctttcagtcactgcgcgaagtgggaaatgccatcctgttttgtttactgatcgagcaggctctaagccaggaagaggtttgtgatctactgcatgctgcaccattccagaacattcttcccagggtatatattaaagagggggagaggctggaagtgcgcatgaagaggctcgaggccaagtatgctcccctccacttggtaccccttatcgagcgactcggcacgccacagcaaatcgcaatcgctagggagggtgatttactcactaaggagcggctttgttgtggcctgagcatgtttgaggtaatcctcacccgtatccgcagctatctgcaggaccctatttggcgtggcccgcctcctactaatggcgtgatgcatgttgatgagtgtgtagagtttcacaggttgtggagtgcaatgcaatttgtctactgcataccagttggtaccaatgagttcacagctgagcaatgcttcggcgatggactgaactgggccgggtgttctatcattgtgctgctcggtcagcaacggcgatttgacctgttcgacttttgctaccaccttctgaaagtccaacgccaggatgggaaggacgagatcataaaaaatgtcccgctgaaaaagatggccgatcgcatacggaagtaccaaatcttaaataatgaggtctttgctattttgaataagtacatgaaatccgtggagacagattcgtccactgtggaacatgtgcgttgctttcaaccaccaatccaccaatccctcgcaaccacgtgctag

SEQ ID NO: 109926 - DNA, 2859 bp, Artificial Sequence
  derived and/or modified sequence
gagaagcggcggcggtggacctgcacccagagcagcatcagcccccaatacaacatctgcgagcagatggtgcagattcgggacgaccatatcagattcatctccgaactggccaggtattccaatagcgaggtggtgaccggcagcgggttagacagccagaagagcgatgaagaatatagggaactttttgacctagccctgaggggactgcagttgttatcgaaatggagtgcgcatgtaatggaagtctactcctggaagctggttcatcctacagataaattctgtaataaggattgtcccggcactgctgaagagtacgaacgagcaactaggtataactacacatctgaggagaagtttgcctttgtggaagtgattgcaatgattaaagggttgcaggttctgatgggcagaatggagtccgtcttcaaccaggctattagaaataccatctatgccgcgctccaagacttcgctcaggttacactccgggagccccttaggcaggccgtgcggaaaaagaaaaatgtgctgatcagcgtgctccaagctatacgtaaaaccatttgcgactgggagggggggcgtgaaccccctaacgacccttgtctgcgtggggaaaaagacccaaaaggcggcttcgacattaaagtccctcgccgggctgtaggcccaagctccacacaggcctgccaatggagtcctagagcgctattccatcctactggcggtacacaggggcgacgcggatgtcgctccctcctttacatggtgcgtacaatgcttgaaagcctcatcgccgataagagcggatctaagaagacactccggagcagcctggacggacctatcgttctcgcaatcgaagactttcataagcagagctttttcttcactcacttgctgaacatctccgaggcgctgcagcagtgttgcgatttatcgcagctgtggtttagagaattctttctggaattaacaatggggagacgtattcagtttcctattgaaatgagcatgccctggatcctgacggatcacatcctggaaactaaagagccctccatgatggaatacgtgttatatccactcgatttatataatgatagtgcatactacgccctgacaaagttcaaaaagcaattcctctacgatgagatcgaggcagaggtgaatctctgctttgatcagtttgtgtataagttggcggatcagatttttgcctattataaggccatggccggaagtgtgctactagacaagaggtttcgcgcagagtgcaagaattacggagttattattccctatccacccagcaacagatacgagactctactcaagcagagacatgttcagctgctagggcgcagcatagaccttaaccggcttataactcagcgcatatcggccgcaatgtacaaatcactcgatcaagccattagcagattcgaatccgaagacctgaccagtattgtggaactcgaatggttgctggaaattaacagactgactcacagactgctgtgtaaacacatgaccctggactctttcgacgccatgtttagagaggccaaccacaacgtgtcagccccctatggaagaatcacgcttcacgtattttgggaactcaactttgactttctcccgaattactgctacaacgggtcgaccaacagattcgtgagaactgcaatcccctttactcaggagccacaacgggacaaaccagcaaatgtgcagccctactacctgtatggttccaaaccactcaacattgcatactcccacatctatagttcgtatcggaacttcgtgggccctccacactttaaaactatttgtcgactcctggggtaccagggcattgccgtggtcatggaggaattgttgaagattgtgaagagtttgctgcaaggcacaatcctgcagtacgtgaagacgttaatcgaagttatgcccaaaatttgtcgtctcccccgacacgagtacggctctccggggatcctcgagtttttccaccaccagctgaaggacataatcgaatatgctgaattaaaaaccgatgtttttcagagcctgcgcgaagtcgggaatgcaatcctcttctgcctcctgatcgagcaggcattatctcaagaggaagtttgtgacttgttacatgctgcccctttccagaatatactgcccagggtttacatcaaagaaggagagcggctggaggtgcgtatgaagcgactcgaggcaaagtatgcccctctgcatttggtcccactaatcgagagacttggtacaccccaacagatagccatcgcccgcgagggtgatttgttgactaaggaacgcctttgttgcggacttagcatgtttgaagtcatccttacccggatccgctcatatttgcaagatccgatttggcgggggccaccgcctactaacggagtgatgcacgtcgatgaatgcgttgaatttcaccggctgtggtcagctatgcaattcgtttactgcatcccggttggcacaaatgagttcacggcagagcagtgcttcggggacgggctcaattgggcaggctgctcaatcattgttctgttgggacagcagagaagatttgatctgttcgacttttgttatcatttgttaaaagtccagcgccaggacgggaaggacgagatcatcaagaatgtgccattaaaaaagatggccgacagaattcgcaaatatcagatcttaaacaacgaggtgttcgccattctgaacaaatatatgaagagtgttgaaacagatagcagtactgtcgagcatgtgcgttgtttccaacctcccatacaccagagtctggccacaacgtgctag

SEQ ID NO: 109927 - DNA, 3837 bp, Artificial Sequence
  derived and/or modified sequence
atgacgacccacgttactctcgaagatgcccttagtaatgtggacctgcttgaggagcttcccttgcccgatcagcaaccctgcatcgaaccgcctcccagttctattatgtatcaggcaaactttgatacgaattttgaagataggaatgcttttgtcactggaattgctcggtacatcgaacaggctacagtgcattcaagcatgaacgagatgttagaggaaggacacgagtatgccgttatgctctatacctggagaagctgctccagggcgattccacgcgtcaagtgcaatgagcagcccaaccgcgtagagatttacgagaagactgtggaggtcctagaacccgaggtaaccaaactgatgaagttcatgtattttcaaagaaaagcgatagaacggttctgttccgaggtgaagagactgtgccacgccgaaaggcgcaaggactttgtgtcagaagcttatctgctcaccttggggaagttcatcaacatgtttgcagttctggatgagctgaaaaatatgaaatgttcagtgaagaatgaccatagcgcctataagcgggctgcacagttcctcagaaaaatggctgacccccagagtattcaggaaagccagaatctctcaatgttcctggctaatcataaccgcattactcaatgcctgcatcagcagctggaagtcatacccggatatgaggaacttctagccgatatcgtgaatatttgcgtcgattattacgagaataaaatgtatttgacacctagcgagaaacacatgctgctgaaagtgatggggttcggcttatatctgatggacgggaatgtcagcaatatctataaactagacgccaagaaaagaatcaatctatcaaaaattgataaatttttcaagcagctgcaggtagtgccactgtttggtgacatgcagattgaactggccagatatattaaaacatctgctcattacgaggaaaataagtccaaatggacatgcacacagtcctcaatcagccctcagtacaacatatgtgagcaaatggtgcagatcagagatgatcatattcgctttatcagcgaactggcccgatactcgaactccgaggtagttacggggagcggactcgattcacagaaatccgacgaggagtaccgcgagctattcgacttagcccttcggggtcttcagttgttatctaaatggtcggctcacgtgatggaagtttattcctggaagctggtgcaccccacagacaagttttgcaacaaggattgcccaggcaccgccgaggagtacgagcgtgccacaagatataattatacctccgaggagaaattcgcattcgtcgaggtgattgccatgataaaaggccttcaagtgctcatgggaagaatggaatccgtgttcaatcaggcaatacgcaacaccatttatgcggctttgcaagactttgcccaggttactctgagagaacctctgagacaggctgtgcgcaaaaaaaagaacgtgctaatctcagttctccaggcgatacggaagacaatttgcgattgggagggcggacgtgaacccccaaacgacccgtgtcttcgaggcgagaaagatcccaagggaggttttgacatcaaggtccctcgcagagctgttggaccatctagtacacaggcctgccaatggtcccccagagcgctgttccacccaacaggcggtacacaagggcgtcgagggtgccgctcgctcttatacatggttcgcaccatgttagaatccttaattgcagacaagagcggaagcaagaagactctgcgcagttcacttgacggacctatagtgcttgctatagaggatttccataagcagtctttttttttcactcatttactaaatatctccgaagctctgcagcagtgctgtgatctgagccaattatggttccgcgagtttttcctggagctcaccatgggtcggaggatccagtttccgatagagatgtccatgccttggatactgaccgatcatattttagaaacaaaggagccctcgatgatggagtacgtactgtacccactggacctttacaatgatagcgcatattatgcgctgaccaagttcaaaaagcagttcctctatgacgagattgaagccgaagtcaacctctgttttgatcagtttgtgtacaagctggctgaccagatttttgcatactacaaagctatggccggaagtgtcctactggacaaacgcttcagggccgagtgcaagaactatggcgttataataccttacccgccatctaataggtacgaaacgctgctgaagcagcggcacgtgcagctcttgggcagatccatcgatttgaacaggctaataacacagcgtatctccgctgccatgtacaaatccctggaccaggccatctctaggttcgagagtgaggaccttacttccattgtcgagttagagtggcttctcgaaatcaacagacttacccaccggcttttgtgcaagcatatgactctggattcttttgatgccatgtttcgggaagctaaccacaacgtctcagccccttatggacgaatcacgttgcacgttttctgggagcttaactttgattttctacctaactattgttacaatggatcgacaaacagattcgtgagaactgctatcccattcacacaggaaccccaacgtgataagcccgctaacgtgcagccctattatttgtacggcagcaaaccactgaatattgcctacagccatatatattccagctaccgcaacttcgtgggccctcctcattttaagactatctgcaggttattaggctatcagggcatcgccgtggtgatggaagagttgctgaaaatcgtaaaatcattattgcagggcactatcctgcaatatgtaaaaacactcatcgaggttatgccaaagatctgccgattgcctcgccatgaatatgggagcccagggatccttgagttcttccaccaccagctaaaagatattatcgagtatgctgaacttaagaccgatgttttccaatcactgcgtgaggttggaaatgcgatcctcttttgcttgttaatagaacaggctttaagtcaagaagaagtgtgtgatttgttgcacgcggctccattccagaatatcctacctagagtctacatcaaggagggggaacgactggaagttagaatgaagcgactggaagctaagtacgccccactgcatctggtgccactcattgaacgacttggaacgccccagcagattgctattgcgcgagaaggcgaccttcttacaaaggagagactttgttgcggtctgtctatgttcgaagtcattctcacccgaattcggtcttacttacaggatccaatctggagggggcctccacccactaatggcgtcatgcatgtggacgagtgtgtggagtttcatcggctgtggtcagctatgcagttcgtgtactgtattcccgtgggcaccaacgaatttaccgcagaacagtgttttggggacggcctgaactgggccggttgttctataattgtcttacttgggcagcagaggagattcgacctgttcgacttttgctaccacttgctgaaagtgcagaggcaggatggcaaggatgagataatcaagaacgtccctctgaagaagatggcagaccggatcaggaagtatcagatactgaataatgaagtatttgcgatccttaacaagtacatgaagtctgtcgaaaccgatagctctacggtggagcatgtccggtgcttccagccgcctattcatcagagtctcgcaacaacatgttag

SEQ ID NO: 109928 - DNA, 2859 bp, Artificial Sequence
  derived and/or modified sequence
gagaaaagaaggcgatggacctgcacccaatcttctatctctccccagtacaatatctgcgagcagatggtgcaaatccgggacgatcacatcaggttcattagcgagttggctagatattccaactctgaggtcgtcacaggctctgggctcgactcacagaagagcgatgaagagtacagggaacttttcgacctcgccctcagaggtctgcagctactgtctaagtggagcgctcacgtgatggaagtgtatagctggaagctagtgcatccgactgacaaattctgtaacaaggattgtcccggaaccgccgaagagtatgagcgagcaacgagatataactatacgtccgaagagaagtttgccttcgttgaggtgattgccatgattaagggccttcaagtgctgatggggcgtatggagtcagtatttaatcaagcgattcgcaacactatctacgcggctctgcaggattttgcccaagtaaccttgagagagcctctgagacaggccgtgcgcaaaaaaaaaaacgtccttatctccgtactccaggccatcagaaaaacgatctgcgattgggaagggggacgtgagccaccaaatgatccatgtctgagaggagaaaaagaccccaagggcggatttgacatcaaagtgcccaggcgggctgttggtccaagttcaacccaggcttgtcagtggagccccagggccctcttccacccaacaggtggtacccaaggcagaagggggtgccgctccctgttgtatatggtccgaaccatgctggagtcactcatcgctgacaaatctggaagcaagaagacgcttaggagcagccttgatgggccaatcgtccttgctattgaggacttccacaagcagtcattttttttcacccacttgctaaatatctctgaagccttgcagcaatgctgtgatctctctcagctgtggtttcgggagttctttctggagctgaccatggggagacgcattcaatttccaattgagatgagtatgccttggatactgacggaccacattttagagacaaaagaaccaagtatgatggagtacgtgctctacccattggatttgtacaacgactccgcgtattatgctctgactaagtttaaaaagcagttcctatacgatgagatcgaagcagaggtgaacctctgctttgatcaattcgtttataaattggccgatcagatcttcgcatactacaaagccatggcgggaagcgttctcctggataagagattcagggccgagtgtaaaaattatggagtcataatcccctaccctccatccaataggtatgaaactcttctgaagcaaaggcacgtccagttgctggggcgtagcattgacctgaaccggctgataacccagcgaatctcagcagcaatgtataagtctttagatcaagcaatctcgcgattcgagagcgaggatctcacgtccatcgtcgaactggagtggcttctcgaaatcaaccgactcactcatagactgctctgtaaacacatgaccctggacagctttgatgctatgttccgtgaggccaaccacaatgtgtctgctccctatgggaggattactttacatgttttttgggaactcaactttgacttcctgcctaattactgctacaatggcagtactaatcggtttgtgagaactgccatacctttcactcaggaaccccagagggacaagcctgctaatgtgcaaccttactacctgtatgggagcaagccactcaacatcgcctactcacacatttattcctcttatagaaatttcgtgggaccccctcactttaagacaatatgtcggctgctaggataccagggtatcgctgtggtcatggaggagttgttaaaaatagtcaaatctctgctgcagggtaccatcttgcagtatgtgaaaaccctgatcgaagtgatgcccaagatctgccgattgccaagacacgagtatgggagtccaggcattcttgagttcttccaccaccagctgaaggacatcatcgagtatgcagagttgaaaacagacgtcttccagagtctgagggaagtggggaacgcaatccttttctgtctgctgatagaacaggctctgagccaggaggaggtttgcgatctgcttcatgcagctcctttccaaaacatcctgcccagggtctacatcaaagagggcgagaggctggaagtcaggatgaaacgcctcgaagcaaagtacgctcccctgcacctggtacccctgatcgagaggcttggaaccccccagcagatagctatcgcccgtgagggcgacttattgactaaagaaagattatgctgtgggctatcaatgttcgaggtcatcctcaccagaatccgtagttacctgcaagacccaatttggcgcggacctccccctacaaatggggtgatgcatgtagacgagtgtgtagaatttcacaggctttggtcagcaatgcaattcgtatactgcatcccagttggcaccaatgagtttactgccgagcagtgcttcggcgacggactcaactgggcagggtgcagcattatcgtcctgctgggacagcagagaagattcgatctgtttgacttctgctaccacctgctgaaggtccaaaggcaggatggaaaagacgagattattaagaatgtgcccctgaaaaagatggctgaccgcatcagaaagtatcagattctgaacaacgaagtcttcgccatcctgaataagtacatgaagtctgtcgaaactgatagcagcaccgtcgagcacgtgagatgtttccagccgcctatccaccagtctttggctacaacttgttag

SEQ ID NO: 109929 - DNA, 6573 bp, Artificial Sequence
  derived and/or modified sequence
cggggccggggcggggccgagcgcggcgcagcggagcggggcagagcatcctgcgccccggcgcggggccctgcggtagcctcaggcccctcccctggacccgccgcagagccagtgcagaatacagaaactgcagccatgaccacgcacgtcaccctggaagatgccctgtccaacgtggacctgcttgaagagcttcccctccccgaccagcagccatgcatcgagcctccaccttcctccatcatgtaccaggctaactttgacacaaactttgaggacaggaatgcatttgtcacgggcattgcaaggtacattgagcaggctacagtccactccagcatgaatgagatgctggaggaaggacatgagtatgcggtcatgctgtacacctggcgcagctgttcccgggccattcccagggtgaaatgcaacgagcagcccaaccgagtagagatctatgagaagacagtagaggtgctggagccggaggtcaccaagctcatgaagttcatgtattttcagcgcaaggccatcgagcggttctgcagcgaggtgaagcggctgtgccatgccgagcgcaggaaggactttgtctctgaggcctacctcctgacccttggcaagttcatcaacatgtttgctgtcctggatgagctaaagaacatgaagtgcagcgtcaagaatgaccactctgcctacaagagggcagcacagttcctgcggaagatggcagatccccagtctatccaggagtcgcagaacctttccatgttcctggccaaccacaacaggatcacccagtgtctccaccagcaacttgaagtgatcccaggctatgaggagctgctggctgacattgtcaacatctgtgtggattactacgagaacaagatgtacctgactcccagtgagaaacatatgctcctcaaggtgatgggctttggcctctacctaatggatggaaatgtcagtaacatttacaaactggatgccaagaagagaattaatcttagcaaaattgataaattctttaagcagctgcaggtggtgccccttttcggcgacatgcagatagagctggccagatacattaagaccagtgctcactatgaagagaacaagtccaagtggacgtgcacccagagcagcatcagcccccagtacaatatctgcgagcagatggttcagatccgggatgaccacatccgcttcatctccgagctcgctcgctacagcaacagtgaggtggtgacgggctcagggctggacagccagaagtcagacgaggagtatcgcgagctcttcgacctagccctgcggggtctgcagcttctatccaagtggagcgcccacgtcatggaggtgtactcttggaagctggttcatcccacagacaagttctgcaacaaggactgtcctggcaccgcggaggaatatgagagagccacacgctacaattacaccagtgaggaaaaatttgccttcgttgaggtgatcgccatgatcaaaggcctgcaggtgctcatgggcaggatggagagcgtcttcaaccaggccatcaggaacaccatctacgcggcattgcaggacttcgcccaggtgacgctgcgtgagcccctgcggcaggcggtacggaagaagaagaatgtcctcatcagcgtcctacaggcaattcgaaagaccatctgtgactgggagggagggcgagagccccctaatgacccatgcttgagaggggagaaggaccccaaaggtggatttgatatcaaggtgccccggcgtgctgtggggccatccagcacacaggcctgccagtggtccccgagggctttgtttcaccccactggtggcacacagggccgaagaggctgccgatccctgctgtacatggtgcggaccatgcttgaatcactcattgcagacaaaagcggctccaagaagaccctgaggagcagcctggatggacccattgtcctcgccatagaggactttcacaaacagtccttcttcttcacacatctgctcaacatcagtgaagccctgcagcagtgttgtgacctctcccagctctggttccgagaattcttcctggagttaaccatgggccgacgaatccagttccccatcgagatgtccatgccctggattctaacggaccatatcctggaaaccaaagaaccttccatgatggagtatgtcctctaccctctggatctgtacaacgacagcgcctactatgctctgaccaagtttaaaaagcagttcctgtacgatgagatagaagctgaggtgaacctgtgttttgatcagtttgtctacaagctggcagaccagatctttgcttactacaaagccatggctggcagtgtcctgttggataaacgttttcgagctgagtgtaagaattatggcgtcatcattccgtatccaccgtccaatcgctatgaaacactgctgaagcagagacacgtccagctgttgggtagatcaattgacttgaacagactcattacccagcgcatctctgccgccatgtataaatccttggaccaagctatcagccgctttgagagtgaggacctgacctccattgtggagctggagtggctgctggagattaaccggctcacgcatcggctgctctgtaagcatatgacgctggacagcttcgatgccatgttccgagaggccaatcacaatgtgtccgccccctatggccgtatcaccctgcatgtcttctgggaactgaactttgactttctccccaactactgctacaatgggtccactaaccgttttgtgcggactgccattcctttcacccaagaaccacaacgagacaaacctgccaacgtccagccttattacctctatggatccaagcctctcaacattgcctacagccacatctacagctcctacaggaatttcgtggggccacctcatttcaagactatctgcagactcctgggttatcagggcatcgctgtggtcatggaggaactgctaaagattgtgaagagcttgctccaaggaaccattctccagtatgtgaaaacactgatagaggtgatgcccaagatatgccgcttgccccgacatgagtatggctccccagggatcctggagttcttccaccaccagctgaaggacatcattgagtacgcagagctcaaaacagacgtgttccagagcctgagggaagtgggcaatgccatcctcttctgcctcctcatagagcaagctctgtctcaggaggaggtctgcgatttgctccatgccgcacccttccaaaacatcttgcctagagtctacatcaaagagggggagcgcctggaggtccggatgaaacgtctggaagccaagtatgccccgctccacctggtccctctgatcgagcggctggggacccctcagcaaatcgccattgctcgcgagggtgacctcctgaccaaggagcggctgtgctgtggcctgtccatgttcgaggtcatcctgacccgcattcggagctacctgcaggaccccatctggcggggcccaccgcccaccaatggcgtcatgcacgtcgatgagtgtgtggagttccaccggctgtggagcgccatgcagttcgtgtactgcatccctgtgggaaccaacgagttcacagctgagcagtgtttcggcgatggcttgaactgggctggttgctccatcattgtcctgctgggccagcagcgtcgctttgacctgttcgacttctgttaccacctgctaaaagtgcagaggcaggacgggaaggatgaaatcattaagaatgtgcccctgaagaagatggccgaccggatcaggaagtatcagatcttgaacaatgaggtttttgccatcctgaacaaatacatgaagtccgtggagacagacagttccactgtggagcatgtgcgctgcttccagccacccatccaccagtccttggccaccacttgctaagcagaagatcctgcagacccttatctggaggaggaagagaagcaggagagagaaagccacagccagcctgccataggatccaactggacaacgtgtgggatggacctggaaacaagcacctccccaaacacatcaccactccctagggcggggcctgtgcatgctctcccatgacatctccatgctggtttctccatagcataaatgaaaaaaaaaaaaaaaaagtaaacagggcagtgtgtgctttttcttttctcccccctcaactatattaagaactcctagtttcaccctttctccatcccatcatcccacctatctgtggttgcttcccaagacctcctcccaagatagacatctcctacccagtgcccttgtgtgaccccaggactcaagtctcagactgtgaacagatgtggccatgcccagagacgccagcctggccagaagggcatgcctcagcttactacttcatctctcctggttccctccctgcagtgccccgggtgtcatcttctcccactctgggtaccagggattctaccacataggcttcccaaagccccattctaactcccctctctcagggaagccctagagagaggtccaaaaagcattcacagctgtatcacactctatgcaggtggggtaggagactgatcaggcctgctgtggggaagcagtatgtatgaacacagccagaaatgtcatagtccaaacaggatgctttcaggccatctcagctgcttgatggtgagatggttcccttattccttcaggaaaggcttagcattgggccacataggggaagcagctttgaacaaatcagtcatagcactgcctatagcattagccagtgaccaaattagggacaacgtcttggcacagaattgcttatcaaggaacatttccacaagaaagaaaatattaaggggttatttccacagaagcccaaaacgtcttggaaacacagaggtgaggaggaggaatagtaattgtcaatgagcttttaataccaagatacaccccctgcccccaaagaagagtcctcttttagggaatcagaaccttcattgtcctagaagctgaaagattcttggaacattttagcttttactctcaacttgctgttctctttacattccttaagttagactttcgggtgtggcttctctcccaggggtaacatttacttccattttctagactgaaccaaaagtcttctgcagaatctcccaccgagtgtggtaagaaggaaggacaaaaggctttaggatataaatttcatgttacagagcatgtcattgtcaaaggaaatctgtggccctgagattttaagaacataaaatgtgacatttgatatttctccagcccagggaagtaagatggttagcaatggttgccttaatcaaatggtcccatttttaaccccaaaggaagtgcccacagcaagaggtttgtgtgatgcacttatgtcctccggtgaggaaagggggccacatatgaaaggccccttaggtcagatcctgagagtagcacatttgagtgcagattcctgggccccacctcaaacctactaattctgaatctctgggaatagggccaggaaatctgccctttctacaaactacccaagttgttctgttgcacatcaatgtttgggaaccactgctgtaagggaatcattctggtcaccttgagctttgagctaccactaagccatgaaagaaaatacatcatacagggaagagagaagggaggaggttccaagtagtaactggcagatcctcctgtctggaggtaccaccttctattctggtttctgacttttccttcttgatgaccatagatgtgttccagaggcaaaagagacacattatcccagatggcagaacatgctttcaaaacatataaaatgtcaaagttccagatccttctacatctttagtcctgtctgaggatggtagctggctctctgtagctgatagatggctagagttccatccaaatccttgaccacgacttcatggagatttgaataatctatttgatgagatttctatttcaataacccacctctctcaccccacattcatatccctaaatttgaccctctgggccgagtcacattaccttcaggagacttgatcccagtagactgaggtcttccctttcagcagaaagatttcatttccctggcttgccagtggcactgatttccgaacacccaatgagtttaatattctttcctccttggcattactgccccagcctctttttattttttttgtgtgtgtctaataaccaggaaaaaaataaagcttaggttttaaaaagttttaaaaataatctgtttcagaaactgtcaaatgtaccatatttgtattaagagttgttgggaatttttgtacaatgaatttacatttatttatggtgacatatttacgcttgtgatcaaataatgatgttaaattcttaaatcatatttgctatgcagctgaagatgatattttgatttgtattttgggggtacctgtgttgagttgataaacatttccatcttcattaaaactgcttccaaactagtaaaaccagcaa

SEQ ID NO: 109930 - DNA, 5457 bp, Artificial Sequence
  derived and/or modified sequence
gaaaaaaggcggaggtggacgtgcacccagagcagcatcagcccccagtacaatatctgcgagcagatggttcagatccgggatgaccacatccgcttcatctccgagctcgctcgctacagcaacagtgaggtggtgacgggctcagggctggacagccagaagtcagacgaggagtatcgcgagctcttcgacctagccctgcggggtctgcagcttctatccaagtggagcgcccacgtcatggaggtgtactcttggaagctggttcatcccacagacaagttctgcaacaaggactgtcctggcaccgcggaggaatatgagagagccacacgctacaattacaccagtgaggaaaaatttgccttcgttgaggtgatcgccatgatcaaaggcctgcaggtgctcatgggcaggatggagagcgtcttcaaccaggccatcaggaacaccatctacgcggcattgcaggacttcgcccaggtgacgctgcgtgagcccctgcggcaggcggtacggaagaagaagaatgtcctcatcagcgtcctacaggcaattcgaaagaccatctgtgactgggagggagggcgagagccccctaatgacccatgcttgagaggggagaaggaccccaaaggtggatttgatatcaaggtgccccggcgtgctgtggggccatccagcacacaggcctgccagtggtccccgagggctttgtttcaccccactggtggcacacagggccgaagaggctgccgatccctgctgtacatggtgcggaccatgcttgaatcactcattgcagacaaaagcggctccaagaagaccctgaggagcagcctggatggacccattgtcctcgccatagaggactttcacaaacagtccttcttcttcacacatctgctcaacatcagtgaagccctgcagcagtgttgtgacctctcccagctctggttccgagaattcttcctggagttaaccatgggccgacgaatccagttccccatcgagatgtccatgccctggattctaacggaccatatcctggaaaccaaagaaccttccatgatggagtatgtcctctaccctctggatctgtacaacgacagcgcctactatgctctgaccaagtttaaaaagcagttcctgtacgatgagatagaagctgaggtgaacctgtgttttgatcagtttgtctacaagctggcagaccagatctttgcttactacaaagccatggctggcagtgtcctgttggataaacgttttcgagctgagtgtaagaattatggcgtcatcattccgtatccaccgtccaatcgctatgaaacactgctgaagcagagacacgtccagctgttgggtagatcaattgacttgaacagactcattacccagcgcatctctgccgccatgtataaatccttggaccaagctatcagccgctttgagagtgaggacctgacctccattgtggagctggagtggctgctggagattaaccggctcacgcatcggctgctctgtaagcatatgacgctggacagcttcgatgccatgttccgagaggccaatcacaatgtgtccgccccctatggccgtatcaccctgcatgtcttctgggaactgaactttgactttctccccaactactgctacaatgggtccactaaccgttttgtgcggactgccattcctttcacccaagaaccacaacgagacaaacctgccaacgtccagccttattacctctatggatccaagcctctcaacattgcctacagccacatctacagctcctacaggaatttcgtggggccacctcatttcaagactatctgcagactcctgggttatcagggcatcgctgtggtcatggaggaactgctaaagattgtgaagagcttgctccaaggaaccattctccagtatgtgaaaacactgatagaggtgatgcccaagatatgccgcttgccccgacatgagtatggctccccagggatcctggagttcttccaccaccagctgaaggacatcattgagtacgcagagctcaaaacagacgtgttccagagcctgagggaagtgggcaatgccatcctcttctgcctcctcatagagcaagctctgtctcaggaggaggtctgcgatttgctccatgccgcacccttccaaaacatcttgcctagagtctacatcaaagagggggagcgcctggaggtccggatgaaacgtctggaagccaagtatgccccgctccacctggtccctctgatcgagcggctggggacccctcagcaaatcgccattgctcgcgagggtgacctcctgaccaaggagcggctgtgctgtggcctgtccatgttcgaggtcatcctgacccgcattcggagctacctgcaggaccccatctggcggggcccaccgcccaccaatggcgtcatgcacgtcgatgagtgtgtggagttccaccggctgtggagcgccatgcagttcgtgtactgcatccctgtgggaaccaacgagttcacagctgagcagtgtttcggcgatggcttgaactgggctggttgctccatcattgtcctgctgggccagcagcgtcgctttgacctgttcgacttctgttaccacctgctaaaagtgcagaggcaggacgggaaggatgaaatcattaagaatgtgcccctgaagaagatggccgaccggatcaggaagtatcagatcttgaacaatgaggtttttgccatcctgaacaaatacatgaagtccgtggagacagacagttccactgtggagcatgtgcgctgcttccagccacccatccaccagtccttggccaccacttgctaagcagaagatcctgcagacccttatctggaggaggaagagaagcaggagagagaaagccacagccagcctgccataggatccaactggacaacgtgtgggatggacctggaaacaagcacctccccaaacacatcaccactccctagggcggggcctgtgcatgctctcccatgacatctccatgctggtttctccatagcataaatgaaaaaaaaaaaaaaaaagtaaacagggcagtgtgtgctttttcttttctcccccctcaactatattaagaactcctagtttcaccctttctccatcccatcatcccacctatctgtggttgcttcccaagacctcctcccaagatagacatctcctacccagtgcccttgtgtgaccccaggactcaagtctcagactgtgaacagatgtggccatgcccagagacgccagcctggccagaagggcatgcctcagcttactacttcatctctcctggttccctccctgcagtgccccgggtgtcatcttctcccactctgggtaccagggattctaccacataggcttcccaaagccccattctaactcccctctctcagggaagccctagagagaggtccaaaaagcattcacagctgtatcacactctatgcaggtggggtaggagactgatcaggcctgctgtggggaagcagtatgtatgaacacagccagaaatgtcatagtccaaacaggatgctttcaggccatctcagctgcttgatggtgagatggttcccttattccttcaggaaaggcttagcattgggccacataggggaagcagctttgaacaaatcagtcatagcactgcctatagcattagccagtgaccaaattagggacaacgtcttggcacagaattgcttatcaaggaacatttccacaagaaagaaaatattaaggggttatttccacagaagcccaaaacgtcttggaaacacagaggtgaggaggaggaatagtaattgtcaatgagcttttaataccaagatacaccccctgcccccaaagaagagtcctcttttagggaatcagaaccttcattgtcctagaagctgaaagattcttggaacattttagcttttactctcaacttgctgttctctttacattccttaagttagactttcgggtgtggcttctctcccaggggtaacatttacttccattttctagactgaaccaaaagtcttctgcagaatctcccaccgagtgtggtaagaaggaaggacaaaaggctttaggatataaatttcatgttacagagcatgtcattgtcaaaggaaatctgtggccctgagattttaagaacataaaatgtgacatttgatatttctccagcccagggaagtaagatggttagcaatggttgccttaatcaaatggtcccatttttaaccccaaaggaagtgcccacagcaagaggtttgtgtgatgcacttatgtcctccggtgaggaaagggggccacatatgaaaggccccttaggtcagatcctgagagtagcacatttgagtgcagattcctgggccccacctcaaacctactaattctgaatctctgggaatagggccaggaaatctgccctttctacaaactacccaagttgttctgttgcacatcaatgtttgggaaccactgctgtaagggaatcattctggtcaccttgagctttgagctaccactaagccatgaaagaaaatacatcatacagggaagagagaagggaggaggttccaagtagtaactggcagatcctcctgtctggaggtaccaccttctattctggtttctgacttttccttcttgatgaccatagatgtgttccagaggcaaaagagacacattatcccagatggcagaacatgctttcaaaacatataaaatgtcaaagttccagatccttctacatctttagtcctgtctgaggatggtagctggctctctgtagctgatagatggctagagttccatccaaatccttgaccacgacttcatggagatttgaataatctatttgatgagatttctatttcaataacccacctctctcaccccacattcatatccctaaatttgaccctctgggccgagtcacattaccttcaggagacttgatcccagtagactgaggtcttccctttcagcagaaagatttcatttccctggcttgccagtggcactgatttccgaacacccaatgagtttaatattctttcctccttggcattactgccccagcctctttttattttttttgtgtgtgtctaataaccaggaaaaaaataaagcttaggttttaaaaagttttaaaaataatctgtttcagaaactgtcaaatgtaccatatttgtattaagagttgttgggaatttttgtacaatgaatttacatttatttatggtgacatatttacgcttgtgatcaaataatgatgttaaattcttaaatcatatttgctatgcagctgaagatgatattttgatttgtattttgggggtacctgtgttgagttgataaacatttccatcttcattaaaactgcttccaaactagtaaaaccagcaa

SEQ ID NO: 109931 - DNA, 3837 bp, Artificial Sequence
  derived and/or modified sequence
atgaccacccacgtgaccctggaggacgccctgagcaacgtggacctgctggaggagctgcccctgcccgaccagcagccctgcatcgagcccccccccagcagcatcatgtaccaggccaacttcgacaccaacttcgaggacagaaacgccttcgtgaccggcatcgccagatacatcgagcaggccaccgtgcacagcagcatgaacgagatgctggaggagggccacgagtacgccgtgatgctgtacacctggagaagctgcagcagagccatccccagagtgaagtgcaacgagcagcccaacagagtggagatctacgagaagaccgtggaggtgctggagcccgaggtgaccaagctgatgaagttcatgtacttccagagaaaggccatcgagagattctgcagcgaggtgaagagactgtgccacgccgagagaagaaaggacttcgtgagcgaggcctacctgctgaccctgggcaagttcatcaacatgttcgccgtgctggacgagctgaagaacatgaagtgcagcgtgaagaacgaccacagcgcctacaagagagccgcccagttcctgagaaagatggccgacccccagagcatccaggagagccagaacctgagcatgttcctggccaaccacaacagaatcacccagtgcctgcaccagcagctggaggtgatccccggctacgaggagctgctggccgacatcgtgaacatctgcgtggactactacgagaacaagatgtacctgacccccagcgagaagcacatgctgctgaaggtgatgggcttcggcctgtacctgatggacggcaacgtgagcaacatctacaagctggacgccaagaagagaatcaacctgagcaagatcgacaagttcttcaagcagctgcaggtggtgcccctgttcggcgacatgcagatcgagctggccagatacatcaagaccagcgcccactacgaggagaacaagagcaagtggacctgcacccagagcagcatcagcccccagtacaacatctgcgagcagatggtgcagatcagagacgaccacatcagattcatcagcgagctggccagatacagcaacagcgaggtggtgaccggcagcggcctggacagccagaagagcgacgaggagtacagagagctgttcgacctggccctgagaggcctgcagctgctgagcaagtggagcgcccacgtgatggaggtgtacagctggaagctggtgcaccccaccgacaagttctgcaacaaggactgccccggcaccgccgaggagtacgagagagccaccagatacaactacaccagcgaggagaagttcgccttcgtggaggtgatcgccatgatcaagggcctgcaggtgctgatgggcagaatggagagcgtgttcaaccaggccatcagaaacaccatctacgccgccctgcaggacttcgcccaggtgaccctgagagagcccctgagacaggccgtgagaaagaagaagaacgtgctgatcagcgtgctgcaggccatcagaaagaccatctgcgactgggagggcggcagagagccccccaacgacccctgcctgagaggcgagaaggaccccaagggcggcttcgacatcaaggtgcccagaagagccgtgggccccagcagcacccaggcctgccagtggagccccagagccctgttccaccccaccggcggcacccagggcagaagaggctgcagaagcctgctgtacatggtgagaaccatgctggagagcctgatcgccgacaagagcggcagcaagaagaccctgagaagcagcctggacggccccatcgtgctggccatcgaggacttccacaagcagagcttcttcttcacccacctgctgaacatcagcgaggccctgcagcagtgctgcgacctgagccagctgtggttcagagagttcttcctggagctgaccatgggcagaagaatccagttccccatcgagatgagcatgccctggatcctgaccgaccacatcctggagaccaaggagcccagcatgatggagtacgtgctgtaccccctggacctgtacaacgacagcgcctactacgccctgaccaagttcaagaagcagttcctgtacgacgagatcgaggccgaggtgaacctgtgcttcgaccagttcgtgtacaagctggccgaccagatcttcgcctactacaaggccatggccggcagcgtgctgctggacaagagattcagagccgagtgcaagaactacggcgtgatcatcccctacccccccagcaacagatacgagaccctgctgaagcagagacacgtgcagctgctgggcagaagcatcgacctgaacagactgatcacccagagaatcagcgccgccatgtacaagagcctggaccaggccatcagcagattcgagagcgaggacctgaccagcatcgtggagctggagtggctgctggagatcaacagactgacccacagactgctgtgcaagcacatgaccctggacagcttcgacgccatgttcagagaggccaaccacaacgtgagcgccccctacggcagaatcaccctgcacgtgttctgggagctgaacttcgacttcctgcccaactactgctacaacggcagcaccaacagattcgtgagaaccgccatccccttcacccaggagccccagagagacaagcccgccaacgtgcagccctactacctgtacggcagcaagcccctgaacatcgcctacagccacatctacagcagctacagaaacttcgtgggccccccccacttcaagaccatctgcagactgctgggctaccagggcatcgccgtggtgatggaggagctgctgaagatcgtgaagagcctgctgcagggcaccatcctgcagtacgtgaagaccctgatcgaggtgatgcccaagatctgcagactgcccagacacgagtacggcagccccggcatcctggagttcttccaccaccagctgaaggacatcatcgagtacgccgagctgaagaccgacgtgttccagagcctgagagaggtgggcaacgccatcctgttctgcctgctgatcgagcaggccctgagccaggaggaggtgtgcgacctgctgcacgccgcccccttccagaacatcctgcccagagtgtacatcaaggagggcgagagactggaggtgagaatgaagagactggaggccaagtacgcccccctgcacctggtgcccctgatcgagagactgggcaccccccagcagatcgccatcgccagagagggcgacctgctgaccaaggagagactgtgctgcggcctgagcatgttcgaggtgatcctgaccagaatcagaagctacctgcaggaccccatctggagaggccccccccccaccaacggcgtgatgcacgtggacgagtgcgtggagttccacagactgtggagcgccatgcagttcgtgtactgcatccccgtgggcaccaacgagttcaccgccgagcagtgcttcggcgacggcctgaactgggccggctgcagcatcatcgtgctgctgggccagcagagaagattcgacctgttcgacttctgctaccacctgctgaaggtgcagagacaggacggcaaggacgagatcatcaagaacgtgcccctgaagaagatggccgacagaatcagaaagtaccagatcctgaacaacgaggtgttcgccatcctgaacaagtacatgaagagcgtggagaccgacagcagcaccgtggagcacgtgagatgcttccagccccccatccaccagagcctggccaccacctgctag

SEQ ID NO: 109932 - DNA, 2859 bp, Artificial Sequence
  derived and/or modified sequence
gagaagagaagaagatggacctgcacccagagcagcatcagcccccagtacaacatctgcgagcagatggtgcagatcagagacgaccacatcagattcatcagcgagctggccagatacagcaacagcgaggtggtgaccggcagcggcctggacagccagaagagcgacgaggagtacagagagctgttcgacctggccctgagaggcctgcagctgctgagcaagtggagcgcccacgtgatggaggtgtacagctggaagctggtgcaccccaccgacaagttctgcaacaaggactgccccggcaccgccgaggagtacgagagagccaccagatacaactacaccagcgaggagaagttcgccttcgtggaggtgatcgccatgatcaagggcctgcaggtgctgatgggcagaatggagagcgtgttcaaccaggccatcagaaacaccatctacgccgccctgcaggacttcgcccaggtgaccctgagagagcccctgagacaggccgtgagaaagaagaagaacgtgctgatcagcgtgctgcaggccatcagaaagaccatctgcgactgggagggcggcagagagccccccaacgacccctgcctgagaggcgagaaggaccccaagggcggcttcgacatcaaggtgcccagaagagccgtgggccccagcagcacccaggcctgccagtggagccccagagccctgttccaccccaccggcggcacccagggcagaagaggctgcagaagcctgctgtacatggtgagaaccatgctggagagcctgatcgccgacaagagcggcagcaagaagaccctgagaagcagcctggacggccccatcgtgctggccatcgaggacttccacaagcagagcttcttcttcacccacctgctgaacatcagcgaggccctgcagcagtgctgcgacctgagccagctgtggttcagagagttcttcctggagctgaccatgggcagaagaatccagttccccatcgagatgagcatgccctggatcctgaccgaccacatcctggagaccaaggagcccagcatgatggagtacgtgctgtaccccctggacctgtacaacgacagcgcctactacgccctgaccaagttcaagaagcagttcctgtacgacgagatcgaggccgaggtgaacctgtgcttcgaccagttcgtgtacaagctggccgaccagatcttcgcctactacaaggccatggccggcagcgtgctgctggacaagagattcagagccgagtgcaagaactacggcgtgatcatcccctacccccccagcaacagatacgagaccctgctgaagcagagacacgtgcagctgctgggcagaagcatcgacctgaacagactgatcacccagagaatcagcgccgccatgtacaagagcctggaccaggccatcagcagattcgagagcgaggacctgaccagcatcgtggagctggagtggctgctggagatcaacagactgacccacagactgctgtgcaagcacatgaccctggacagcttcgacgccatgttcagagaggccaaccacaacgtgagcgccccctacggcagaatcaccctgcacgtgttctgggagctgaacttcgacttcctgcccaactactgctacaacggcagcaccaacagattcgtgagaaccgccatccccttcacccaggagccccagagagacaagcccgccaacgtgcagccctactacctgtacggcagcaagcccctgaacatcgcctacagccacatctacagcagctacagaaacttcgtgggccccccccacttcaagaccatctgcagactgctgggctaccagggcatcgccgtggtgatggaggagctgctgaagatcgtgaagagcctgctgcagggcaccatcctgcagtacgtgaagaccctgatcgaggtgatgcccaagatctgcagactgcccagacacgagtacggcagccccggcatcctggagttcttccaccaccagctgaaggacatcatcgagtacgccgagctgaagaccgacgtgttccagagcctgagagaggtgggcaacgccatcctgttctgcctgctgatcgagcaggccctgagccaggaggaggtgtgcgacctgctgcacgccgcccccttccagaacatcctgcccagagtgtacatcaaggagggcgagagactggaggtgagaatgaagagactggaggccaagtacgcccccctgcacctggtgcccctgatcgagagactgggcaccccccagcagatcgccatcgccagagagggcgacctgctgaccaaggagagactgtgctgcggcctgagcatgttcgaggtgatcctgaccagaatcagaagctacctgcaggaccccatctggagaggccccccccccaccaacggcgtgatgcacgtggacgagtgcgtggagttccacagactgtggagcgccatgcagttcgtgtactgcatccccgtgggcaccaacgagttcaccgccgagcagtgcttcggcgacggcctgaactgggccggctgcagcatcatcgtgctgctgggccagcagagaagattcgacctgttcgacttctgctaccacctgctgaaggtgcagagacaggacggcaaggacgagatcatcaagaacgtgcccctgaagaagatggccgacagaatcagaaagtaccagatcctgaacaacgaggtgttcgccatcctgaacaagtacatgaagagcgtggagaccgacagcagcaccgtggagcacgtgagatgcttccagccccccatccaccagagcctggccaccacctgctag

SEQ ID NO: 109933 - protein, 495 aa, Artificial Sequence
  derived and/or modified sequence
MDIKNSPSSLNSPSSYNCSQSILPLEHGSIYIPSSYVDSHHEYPAMTFYSPAVMNYSIPSNVTNLEGGPGRQTTSPNVLWPTPGHLSPLVVHRQLSHLYAEPQKSPWCEARSLEHTLPVNRETLKRKVSGNRCASPVTGPGSKRDAHFCAVCSDYASGYHYGVWSCEGCKAFFKRSIQGHNDYICPATNQCTIDKNRRKSCQACRLRKCYEVGMVKCGSRRERCGYRLVRRQRSADEQLHCAGKAKRSGGHAPRVRELLLDALSPEQLVLTLLEAEPPHVLISRPSAPFTEASMMMSLTKLADKELVHMISWAKKIPGFVELSLFDQVRLLESCWMEVLMMGLMWRSIDHPGKLIFAPDLVLDRDEGKCVEGILEIFDMLLATTSRFRELKLQHKEYLCVKAMILLNSSMYPLVTATQDADSSRKLAHLLNAVTDALVWVIAKSGISSQQQSMRLANLLMLLSHVRHARAEKASQTLTSFGMKMETLLPEATMEQ

SEQ ID NO: 109934 - protein, 472 aa, Artificial Sequence
  derived and/or modified sequence
MDIKNSPSSLNSPSSYNCSQSILPLEHGSIYIPSSYVDSHHEYPAMTFYSPAVMNYSIPSNVTNLEGGPGRQTTSPNVLWPTPGHLSPLVVHRQLSHLYAEPQKSPWCEARSLEHTLPVNRETLKRKVSGNRCASPVTGPGSKRDAHFCAVCSDYASGYHYGVWSCEGCKAFFKRSIQGHNDYICPATNQCTIDKNRRKSCQACRLRKCYEVGMVKCGSRRERCGYRLVRRQRSADEQLHCAGKAKRSGGHAPRVRELLLDALSPEQLVLTLLEAEPPHVLISRPSAPFTEASMMMSLTKLADKELVHMISWAKKIPGFVELSLFDQVRLLESCWMEVLMMGLMWRSIDHPGKLIFAPDLVLDRDEGKCVEGILEIFDMLLATTSRFRELKLQHKEYLCVKAMILLNSSMYPLVTATQDADSSRKLAHLLNAVTDALVWVIAKSGISSQQQSMRLANLLMLLSHVRHARYAP

SEQ ID NO: 109935 - DNA, 1488 bp, Artificial Sequence
  derived and/or modified sequence
atggacatcaagaacagccccagcagcctgaacagccccagcagctacaactgcagccagagcatcctgcccctggagcacggcagcatctacatccccagcagctacgtggacagccaccacgagtaccccgccatgaccttctacagccccgccgtgatgaactacagcatccccagcaacgtgaccaacctggagggcggccccggcagacagaccaccagccccaacgtgctgtggcccacccccggccacctgagccccctggtggtgcacagacagctgagccacctgtacgccgagccccagaagagcccctggtgcgaggccagaagcctggagcacaccctgcccgtgaacagagagaccctgaagagaaaggtgagcggcaacagatgcgccagccccgtgaccggccccggcagcaagagagacgcccacttctgcgccgtgtgcagcgactacgccagcggctaccactacggcgtgtggagctgcgagggctgcaaggccttcttcaagagaagcatccagggccacaacgactacatctgccccgccaccaaccagtgcaccatcgacaagaacagaagaaagagctgccaggcctgcagactgagaaagtgctacgaggtgggcatggtgaagtgcggcagcagaagagagagatgcggctacagactggtgagaagacagagaagcgccgacgagcagctgcactgcgccggcaaggccaagagaagcggcggccacgcccccagagtgagagagctgctgctggacgccctgagccccgagcagctggtgctgaccctgctggaggccgagcccccccacgtgctgatcagcagacccagcgcccccttcaccgaggccagcatgatgatgagcctgaccaagctggccgacaaggagctggtgcacatgatcagctgggccaagaagatccccggcttcgtggagctgagcctgttcgaccaggtgagactgctggagagctgctggatggaggtgctgatgatgggcctgatgtggagaagcatcgaccaccccggcaagctgatcttcgcccccgacctggtgctggacagagacgagggcaagtgcgtggagggcatcctggagatcttcgacatgctgctggccaccaccagcagattcagagagctgaagctgcagcacaaggagtacctgtgcgtgaaggccatgatcctgctgaacagcagcatgtaccccctggtgaccgccacccaggacgccgacagcagcagaaagctggcccacctgctgaacgccgtgaccgacgccctggtgtgggtgatcgccaagagcggcatcagcagccagcagcagagcatgagactggccaacctgctgatgctgctgagccacgtgagacacgccagagccgagaaggccagccagaccctgaccagcttcggcatgaagatggagaccctgctgcccgaggccaccatggagcagtag

SEQ ID NO: 109936 - DNA, 1488 bp, Artificial Sequence
  derived and/or modified sequence
atggacatcaaaaattcccctagctcattgaactccccatcttcgtataactgctcccaatcgatccttccgctggagcatggatccatctatattccatctagctacgtggacagccatcacgagtatcctgctatgaccttttattcacctgcagtaatgaactatagcattccatccaatgtcactaacctcgaaggcggtcccggacgccagaccacaagccccaatgtcctgtggcccacccctggtcatttgagtcctcttgtagtgcatcgacagttgtcgcacttatatgccgaaccccaaaaatccccatggtgtgaggcccgcagtctagagcacacactgcccgtgaatagagagactctgaaacgaaaggtctcaggtaatagatgtgcgtctcccgttactggcccagggagcaagagggatgctcacttttgtgctgtctgttcagactatgcgtcagggtaccactacggagtgtggagctgcgagggctgcaaggcctttttcaagcggagtatacagggacacaatgattatatatgccccgccacaaaccagtgtacgattgacaagaacaggaggaagtcttgccaggcctgtagacttcgaaaatgttatgaggtggggatggtgaagtgcggaagccgcagggagcgctgcgggtatcgcctggtgcgacggcagagaagcgccgatgaacaattgcactgtgccgggaaggcaaagagatctgggggacatgcccctagagtgagagagcttcttctggatgcactgtcccccgagcagctcgtgctgaccctcctggaagcggaacccccgcacgtgctgattagtagaccatccgctccgtttacggaggctagcatgatgatgagcttgacaaaactcgccgacaaggaacttgtccatatgattagctgggctaagaagattcccggctttgttgagctatctctgtttgaccaggtgagattgctcgagtcgtgttggatggaagtgcttatgatgggtctgatgtggcgatcaatagaccatcctgggaaactcatctttgcaccggatctcgtcttggatcgcgacgagggcaaatgcgtggagggaattctggaaatctttgacatgctgctggctaccacttcgcgttttcgcgagcttaaactgcagcacaaggaatatctgtgcgtaaaagccatgatcctcctaaacagctcgatgtatcctctagtgacggctactcaggacgctgactcttcccggaaattagctcacttgcttaacgctgtcaccgatgccctcgtgtgggtcatagctaaatcaggaatctccagtcaacagcagagcatgagactcgccaatttactcatgctgctttctcatgtcagacacgcaagagctgagaaagctagtcagacgctcacatcgttcggaatgaagatggaaacacttctccccgaggccacgatggaacagtag

SEQ ID NO: 109937 - DNA, 1488 bp, Artificial Sequence
  derived and/or modified sequence
atggacatcaaaaactctccctcctccctcaactctccttctagctataattgctcacaatcaatcctacctcttgagcatggctctatctacatccctagctcctacgtggatagccatcacgaatatcccgccatgaccttttatagcccagccgttatgaattactcaatcccgtcaaacgtgacaaatcttgagggaggcccgggtaggcagactaccagtccaaacgtactgtggccgacgcctggacatctttcccctttggtggtgcaccgacagctaagtcacctgtacgctgaacctcaaaaaagcccttggtgcgaagccaggtcacttgagcacacccttccagttaaccgggagacactaaaacggaaagtgtcgggcaatcggtgtgccagtcctgttacagggcccggttccaagcgtgacgcccacttctgtgctgtctgttccgactacgcttcaggataccattatggcgtgtggtcttgcgaaggttgtaaggcgttttttaagcgctccatccaagggcacaacgattatatctgtcctgctacaaaccagtgtaccatcgataaaaatcgaaggaaatcctgccaggcctgccggctgcgcaagtgttatgaagtggggatggtcaagtgcggatcccgtagggaacgctgcggctataggctcgtgagacggcaaaggtccgccgacgagcagctgcattgcgccgggaaagccaaaaggtccggcggtcatgccccccgtgtcagggagctgctactggatgctttgtccccagaacagttagtgcttactctgttggaggctgagcctccgcacgtacttatttcccgcccttcagcgccctttaccgaagcctctatgatgatgagtttaaccaaactggctgacaaggagcttgttcacatgatttcctgggccaagaaaatcccaggctttgtagaattgagccttttcgaccaagtgcgtctgttggagagttgttggatggaggtcttgatgatgggactgatgtggcggtccatcgaccatccaggaaaactgatcttcgccccagacctagtactggacagagatgagggcaagtgcgttgagggtattctggagatttttgacatgcttctcgcgactacttcacgtttccgggaactcaaactacagcacaaggaatatctctgcgttaaagccatgatacttttgaatagtagcatgtaccccctggtaaccgctacgcaggatgcagatagttctagaaaactggcgcacctactgaacgccgtcacagacgcactggtgtgggtaatcgcgaagtctggcatatctagccagcagcagtccatgcgcctcgcaaacctcttgatgctgctgagccacgtgagacacgccagggcagagaaggccagccagacactcacatccttcggcatgaagatggagaccctgctgccggaggccacgatggagcagtag

SEQ ID NO: 109938 - DNA, 1488 bp, Artificial Sequence
  derived and/or modified sequence
atggatattaagaactcaccaagcagcctaaattcaccaagctcctacaactgctctcagtccatactccctctagaacacggaagcatctacatacccagcagctacgtggattctcaccacgagtacccagccatgactttttattctcccgccgtcatgaactacagcatcccctcaaacgtgacaaacttggaaggagggccggggcgccagactactagtcccaacgtactttggccgacccctggccacctctcacccctggttgttcatcggcagctgtcccatctatacgcagagccacaaaaatcaccctggtgtgaggccagaagcctggagcatacgttacccgtgaatagggaaaccctcaaaaggaaggtgtcaggtaaccgctgtgcgagccctgtgacagggcctggatccaagcgagacgcccacttctgtgctgtgtgctctgactatgcatccggctaccactacggggtgtggtcgtgcgaaggttgtaaggctttttttaagcggtcaatccaaggacacaatgactacatctgccctgctacaaaccagtgcacgatcgataagaacagaaggaagagctgtcaggcttgccgactgcgaaagtgttacgaagtcggtatggtcaagtgcggttcgcgtcgcgagcggtgtggctatcgattggtgcgacggcagaggagcgcagacgaacaactgcattgcgcaggaaaagccaagaggagtggcgggcacgccccgcgagtgcgcgagctgttactagacgctctcagccccgagcaacttgttctcaccctgctggaggctgagccccctcacgtgttgatttcgcgacctagtgccccttttacagaggccagcatgatgatgtccctcaccaaacttgctgacaaggaattggtccacatgatatcttgggccaaaaagattccggggtttgtggagttaagtctgtttgaccaggttcggttgcttgaaagctgctggatggaggtcctgatgatgggcctgatgtggagatcaatcgatcaccctggaaaacttattttcgccccagatctagtcctggaccgagacgaaggtaagtgcgttgaggggatacttgaaatcttcgacatgctcctcgctaccactagtaggtttcgcgaacttaaattacagcataaagaatatctttgcgttaaagccatgatcctactgaattcctccatgtaccccctcgtgacggccacacaggatgcagactcttccagaaagttggctcacctgctgaatgctgtgacagacgccctagtctgggtgattgccaagagtggtattagttcccaacaacagagcatgagactggccaacctgcttatgctgctgagccacgtgaggcacgcccgagcggagaaagccagccagacattaactagctttggaatgaaaatggagacccttctgcctgaagccacgatggaacaatag

SEQ ID NO: 109939 - DNA, 2454 bp, Artificial Sequence
  derived and/or modified sequence
ctcggtctttaaaaggaagaaggggcttatcgttaagtcgcttgtgatcttttcagtttctccagctgctggctttttggacacccactcccccgccaggaggcagttgcaagcgcggaggctgcgagaaataactgcctcttgaaacttgcagggcgaagagcaggcggcgagcgctgggccggggagggaccacccgagctgcgacgggctctggggctgcggggcagggctggcgcccggagcctgagctgcaggaggtgcgctcgctttcctcaacaggtggcggcggggcgcgcgccgggagaccccccctaatgcgggaaaagcacgtgtccgcattttagagaaggcaaggccggtgtgtttatctgcaagccattatacttgcccacgaatctttgagaacattataatgacctttgtgcctcttcttgcaaggtgttttctcagctgttatctcaagacatggatataaaaaactcaccatctagccttaattctccttcctcctacaactgcagtcaatccatcttacccctggagcacggctccatatacataccttcctcctatgtagacagccaccatgaatatccagccatgacattctatagccctgctgtgatgaattacagcattcccagcaatgtcactaacttggaaggtgggcctggtcggcagaccacaagcccaaatgtgttgtggccaacacctgggcacctttctcctttagtggtccatcgccagttatcacatctgtatgcggaacctcaaaagagtccctggtgtgaagcaagatcgctagaacacaccttacctgtaaacagagagacactgaaaaggaaggttagtgggaaccgttgcgccagccctgttactggtccaggttcaaagagggatgctcacttctgcgctgtctgcagcgattacgcatcgggatatcactatggagtctggtcgtgtgaaggatgtaaggccttttttaaaagaagcattcaaggacataatgattatatttgtccagctacaaatcagtgtacaatcgataaaaaccggcgcaagagctgccaggcctgccgacttcggaagtgttacgaagtgggaatggtgaagtgtggctcccggagagagagatgtgggtaccgccttgtgcggagacagagaagtgccgacgagcagctgcactgtgccggcaaggccaagagaagtggcggccacgcgccccgagtgcgggagctgctgctggacgccctgagccccgagcagctagtgctcaccctcctggaggctgagccgccccatgtgctgatcagccgccccagtgcgcccttcaccgaggcctccatgatgatgtccctgaccaagttggccgacaaggagttggtacacatgatcagctgggccaagaagattcccggctttgtggagctcagcctgttcgaccaagtgcggctcttggagagctgttggatggaggtgttaatgatggggctgatgtggcgctcaattgaccaccccggcaagctcatctttgctccagatcttgttctggacagggatgaggggaaatgcgtagaaggaattctggaaatctttgacatgctcctggcaactacttcaaggtttcgagagttaaaactccaacacaaagaatatctctgtgtcaaggccatgatcctgctcaattccagtatgtaccctctggtcacagcgacccaggatgctgacagcagccggaagctggctcacttgctgaacgccgtgaccgatgctttggtttgggtgattgccaagagcggcatctcctcccagcagcaatccatgcgcctggctaacctcctgatgctcctgtcccacgtcaggcatgcgagggcagaaaaggcctctcaaacactcacctcatttggaatgaagatggagactcttttgcctgaagcaacgatggagcagtgaccctctaatcaactcggtggcctaaagaaaaatcttgggtaacattttcacttcagtttccctctgggatcattgtaatccatgaaaaaaataattttaaagaaagagttaaaatactttgaagttagttatgtggttaaaaaccaccttcctttctattatcaatccaacaatttgataactgtaaacgctaaagtgaagacggattctcttcagatggtctccttaactgcccagggcttgcagatgtctcacccatgaggggcaccaatgtagaaagctgaggcttcatctactgatgagcttcactggtttcccctgaggtttgtgctttggcagagaaggggaggaggggactgggattgtgtggtcagctgtgcctgccaacagatgcaggttaggaactgtgttcagtatcttccaataagaaaggggaaatgccgatgcctatcctctttgtttaggtagaaagtaaaatgctactggacttaaatgggc

SEQ ID NO: 109940 - DNA, 1899 bp, Artificial Sequence
  derived and/or modified sequence
gatgccagttaactgtcgagaggggacgctccctcctcgtaggcgtccacactggagaaggaataagatgggcgattgcctgggaagcctgacagggcggcggcagctgggatgctggagaggactggccccttgagttactgagtccgatgaatgtgcttgctctgctggaggaaccgcgctcaggttacagtcatcccaatatggttctgaagccattatacttgcccacgaatctttgagaacattataatgacctttgtgcctcttcttgcaaggtgttttctcagctgttatctcaagacatggatataaaaaactcaccatctagccttaattctccttcctcctacaactgcagtcaatccatcttacccctggagcacggctccatatacataccttcctcctatgtagacagccaccatgaatatccagccatgacattctatagccctgctgtgatgaattacagcattcccagcaatgtcactaacttggaaggtgggcctggtcggcagaccacaagcccaaatgtgttgtggccaacacctgggcacctttctcctttagtggtccatcgccagttatcacatctgtatgcggaacctcaaaagagtccctggtgtgaagcaagatcgctagaacacaccttacctgtaaacagagagacactgaaaaggaaggttagtgggaaccgttgcgccagccctgttactggtccaggttcaaagagggatgctcacttctgcgctgtctgcagcgattacgcatcgggatatcactatggagtctggtcgtgtgaaggatgtaaggccttttttaaaagaagcattcaaggacataatgattatatttgtccagctacaaatcagtgtacaatcgataaaaaccggcgcaagagctgccaggcctgccgacttcggaagtgttacgaagtgggaatggtgaagtgtggctcccggagagagagatgtgggtaccgccttgtgcggagacagagaagtgccgacgagcagctgcactgtgccggcaaggccaagagaagtggcggccacgcgccccgagtgcgggagctgctgctggacgccctgagccccgagcagctagtgctcaccctcctggaggctgagccgccccatgtgctgatcagccgccccagtgcgcccttcaccgaggcctccatgatgatgtccctgaccaagttggccgacaaggagttggtacacatgatcagctgggccaagaagattcccggctttgtggagctcagcctgttcgaccaagtgcggctcttggagagctgttggatggaggtgttaatgatggggctgatgtggcgctcaattgaccaccccggcaagctcatctttgctccagatcttgttctggacagggatgaggggaaatgcgtagaaggaattctggaaatctttgacatgctcctggcaactacttcaaggtttcgagagttaaaactccaacacaaagaatatctctgtgtcaaggccatgatcctgctcaattccagtatgtaccctctggtcacagcgacccaggatgctgacagcagccggaagctggctcacttgctgaacgccgtgaccgatgctttggtttgggtgattgccaagagcggcatctcctcccagcagcaatccatgcgcctggctaacctcctgatgctcctgtcccacgtcaggcatgcgagggcagaaaaggcctctcaaacactcacctcatttggaatgaagatggagactcttttgcctgaagcaacgatggagcagtgaccctctaatcaactcggtggcctaaagaaaaatcttgggtaacattttcacttcagtttccctctgggatcattgtaatccatgaaaaaaataattttaaagaaag

SEQ ID NO: 109941 - DNA, 3588 bp, Artificial Sequence
  derived and/or modified sequence
cgagaggggacgctccctcctcgtaggcgtccacactggagaaggaataagatgggcgattgcctgggaagcctgacagggcggcggcagctgggatgctggagaggactggccccttgagttactgagtccgatgaatgtgcttgctctgctggaggaaccgcgctcaggttacagtcatcccaatatggttctgaagacatccaagtggagatatggcatttaaattcatgagattggatgagatcccaccaaaggaacaggtttaggtggagacaaccaaataccgatgcctaggacactgcagtgtttagaattcaaggagatgagaaggaaacaggagggaagattgaaaagaagagtccagtgtgttatgaggaaaaccccaagagcatgctgccttacaagacaggtgaaaaatgtgttctgtgaaagaaagagtaattaactgttaaatgttacagactgatcaaataaaatgaagactgagaatggcctgtttgtaagagggagacatcaacctgttgtggaaaagaatgatcacttaaagtctttagaaattctgaaccaactctctagcaggtgatccttgttagaatttgagcccttaacgctatccaggactggaggttgaagggacgatagagggagcaggaggagaatgcacatggattaaggagcgagaacacagaaatcctgggctctcttctcccagccacaaggttaggttgaaaaacagagcagatggaggtagtttgtagcctacaggtgccctgaatgaagcttccacagtgctaaagtggaagaacgagggactccaagggaaggattcaaggctgggcccatgcacctgtgtaattcagaagagaccccagaggagatcagcgccctctaattagccctgtatctgggctctacaggacagacatgcctccatttatgcaacaaataagaacagcatctcatgacagtggagaaaacatgggatgtgcaggtagggttttgttttgcctcttggtagtttctttcctacggaaaattctccctctgatctttccaagtcaaaggcttcagcaaacatttgttgaacgcgtggattgtgctaggtgggtgttatggaccatggagaatgctagagatgtaagacatgcgctgtccaatcgcagcgcaggttgtgttgacagccattatacttgcccacgaatctttgagaacattataatgacctttgtgcctcttcttgcaaggtgttttctcagctgttatctcaagacatggatataaaaaactcaccatctagccttaattctccttcctcctacaactgcagtcaatccatcttacccctggagcacggctccatatacataccttcctcctatgtagacagccaccatgaatatccagccatgacattctatagccctgctgtgatgaattacagcattcccagcaatgtcactaacttggaaggtgggcctggtcggcagaccacaagcccaaatgtgttgtggccaacacctgggcacctttctcctttagtggtccatcgccagttatcacatctgtatgcggaacctcaaaagagtccctggtgtgaagcaagatcgctagaacacaccttacctgtaaacagagagacactgaaaaggaaggttagtgggaaccgttgcgccagccctgttactggtccaggttcaaagagggatgctcacttctgcgctgtctgcagcgattacgcatcgggatatcactatggagtctggtcgtgtgaaggatgtaaggccttttttaaaagaagcattcaaggacataatgattatatttgtccagctacaaatcagtgtacaatcgataaaaaccggcgcaagagctgccaggcctgccgacttcggaagtgttacgaagtgggaatggtgaagtgtggctcccggagagagagatgtgggtaccgccttgtgcggagacagagaagtgccgacgagcagctgcactgtgccggcaaggccaagagaagtggcggccacgcgccccgagtgcgggagctgctgctggacgccctgagccccgagcagctagtgctcaccctcctggaggctgagccgccccatgtgctgatcagccgccccagtgcgcccttcaccgaggcctccatgatgatgtccctgaccaagttggccgacaaggagttggtacacatgatcagctgggccaagaagattcccggctttgtggagctcagcctgttcgaccaagtgcggctcttggagagctgttggatggaggtgttaatgatggggctgatgtggcgctcaattgaccaccccggcaagctcatctttgctccagatcttgttctggacagggatgaggggaaatgcgtagaaggaattctggaaatctttgacatgctcctggcaactacttcaaggtttcgagagttaaaactccaacacaaagaatatctctgtgtcaaggccatgatcctgctcaattccagtatgtaccctctggtcacagcgacccaggatgctgacagcagccggaagctggctcacttgctgaacgccgtgaccgatgctttggtttgggtgattgccaagagcggcatctcctcccagcagcaatccatgcgcctggctaacctcctgatgctcctgtcccacgtcaggcatgcgagggcagaaaaggcctctcaaacactcacctcatttggaatgaagatggagactcttttgcctgaagcaacgatggagcagtgaccctctaatcaactcggtggcctaaagaaaaatcttgggtaacattttcacttcagtttccctctgggatcattgtaatccatgaaaaaaataattttaaagaaagagttaaaatactttgaagttagttatgtggttaaaaaccaccttcctttctattatcaatccaacaatttgataactgtaaacgctaaagtgaagacggattctcttcagatggtctccttaactgcccagggcttgcagatgtctcacccatgaggggcaccaatgtagaaagctgaggcttcatctactgatgagcttcactggtttcccctgaggtttgtgctttggcagagaaggggaggaggggactgggattgtgtggtcagctgtgcctgccaacagatgcaggttaggaactgtgttcagtatcttccaataagaaaggggaaatgccgatgcctatcctctttgtttaggtagaaagtaaaatgctactggacttaaatgggcaacaaggggctttgcctgttcatttgccatggagagggctgggaatccaggtgcggtggctcacacctgtaatcccaacactttgggaggccgaggtgggcagatcagttgaggtcaggagtttgaaaccagcctggccaacatggcgaaaccccgtctctattaaaaatataataattagccaggcatggtggtgtgtgcttgtaatcccagctactcaggaggctgaggcatgagaatggcttgaacctggaaggcaaaggttgcagtgagccgagattgggccaccgcactccagcctgggtgactgacagagtgagactctgtc

SEQ ID NO: 109942 - DNA, 1488 bp, Artificial Sequence
  derived and/or modified sequence
atggacatcaagaacagccccagcagcctgaacagccccagcagctacaactgcagccagagcatcctgcccctggagcacggcagcatctacatccccagcagctatgtggacagccaccacgagtacccagccatgaccttctacagccctgctgtgatgaactacagcatccccagcaatgtgaccaacctggagggcggccctggccggcagaccaccagccccaacgtgctgtggcccaccccaggccacctgagccccctggtggtgcaccggcagctgagccacctgtatgcagagccccagaagagcccctggtgtgaggcccggagcctggagcacaccctgcctgtgaaccgggagaccctgaagaggaaggtgtctggcaacagatgtgccagccctgtgacaggccctggcagcaagagagatgcccacttctgtgctgtgtgcagcgactatgccagcggctaccactatggagtgtggagctgtgagggctgcaaggccttcttcaagaggagcatccagggccacaatgactacatctgcccagccaccaaccagtgcaccatcgacaagaacagaaggaagagctgccaggcctgccgcctgaggaagtgctatgaggtgggcatggtgaagtgtggcagccggcgggagcgctgtggctaccgcctggtgcggcggcagaggtctgcagatgagcagctgcactgtgccggcaaggccaagaggtctgggggccacgccccccgggtgcgggagctgctgctggatgccctgagccctgagcagctggtgctgaccctgctggaggccgagccccctcatgtgctgatcagccggcccagcgcccccttcacagaggcctccatgatgatgagcctgaccaagctggccgacaaggagctggtgcacatgatctcctgggccaagaagatccctggctttgtggagctgagcctgtttgaccaggtgcggctgctggagagctgctggatggaggtgctgatgatgggcctgatgtggaggagcattgaccaccctgggaagctgatctttgccccagacctggtgctggacagagatgagggcaaatgtgtggagggcatcctggagatctttgacatgctgctggccaccaccagccgcttccgggagctgaagctgcagcacaaggagtacctgtgtgtgaaggccatgatcctgctgaacagctccatgtaccccctggtgacagccacccaggatgctgacagcagcaggaagctggcccacctgctgaatgctgtgacagatgccctggtgtgggtgattgccaagagcggcatcagcagccagcagcagagcatgaggctggccaacctgctgatgctgctgagccacgtgagacatgcccgggcagagaaggccagccagaccctgaccagctttggcatgaagatggagaccctgctgcctgaggccaccatggagcagtag

SEQ ID NO: 109943 - DNA, 1488 bp, Artificial Sequence
  derived and/or modified sequence
atggacatcaagaacagccccagcagcctgaacagccccagcagctacaactgttcgcagagtatcttaccgctggagcacggcagcatctatattccctccagttatgtggacagccaccacgagtatcctgccatgactttctacagccctgctgtaatgaattacagcatcccgagtaatgtgacgaaccttgagggcggtccaggcaggcagacgactagtcctaatgtgctgtggcctactcccggacatctgagcccgctagtggttcacagacaattaagccatctctatgcagagccccaaaagtcaccctggtgtgaagctcgctctctggagcatactttaccagtcaacagggagaccctcaagcgcaaggtgtcaggcaatcggtgtgctagcccggtcacggggcccggatccaagagggatgcccatttctgcgcagtatgttccgattatgcatccggctaccactatggcgtgtggtcctgtgagggttgcaaagcattctttaaaagaagcatccagggtcataatgactacatctgcccggcaaccaatcaatgcaccatagacaagaatagacgaaagagttgccaggcatgtagattgcgcaaatgctacgaggtaggaatggtgaagtgtggcagtcgtcgggagcgttgtggctatagattggtgaggcggcagcgaagcgccgacgaacagctgcactgcgccggaaaggccaaaaggagcggcgggcacgcaccgagggtgcgcgaactgcttttggatgcactgtctccagagcagcttgtgctgactctgctcgaggccgaacccccccacgtcctgattagccgcccaagcgccccatttaccgaggcctccatgatgatgtctttaacaaagctcgccgataaagaactggtccatatgattagctgggcaaaaaaaatcccaggtttcgtggagttgagcttgttcgaccaagtgcgcttactcgagagctgttggatggaggtgctgatgatgggattaatgtggcggtccatcgatcatcccggaaaactgatctttgctcctgatcttgtactcgatcgagacgagggtaagtgtgtagaagggatcttggaaatcttcgacatgttactcgcgacgacttccagattcagggagctaaagctgcaacacaaggaatacctgtgcgtaaaggctatgatcttgcttaacagcagcatgtaccctcttgtcaccgctacacaggacgcggactcctctcgcaagctggcccaccttctcaacgcagtgacagacgccctcgtatgggttatcgccaagtccggcatttcttcacagcagcagtcgatgcgcctggctaacctgctcatgttgttgtcccacgtacgccacgcaagagcagagaaggcctctcaaaccctgaccagctttgggatgaagatggaaaccttgctgcccgaagctacgatggagcagtag

SEQ ID NO: 109944 - DNA, 1488 bp, Artificial Sequence
  derived and/or modified sequence
atggacatcaagaacagccccagcagcctgaacagccccagcagctataattgttctcagtcgattctccccctcgagcacggctccatctacattccttccagctacgtggacagccatcacgaatacccagccatgactttttacagtccagctgtgatgaattatagcattcccagtaacgtgacaaatcttgagggcgggccaggtcgtcagacaacctcccccaatgtcttatggcccacaccaggtcacctttcacccctggtcgttcatcggcagttgagtcatctgtatgccgagcctcagaagtccccgtggtgcgaggctagatcgctggagcatacactcccggtgaacagagagaccctgaagcgcaaggtatccggcaatcgatgcgccagtcctgtgaccggaccaggatctaagagagacgcccacttttgtgccgtgtgtagtgactacgcctctggctatcattacggagtgtggtcctgtgaaggctgtaaggctttctttaaaagatctatccaggggcataatgattatatttgtcctgcaaccaatcagtgtaccatcgataaaaatcggcgcaaatcctgccaagcttgtaggctccgaaaatgctacgaggtcggaatggtcaagtgcggcagtcgcagggagagatgtgggtacaggctggtccgccggcagaggtctgctgatgaacagctgcattgtgccgggaaggccaagcggagtgggggccacgcaccacgagtccgggaacttctcctcgacgcactgtcccctgaacagctagttctgaccttgttagaggctgagcctcctcacgtgctcatttccagaccaagcgccccctttacagaggcttcaatgatgatgagcctgacgaaactggccgataaggagctcgtgcatatgatctcctgggccaaaaagatccccggtttcgttgaactgagcctgtttgaccaggtgcgactattggaatcttgttggatggaggtgctaatgatgggcctcatgtggcggtcaatcgaccacccgggaaaactcatcttcgcccctgacctggtgctggaccgagacgaaggtaagtgtgtggaagggattctggagatctttgacatgctgcttgctacaacctcccgctttcgggaacttaagttgcagcacaaggagtatctgtgcgtgaaggctatgatcctccttaatagtagtatgtaccctttagtgactgccactcaagatgctgacagttcgcgaaagctggctcacttgctgaacgctgtgacagacgccctggtctgggtgatcgccaagtctggcatcagcagccagcagcagagtatgagattagcgaaccttttgatgctgttgagtcatgtccgtcatgccagggcagagaaagcaagtcagacactgacctcattcggcatgaagatggaaacactgttaccagaagctaccatggagcagtag

SEQ ID NO: 109945 - DNA, 1488 bp, Artificial Sequence
  derived and/or modified sequence
atggacatcaagaacagccccagcagcctgaacagccccagcagctataattgcagtcagtctatcctgccacttgagcacgggtcaatatatatacccagttcgtacgtggactctcaccacgaatacccggcgatgacattttactccccagctgtcatgaattattcaatacctagtaatgtgactaacctcgagggtggccccggaagacagacaacttctccaaacgttttatggccaacgccggggcatttatcacccctagtggtgcatagacagctgtctcatctgtatgccgaacctcagaaatcaccttggtgcgaagctcggagcctagagcatactttgcccgtgaaccgagagacgctaaagaggaaggtgtccggaaacaggtgcgcctcccccgttaccggtccgggctcaaagcgagacgcacacttttgtgccgtgtgctccgactatgcttcaggataccactacggtgtgtggtcctgcgaagggtgcaaagctttcttcaagagatcaattcagggccacaatgactacatctgccccgccaccaatcagtgcacgatcgacaaaaatcggcgaaaatcatgccaggcatgcaggctacgcaagtgctacgaggtcggcatggttaaatgcggtagtcggagagagcggtgcggttatcggctggtcaggcggcaaagatcagcggacgaacagctccactgcgctggtaaggccaaaaggtctggcggacacgctcccagggttcgtgagctcctcctcgatgctttgagccctgaacaactggtgctcacactcctcgaagccgagccaccgcatgttctgatttcccgtcccagcgccccattcactgaagcttctatgatgatgagtcttactaaactggccgataaagaactggtacacatgatatcttgggccaagaagattccgggctttgtggagttgtccctcttcgatcaggtgcgattactcgagagttgctggatggaagtcctgatgatggggcttatgtggcgatccatcgatcacccaggtaaacttattttcgcgccggacctcgtgctggaccgtgatgagggcaaatgcgtggaagggatcctggagatttttgacatgctgctggccaccaccagcagatttcgggaactcaagttgcagcacaaagagtatttgtgcgtgaaggccatgatattattaaattccagcatgtaccccctggtgaccgccacgcaggatgctgacagcagccggaagctggcacatctgttgaatgctgttaccgacgctctcgtgtgggtgatcgccaagtcgggtatatcgtcacagcagcagtccatgcgcttggccaatttgctgatgctcttgagccacgtaaggcatgctagggcggagaaagcctcacagacattaacaagctttggaatgaagatggagaccctcttgcctgaggctacaatggagcaatag

SEQ ID NO: 109946 - DNA, 1488 bp, Artificial Sequence
  derived and/or modified sequence
atggatatcaaaaacagccctagctcactgaattccccttcctcctataactgctctcagagcatcctcccactggaacacggcagcatttatatcccatcctcctatgtagactctcatcacgaataccctgctatgacattctatagccccgctgtcatgaactattcgataccctctaatgtcaccaaccttgaagggggacctgggagacagacgacatctccaaatgtgctttggccaacgcccggtcacttgagtcccctggttgtgcaccgtcaactatcccacctctacgcggaaccccaaaaaagcccctggtgcgaggcgagaagtctggagcataccttacccgtcaaccgggaaaccctgaagcggaaggtcagcggaaaccgttgtgcctcccccgtgactggccctgggtcaaaaagggatgcacatttttgcgcggtgtgctcggactatgcgtcaggttaccattatggagtctggagctgcgagggttgtaaggcttttttcaagcgtagcatccagggtcataatgattacatttgccccgctactaaccaatgtaccatcgataagaacagaagaaaatcctgtcaggcatgcagactgcggaagtgctatgaggtcggaatggtgaagtgtggctctaggagagaacgctgtggttatcgtctcgtccgcagacagcgttccgccgatgagcagctccattgcgccggaaaagctaagcgttctgggggacacgcccctcgggtgagagagctgctcctagacgcactctctcctgaacagctggtgttaacactactggaggcagagccccctcacgtcctgatcagccgcccatccgccccatttacagaagcctctatgatgatgagtttaactaaactggctgataaagaattagtccacatgatcagttgggccaaaaaaattcccggattcgtggagttgagtctgtttgaccaggtcaggctcttggagtcatgttggatggaagtgctgatgatgggtcttatgtggaggtccattgaccacccaggcaaactgatctttgcacccgatctcgtcctggaccgcgatgaaggaaagtgcgttgaagggatcctggaaatctttgacatgctcctggcgacaacaagccggttcagagaattaaagctgcagcacaaggaatatctctgcgtgaaagccatgatactcttgaactcctctatgtaccccctggtgactgctacccaagacgccgatagctcaaggaagctggctcatctcctgaacgcagtgaccgacgccttggtgtgggtgattgcgaagtcaggcatttcttctcagcagcagtctatgagacttgccaacttactgatgctgttgtctcatgtcagacacgccagggccgagaaagcaagccaaacgttaacctcctttgggatgaagatggagaccctgctccctgaggccaccatggaacaatag

SEQ ID NO: 109947 - DNA, 1488 bp, Artificial Sequence
  derived and/or modified sequence
atggatatcaagaatagtccctctagcctgaacagcccgtcctcctataattgctcccaatccattttgcccctcgaacacgggagtatctatatcccctcaagctatgtagattctcaccacgagtatccggctatgacgttttacagccctgccgtgatgaactactcaatccccagcaacgtcacaaatctggagggtggaccaggcaggcaaaccaccagcccgaacgtactgtggcccacacctggacatctctcccccctggtggtgcaccgacaattgagccacctgtatgccgaaccacaaaaatcgccttggtgcgaagcacggtccctggagcacacattacctgtgaacagagagacactgaagcggaaagtgagcggcaatcggtgcgcgtccccagtgaccggccctgggtctaagagagatgcccacttttgcgctgtgtgtagtgactacgcttcggggtatcactacggggtctggagctgtgaaggctgtaaggccttctttaagcgctctatccagggccacaacgattatatctgcccagctacaaaccagtgtactatcgacaagaaccgccgaaaatcctgccaggcctgccgcctgaggaaatgctatgaagttggaatggtgaagtgcggatccagacgcgaacggtgcggttaccggctggtaaggaggcagcggagtgccgatgagcagttgcattgcgcgggtaaggccaaaagatctggcggtcatgctcccagagtgagagaattgttgctggacgctctgagccctgagcagttggtgcttacactccttgaggcggaaccaccccatgttctgatctctcggccaagcgcccctttcactgaagccagcatgatgatgtcgctcactaagctggcagacaaagaattggtccacatgatttcctgggctaaaaagatcccaggattcgtggaactgagccttttcgaccaggtgcgattactggaatcctgttggatggaggtactgatgatgggccttatgtggcgcagcattgaccaccccggtaaattgattttcgccccagatcttgtcttagatcgagacgaagggaagtgtgtcgaagggatccttgaaatcttcgatatgcttctcgccaccactagccgattccgggaactgaagctacagcacaaagagtacctgtgcgtcaaggccatgatcctgctgaattcttcgatgtatcctctcgtgactgctactcaagacgcagactcttccagaaaacttgcacatctgctaaatgcagtcactgacgctttagtgtgggtcattgccaagtcaggaatatcttcccagcagcagagcatgagacttgcaaatctgctaatgttactatcacacgtacgtcacgctcgagctgagaaggcgtctcaaacgctcacaagcttcggcatgaaaatggaaaccttgttacctgaagctaccatggaacagtag

SEQ ID NO: 109948 - DNA, 1488 bp, Artificial Sequence
  derived and/or modified sequence
atggacatcaagaattccccttcttctttaaattccccttccagctacaactgcagccagtccatactacccctcgagcacggctcgatttatatcccctcttcatatgtagactcgcatcacgaataccccgcaatgaccttctatagccctgccgtgatgaactatagcatcccatctaatgtcacgaacctggaggggggaccaggcaggcagaccactagccctaatgtactctggccaacgcccggtcacctttccccactcgtcgtgcaccgccagctgtcccatctgtatgccgagccccagaaatcaccctggtgcgaagctcgcagtttggaacatacgctgcccgtgaatcgagagacactaaagagaaaggtatccggaaacagatgcgccagcccagtgaccggcccaggttctaagcgggatgcccatttctgcgccgtgtgctccgattatgcttccgggtaccactatggagtctggagttgcgaaggctgtaaagcattcttcaagcgatctattcagggacataacgattatatctgcccagctacgaatcagtgcaccattgataagaacaggagaaaatcctgccaggcctgccggcttcgtaaatgctatgaagtggggatggtgaaatgtggaagtcggcgagagcgttgtggctacagactagtgcgacgccagagaagtgctgacgagcagctgcattgcgccggaaaggccaagagatcaggtgggcacgcacccagggttcgggagctgttgctggacgcactcagcccggagcaactggtcttaaccctgttagaggctgaacccccacacgtgctcatatcgagaccaagcgctccatttacggaagccagtatgatgatgagtctgactaagttggcggataaagaactggttcacatgataagctgggccaagaaaattcccggtttcgttgagttgtcactcttcgaccaggtgcgtttgcttgagtcctgctggatggaagtgctgatgatgggacttatgtggcggtcaattgaccaccctggcaagctgatttttgcccctgacttggtacttgatcgggatgaagggaagtgcgtggagggtattctggaaatctttgatatgctgcttgctaccacatcacggtttagggagcttaagctgcagcataaggaatatctctgcgtgaaggccatgattctactcaatagctccatgtatcccctggtaacagccacccaagacgctgattcttccagaaaacttgcacacctccttaacgcagtgaccgacgccttggtctgggtgattgccaagtccggtatctccagccagcagcagtcgatgcggctggcaaatcttcttatgctgctgtcccatgtacggcacgcacgtgcggagaaggcctctcagacacttactagcttcggcatgaagatggaaaccctcctgcccgaggctaccatggaacaatag

SEQ ID NO: 109949 - protein, 269 aa, Artificial Sequence
  derived and/or modified sequence
MAGLAARLVLLAGAAALASGSQGDREPVYRDCVLQCEEQNCSGGALNHFRSRQPIYMSLAGWTCRDDCKYECMWVTVGLYLQEGHKVPQFHGKVSLNAWFWSTVFHTRDTDLTEKMDYFCASTVILHSIYLCCVRTVGLQHPAVVSAFRALLLLMLTVHVSYLSLIRFDYGYNLVANVAIGLVNVVWWLAWCLWNQRRLPHVRKCVVVVLLLQGLSLLELLDFPPLFWVLDAHAIWHISTIPVHVLFFSFLEDDSLYLLKESEDKFKLD

SEQ ID NO: 109950 - DNA, 810 bp, Artificial Sequence
  derived and/or modified sequence
atggccggcctggccgccagactggtgctgctggccggcgccgccgccctggccagcggcagccagggcgacagagagcccgtgtacagagactgcgtgctgcagtgcgaggagcagaactgcagcggcggcgccctgaaccacttcagaagcagacagcccatctacatgagcctggccggctggacctgcagagacgactgcaagtacgagtgcatgtgggtgaccgtgggcctgtacctgcaggagggccacaaggtgccccagttccacggcaaggtgagcctgaacgcctggttctggagcaccgtgttccacaccagagacaccgacctgaccgagaagatggactacttctgcgccagcaccgtgatcctgcacagcatctacctgtgctgcgtgagaaccgtgggcctgcagcaccccgccgtggtgagcgccttcagagccctgctgctgctgatgctgaccgtgcacgtgagctacctgagcctgatcagattcgactacggctacaacctggtggccaacgtggccatcggcctggtgaacgtggtgtggtggctggcctggtgcctgtggaaccagagaagactgccccacgtgagaaagtgcgtggtggtggtgctgctgctgcagggcctgagcctgctggagctgctggacttcccccccctgttctgggtgctggacgcccacgccatctggcacatcagcaccatccccgtgcacgtgctgttcttcagcttcctggaggacgacagcctgtacctgctgaaggagagcgaggacaagttcaagctggactag

SEQ ID NO: 109951 - DNA, 810 bp, Artificial Sequence
  derived and/or modified sequence
atggcaggactcgcagccagacttgtcctgctcgccggcgccgccgctctcgcgtccgggagtcagggcgatagagagcctgtgtacagggactgtgtgctccagtgtgaagagcagaactgctctgggggagctctgaaccactttaggagccgacagcccatctatatgagtttagctggctggacatgtagggacgattgcaagtatgagtgcatgtgggtaaccgttggcttgtatctgcaagagggacacaaagtaccccagtttcatgggaaagtgtcacttaatgcctggttctggagtactgtattccatactcgtgacaccgacctgacagaaaagatggactacttttgtgcctcgaccgtgatcctccattccatttacttatgctgtgtccggactgtgggcctccagcaccccgccgtcgtgtccgcgtttagagctctcctcttacttatgctcactgtgcatgttagttacctgtccctgatccggtttgactatgggtacaatttggtcgcaaacgtagctatcggtctggtgaatgtagtgtggtggctggcgtggtgtctgtggaatcagagacggcttccgcatgtcagaaagtgcgtggtcgttgtattgctcctgcaggggctgtcactgctggagctcctggactttcctccactattctgggtgctggatgcccatgctatttggcacatcagtaccattcctgtccatgtcctgtttttttcctttcttgaggatgactccctctacctcctgaaagagtccgaagacaaattcaaattagactag

SEQ ID NO: 109952 - DNA, 810 bp, Artificial Sequence
  derived and/or modified sequence
atggccggcctggccgcccggctggtgctgctggccggggctgctgccctggccagcggcagccagggcgaccgggagcctgtgtacagagactgtgtgctgcagtgtgaggagcagaactgcagcggcggggccctgaaccacttccgcagccggcagcccatctacatgagcctggccggctggacctgcagagatgactgcaagtatgagtgcatgtgggtgacagtgggcctgtacctgcaggagggccacaaggtgccccagttccacggcaaggtgtccctgaatgcctggttctggagcacagtgttccacacccgggacacagacctgacagagaagatggactacttctgtgccagcaccgtcatcctgcacagcatctacctgtgctgcgtgaggacagtgggcctgcagcaccctgctgtggtgtctgccttccgggccctgctgctgctgatgctgactgtgcacgtgtcctacctgagcctcatccgctttgattatggctacaacctggtggccaacgtggccatcggcctggtgaatgtggtgtggtggctggcctggtgcctgtggaaccagaggcggctgccccacgtgaggaaatgtgtggtggtggtgctgctgctgcagggcctgagcctgctggagctgctggacttccccccactcttctgggtgctggatgcccacgccatctggcacatcagcaccatccctgtgcacgtgctcttcttctccttcctggaggatgacagcctgtacctgctgaaggagagcgaggacaagttcaagctggactag

SEQ ID NO: 109953 - DNA, 810 bp, Artificial Sequence
  derived and/or modified sequence
atggccggcctggccgcccggctggtgctgctggccggcgccgccgcactggcatctgggtcccagggcgatcgggaacccgtatacagagattgtgtgctgcaatgtgaggagcagaattgtagtggcggcgctctgaaccatttccgttcgagacagcctatttacatgagcctcgcgggttggacttgccgcgatgattgtaaatatgagtgcatgtgggttacggtgggcctgtacctccaggaaggtcacaaggtgcctcagttccacggcaaagtctcattgaatgcatggttttggagtactgtgttccacacaagggacactgacctgacggagaaaatggactatttttgcgcaagcactgtcatcttacattccatctacctgtgctgtgtgaggacagtgggattgcagcaccctgcagtcgtatccgctttcagggcactgttgctgctcatgctgaccgtccacgtttcctatctgagtctgatccggtttgattacggctataatctcgtggctaatgtggccatcggccttgtgaacgtcgtctggtggctggcctggtgtctgtggaaccagaggcgtctgcctcacgtcagaaagtgcgtcgtggttgtactgctgctgcagggactctctctgctggaactactcgattttcccccactcttctgggtcttggatgcccatgctatttggcacatctcgacaattccagttcacgtgctttttttttcatttttggaggacgacagcttatatctgctcaaggaaagtgaggataagttcaagctggattag

SEQ ID NO: 109954 - DNA, 2533 bp, Artificial Sequence
  derived and/or modified sequence
atactcctaagctcctcccccggcggcgagccagggagaaaggatggccggcctggcggcgcggttggtcctgctagctggggcagcggcgctggcgagcggctcccagggcgaccgtgagccggtgtaccgcgactgcgtactgcagtgcgaagagcagaactgctctgggggcgctctgaatcacttccgctcccgccagccaatctacatgagtctagcaggctggacctgtcgggacgactgtaagtatgagtgtatgtgggtcaccgttgggctctacctccaggaaggtcacaaagtgcctcagttccatggcaaggtgtccctcaatgcatggttctggtccacagttttccacaccagggacactgacctcacagagaaaatggactacttctgtgcctccactgtcatcctacactcaatctacctgtgctgcgtcaggaccgtggggctgcagcacccagctgtggtcagtgccttccgggctctcctgctgctcatgctgaccgtgcacgtctcctacctgagcctcatccgcttcgactatggctacaacctggtggccaacgtggctattggcctggtcaacgtggtgtggtggctggcctggtgcctgtggaaccagcggcggctgcctcacgtgcgcaagtgcgtggtggtggtcttgctgctgcaggggctgtccctgctcgagctgcttgacttcccaccgctcttctgggtcctggatgcccatgccatctggcacatcagcaccatccctgtccacgtcctctttttcagctttctggaagatgacagcctgtacctgctgaaggaatcagaggacaagttcaagctggactgaagaccttggagcgagtctgccccagtggggatcctgcccccgccctgctggcctcccttctcccctcaacccttgagatgattttctcttttcaacttcttgaacttggacatgaaggatgtgggcccagaatcatgtggccagcccaccccctgttggccctcaccagccttggagtctgttctagggaaggcctcccagcatctgggactcgagagtgggcagcccctctacctcctggagctgaactggggtggaactgagtgtgctcttagctctaccgggaggacagctgcctgtttcctccccatcagcctcctccccacatccccagctgcctggctgggtcctgaagccctctgtctacctgggagaccagggaccacaggccttagggatacagggggtccccttctgttaccaccccccaccctcctccaggacaccactaggtggtgctggatgcttgttctttggccagccaaggttcacggcgattctccccatgggatcttgagggaccaagctgctgggattgggaaggagtttcaccctgaccattgccctagccaggttcccaggaggcctcaccatactccctttcagggccagggctccagcaagcccagggcaaggatcctgtgctgctgtctggttgagagcctgccaccgtgtgtcgggagtgtgggccaggctgagtgcataggtgacagggccgtgagcatgggcctgggtgtgtgtgagctcaggcctaggtgcgcagtgtggagacgggtgttgtcggggaagaggtgtggcttcaaagtgtgtgtgtgcagggggtgggtgtgttagcgtgggttaggggaacgtgtgtgcgcgtgctggtgggcatgtgagatgagtgactgccggtgaatgtgtccacagttgagaggttggagcaggatgagggaatcctgtcaccatcaataatcacttgtggagcgccagctctgcccaaggcgccacctgggcggacagccaggagctctccatggccaggctgcctgtgtgcatgttccctgtctggtgcccctttgcccgcctcctgcaaacctcacagggtccccacacaacagtgccctccagaagcagcccctcggaggcagaggaaggaaaatggggatggctggggctctctccatcctccttttctccttgccttcgcatggctggccttcccctccaaaacctccattcccctgctgccagcccctttgccatagcctgattttggggaggaggaaggggcgatttgagggagaaggggagaaagcttatggctgggtctggtttcttcccttcccagagggtcttactgttccagggtggccccagggcaggcaggggccacactatgcctgcgccctggtaaaggtgacccctgccatttaccagcagccctggcatgttcctgccccacaggaatagaatggagggagctccagaaactttccatcccaaaggcagtctccgtggttgaagcagactggatttttgctctgcccctgaccccttgtccctctttgagggaggggagctatgctaggactccaacctcagggactcgggtggcctgcgctagcttcttttgatactgaaaacttttaaggtgggagggtggcaagggatgtgcttaataaatcaattccaagcctc

SEQ ID NO: 109955 - DNA, 810 bp, Artificial Sequence
  derived and/or modified sequence
atggccggactggctgcgagactggtattgctggctggcgcagccgcactcgcttccgggagccaaggagacagggagcccgtatatcgcgattgcgtccttcaatgcgaggaacagaattgttccgggggagcgttaaatcatttcaggtctcgacagcccatctacatgtctttagccggatggacctgcagggatgactgcaagtatgaatgtatgtgggtgactgtgggtctgtatctgcaagagggacacaaagttccccaattccatggaaaagtgtccctaaatgcatggttctggagcaccgtgtttcacacaagagatactgacctgacagagaagatggactacttctgcgcgagtactgtgattctgcatagtatttacctgtgttgcgtcaggacagtgggcctgcagcaccctgccgtggtgagtgccttcagggcactgctcctcctcatgctgaccgtacatgtgagttatttaagtttgattaggttcgactatggctacaacctcgttgccaatgtggctataggactggtgaatgtggtctggtggcttgcatggtgtctttggaaccaaagaaggctgccccatgtgagaaagtgtgttgtcgtggtcctcctcctgcaggggctcagtctactggagctgttagacttcccccctctcttttgggtgctcgacgcgcatgcaatctggcacatctcaaccataccagtccatgttctgttttttagcttcctagaagacgattcactgtatttgctcaaggaaagtgaggacaaatttaagctggactag

SEQ ID NO: 109956 - protein, 299 aa, Artificial Sequence
  derived and/or modified sequence
MAGLAARLVLLAGAAALASGSQGDREPVYRDCVLQCEEQNCSGGALNHFRSRQPIYMSLAGWTCRDDCKYECMWVTVGLYLQEGHKVPQFHGKWPFSRFLFFQEPASAVASFLNGLASLVMLCRYRTFVPASSPMYHTCVAFAWKMDYFCASTVILHSIYLCCVRTVGLQHPAVVSAFRALLLLMLTVHVSYLSLIRFDYGYNLVANVAIGLVNVVWWLAWCLWNQRRLPHVRKCVVVVLLLQGLSLLELLDFPPLFWVLDAHAIWHISTIPVHVLFFSFLEDDSLYLLKESEDKFKLD

SEQ ID NO: 109957 - DNA, 900 bp, Artificial Sequence
  derived and/or modified sequence
atggccggcctggccgccagactggtgctgctggccggcgccgccgccctggccagcggcagccagggcgacagagagcccgtgtacagagactgcgtgctgcagtgcgaggagcagaactgcagcggcggcgccctgaaccacttcagaagcagacagcccatctacatgagcctggccggctggacctgcagagacgactgcaagtacgagtgcatgtgggtgaccgtgggcctgtacctgcaggagggccacaaggtgccccagttccacggcaagtggcccttcagcagattcctgttcttccaggagcccgccagcgccgtggccagcttcctgaacggcctggccagcctggtgatgctgtgcagatacagaaccttcgtgcccgccagcagccccatgtaccacacctgcgtggccttcgcctggaagatggactacttctgcgccagcaccgtgatcctgcacagcatctacctgtgctgcgtgagaaccgtgggcctgcagcaccccgccgtggtgagcgccttcagagccctgctgctgctgatgctgaccgtgcacgtgagctacctgagcctgatcagattcgactacggctacaacctggtggccaacgtggccatcggcctggtgaacgtggtgtggtggctggcctggtgcctgtggaaccagagaagactgccccacgtgagaaagtgcgtggtggtggtgctgctgctgcagggcctgagcctgctggagctgctggacttcccccccctgttctgggtgctggacgcccacgccatctggcacatcagcaccatccccgtgcacgtgctgttcttcagcttcctggaggacgacagcctgtacctgctgaaggagagcgaggacaagttcaagctggactag

SEQ ID NO: 109958 - DNA, 900 bp, Artificial Sequence
  derived and/or modified sequence
atggccgggttagccgctaggttggtattgctggcaggtgccgccgctctggcctcagggtcacagggggaccgcgaacctgtctaccgggactgtgtgctgcagtgcgaagaacaaaactgtagtggcggcgctctgaatcactttcggagtcgacagcccatctacatgagcttggctgggtggacttgtagggacgactgtaagtatgaatgtatgtgggtaactgtggggctgtacctccaagaggggcacaaggtgccacagttccacggcaagtggccattttctcggtttctgttcttccaagaaccagctagcgccgtggctagttttctgaacgggttagcctccctggtgatgttgtgtaggtacaggacgttcgtgcctgcatctagtcctatgtaccatacatgtgtcgcctttgcctggaagatggattacttctgcgcctcgacggtaatcctccactctatctacttgtgctgtgtgagaacagtggggttacagcatcctgccgtcgtcagcgcctttcgagcacttctgctcctaatgctgacagtacatgtgtcttatctgagccttattaggtttgattatggttataatctcgtggccaacgtggcgattggcctggttaatgtcgtgtggtggttggcgtggtgcttgtggaaccagcgacgtctgccgcatgtgagaaagtgtgtcgttgttgtgttgttgttgcagggcctcagcttgctggagctgctggacttcccacccctgttctgggtcctagatgcccacgctatttggcatatttccaccatcccagttcatgtgttattcttctcattcttagaggacgacagtttgtacttactaaaggagagcgaagacaagtttaagttagactag

SEQ ID NO: 109959 - DNA, 900 bp, Artificial Sequence
  derived and/or modified sequence
atggccggcctggccgcccggctggtgctgctggccggggctgctgccctggccagcggcagccagggcgaccgggagcctgtgtacagagactgtgtgctgcagtgtgaggagcagaactgcagcggcggggccctgaaccacttccgcagccggcagcccatctacatgagcctggccggctggacctgcagagatgactgcaagtatgagtgcatgtgggtgacagtgggcctgtacctgcaggagggccacaaggtgccccagttccacggcaagtggcccttcagccgcttcctgttcttccaggagcccgccagcgctgtggccagcttcctgaatggcctggccagcctggtgatgctgtgccgctaccgcacctttgtgcctgccagcagccccatgtaccacacctgtgtggcctttgcctggaagatggactacttctgtgccagcaccgtcatcctgcacagcatctacctgtgctgcgtgaggacagtgggcctgcagcaccctgctgtggtgtctgccttccgggccctgctgctgctgatgctgactgtgcacgtgtcctacctgagcctcatccgctttgattatggctacaacctggtggccaacgtggccatcggcctggtgaatgtggtgtggtggctggcctggtgcctgtggaaccagaggcggctgccccacgtgaggaaatgtgtggtggtggtgctgctgctgcagggcctgagcctgctggagctgctggacttccccccactcttctgggtgctggatgcccacgccatctggcacatcagcaccatccctgtgcacgtgctcttcttctccttcctggaggatgacagcctgtacctgctgaaggagagcgaggacaagttcaagctggactag

SEQ ID NO: 109960 - DNA, 900 bp, Artificial Sequence
  derived and/or modified sequence
atggccggcctggccgcccggctggtgctgctggccggcgccgccgccctcgcatcaggctcacagggggacagagaaccagtgtatagagattgcgtactgcagtgtgaagagcagaattgctcggggggtgccttgaatcactttaggtcgagacagcctatatatatgagcttagcagggtggacctgccgggacgattgtaagtacgagtgcatgtgggtgactgtgggtctgtatctgcaggagggccataaggtgccccagtttcatggcaagtggcccttttcccggttcctgttctttcaggagcccgcttccgccgtggctagttttttgaacggactggcaagcctcgtaatgctttgtcggtataggacattcgtacctgcaagctcacctatgtaccatacctgtgtggccttcgcgtggaagatggactacttttgcgcctccaccgtgatcctgcactcaatctacctgtgttgcgtccggactgtggggctgcagcacccggcagttgtcagcgccttccgtgcgctacttctcctcatgttaacggttcatgtcagctatctatctcttatccgcttcgactacggttataacctggtcgcgaatgtggctattggattagtcaacgtggtttggtggctggcatggtgtctgtggaaccagcgccgactacctcacgtccgaaaatgtgtcgtggtggtgctgctattgcagggcttgtccttgctggaactgctggacttccccccactcttctgggtactcgatgctcatgctatctggcacatctctactatcccagtacacgtgctgttcttttcgttcctcgaggatgactccctctaccttcttaaggagagcgaagacaaatttaaactcgactag

SEQ ID NO: 109961 - DNA, 970 bp, Artificial Sequence
  derived and/or modified sequence
atactcctaagctcctcccccggcggcgagccagggagaaaggatggccggcctggcggcgcggttggtcctgctagctggggcagcggcgctggcgagcggctcccagggcgaccgtgagccggtgtaccgcgactgcgtactgcagtgcgaagagcagaactgctctgggggcgctctgaatcacttccgctcccgccagccaatctacatgagtctagcaggctggacctgtcgggacgactgtaagtatgagtgtatgtgggtcaccgttgggctctacctccaggaaggtcacaaagtgcctcagttccatggcaagtggcccttctcccggttcctgttctttcaagagccggcatcggccgtggcctcgtttctcaatggcctggccagcctggtgatgctctgccgctaccgcaccttcgtgccagcctcctcccccatgtaccacacctgtgtggccttcgcctggaaaatggactacttctgtgcctccactgtcatcctacactcaatctacctgtgctgcgtcaggaccgtggggctgcagcacccagctgtggtcagtgccttccgggctctcctgctgctcatgctgaccgtgcacgtctcctacctgagcctcatccgcttcgactatggctacaacctggtggccaacgtggctattggcctggtcaacgtggtgtggtggctggcctggtgcctgtggaaccagcggcggctgcctcacgtgcgcaagtgcgtggtggtggtcttgctgctgcaggggctgtccctgctcgagctgcttgacttcccaccgctcttctgggtcctggatgcccatgccatctggcacatcagcaccatccctgtccacgtcctctttttcagctttctggaagatgacagcctgtacctgctgaaggaatcagaggacaagttcaagctggactgaagaccttggagcgagtctgccccagtg

SEQ ID NO: 109962 - DNA, 900 bp, Artificial Sequence
  derived and/or modified sequence
atggccggtctggccgctagactggttctgctggcaggggcagccgcattggcctccggctcccaaggagacagagaacccgtgtacagagattgcgtgctgcaatgcgaagagcagaactgttcaggcggagccctgaaccattttcggtcaaggcagcccatctacatgtcgttggccggatggacatgtcgagacgactgtaaatacgaatgcatgtgggttaccgtgggtttgtatctgcaggaagggcataaggtaccccagtttcacgggaaatggccattctctcggttcctgttttttcaggaacccgcaagtgcagttgcgtctttcctaaacggtctcgcctccctagtaatgctgtgcaggtatcgcacattcgtccccgctagtagccccatgtaccatacatgtgttgcttttgcctggaagatggattacttctgtgccagtacagtaattctgcatagcatttatctctgctgcgttaggactgtgggcttgcagcacccggcagtggtttccgcttttcgcgctctactgctcttaatgctcaccgtgcatgtctcctacctctccctgataagattcgattacggctacaatctggttgctaacgttgctatcggacttgtgaatgtggtttggtggctagcctggtgtctctggaaccagcgacggctgccccatgtgaggaagtgtgtagtggtggtacttctcttgcagggcctgagccttctggaattgctggacttcccccctctgttctgggttttagacgcacacgctatttggcacatctctacaattccggtgcacgtgctctttttctcctttctggaggacgattcactgtacctgctcaaggaatctgaggacaagttcaaactggattag

SEQ ID NO: 109963 - protein, 158 aa, Artificial Sequence
  derived and/or modified sequence
MAAAALRDPAQVPVAADLLTDHEEGYVTFEDVAVYFSQEEWRLLDDAQRLLYRNVMLENFTLLASLGCWHGAEAEEAPEQIASVGLLEVLAKQGGCSGKKTYECSECGKLFRDMSNLFIHQIVHTGERPYGCSNCGKSFSRNAHLIEHQRVHTGEKPF

SEQ ID NO: 109964 - DNA, 477 bp, Artificial Sequence
  derived and/or modified sequence
atggccgccgccgccctgagagaccccgcccaggtgcccgtggccgccgacctgctgaccgaccacgaggagggctacgtgaccttcgaggacgtggccgtgtacttcagccaggaggagtggagactgctggacgacgcccagagactgctgtacagaaacgtgatgctggagaacttcaccctgctggccagcctgggctgctggcacggcgccgaggccgaggaggcccccgagcagatcgccagcgtgggcctgctggaggtgctggccaagcagggcggctgcagcggcaagaagacctacgagtgcagcgagtgcggcaagctgttcagagacatgagcaacctgttcatccaccagatcgtgcacaccggcgagagaccctacggctgcagcaactgcggcaagagcttcagcagaaacgcccacctgatcgagcaccagagagtgcacaccggcgagaagcccttctag

SEQ ID NO: 109965 - DNA, 477 bp, Artificial Sequence
  derived and/or modified sequence
atggccgcagctgctctgcgcgatcctgcccaagtccctgtcgccgctgatctgctcaccgaccatgaagagggctacgtcacctttgaggatgtggcggtctatttctcccaggaggagtggagattactggatgacgctcaaaggctgctctacaggaatgttatgctggagaattttacactcttggcttctttaggctgctggcacggcgccgaggccgaggaggctccagaacagattgcaagcgttggactgctggaggtgctcgccaagcagggaggctgcagcgggaagaagacttatgagtgttctgagtgcggcaagctgttccgcgatatgtctaatctctttatccatcagatagtccacaccggcgagcgtccctatggatgttctaactgcggcaagagtttctctcgaaacgctcacctgatcgagcatcagagggtccacacaggtgagaagcccttctag

SEQ ID NO: 109966 - DNA, 477 bp, Artificial Sequence
  derived and/or modified sequence
atggctgctgctgccctgcgggaccctgcccaggtgcctgtggccgctgacctgctgacagaccacgaggagggctacgtgacctttgaagatgtggccgtgtacttcagccaggaggagtggaggctgctggatgatgcccagaggctgctgtacagaaatgtgatgctggagaacttcaccctgctggccagcctgggctgctggcacggggctgaggccgaggaggcccctgagcagatcgcctctgtgggcctgctggaggtgctggccaagcagggcggctgcagcggcaagaagacctatgaatgttctgaatgtgggaagctgttccgggacatgagcaacctcttcatccaccagatcgtgcacactggagagcggccctacggctgcagcaactgtgggaagagcttcagcagaaatgcccacctgattgagcaccagagggtgcacactggagagaagcccttctag

SEQ ID NO: 109967 - DNA, 477 bp, Artificial Sequence
  derived and/or modified sequence
atggccgccgccgccctgcgggaccccgcccaggtgcccgtggccgcagacctcctaaccgaccacgaagaagggtacgttacgttcgaggatgttgcagtgtacttcagtcaggaggaatggcgcctgctggacgatgcccagcgcctgttgtacaggaacgtcatgctcgagaactttacccttctggcctccctggggtgctggcacggcgccgaggctgaggaagcacccgaacagatcgcatccgtcgggctgttggaagttctcgcgaagcagggaggatgttcaggaaagaagacttacgaatgtagcgagtgtggcaagctgtttagggatatgtccaacctcttcattcaccagattgtgcacacgggggagcgtccctacgggtgtagcaactgcggcaagagctttagccgcaacgcacatctgattgagcatcagagggtccacacaggcgagaagcctttttag

SEQ ID NO: 109968 - DNA, 477 bp, Artificial Sequence
  derived and/or modified sequence
atggccgctgccgcactgcgagatccggcacaggtacccgttgccgctgacttgttaactgaccatgaggagggctacgtcacattcgaggacgttgctgtttacttcagccaagaggagtggcggctgctggatgacgcccagcggttactctatagaaatgtgatgctggagaattttaccctgttagcaagcctgggttgttggcacggtgcagaggccgaggaagctccagagcagatcgcatccgttggcctccttgaggtgcttgccaagcagggagggtgctccggcaagaaaacttacgagtgctcagagtgcggcaagcttttcagggatatgtcaaacctgtttatccatcagatagtccacaccggcgaacgtccatatggatgttctaactgcggtaagagcttcagccgcaatgcccatctcatcgagcatcaacgtgtgcacacaggagaaaaaccattctag

SEQ ID NO: 109969 - DNA, 714 bp, Artificial Sequence
  derived and/or modified sequence
gtgcgacacgcaatgggcgggacttccggcgtctcgtttggtattcactttcgcgactcaggtgaactaacctgcgagaagctggttgtgcgctgaggcgaccagcgccggaaggcacggtggcgactcacgctgttctcgccgctcagaggcgggtctgaggctcggtggcggcgcccagggtggcccgggccctttcctcggtcattgtctcccctccagctctactcacaggctccgatggcggcggccgccctgagggaccccgctcaggttcctgtggctgcagacttgcttacagaccatgaggagggctatgtgacctttgaggatgtggctgtctacttctcccaggaggaatggagattgcttgatgacgctcagaggctcctctaccgcaatgtgatgctggagaactttacacttctggcctctctgggttgttggcatggagccgaggctgaggaggctcctgagcagattgcttctgtaggactgctagaagtccttgcaaagcagggaggttgctcagggaaaaagacgtatgaatgcagtgaatgtgggaagttatttagagatatgtccaacctttttatacaccaaatagttcacactggagaaaggccttacgggtgtagtaactgtggaaaatcctttagccgtaatgctcacctcattgaacaccagagagttcacactggagaaaagcctttt

SEQ ID NO: 109970 - protein, 587 aa, Artificial Sequence
  derived and/or modified sequence
MASGAYNPYIEIIEQPRQRGMRFRYKCEGRSAGSIPGEHSTDNNRTYPSIQIMNYYGKGKVRITLVTKNDPYKPHPHDLVGKDCRDGYYEAEFGQERRPLFFQNLGIRCVKKKEVKEAIITRIKAGINPFNVPEKQLNDIEDCDLNVVRLCFQVFLPDEHGNLTTALPPVVSNPIYDNRAPNTAELRICRVNKNCGSVRGGDEIFLLCDKVQKDDIEVRFVLNDWEAKGIFSQADVHRQVAIVFKTPPYCKAITEPVTVKMQLRRPSDQEVSESMDFRYLPDEKDTYGNKAKKQKTTLLFQKLCQDHVNFPERPRPGLLGSIGEGRYFKKEPNLFSHDAVVREMPTGVSSQAESYYPSPGPISSGLSHHASMAPLPSSSWSSVAHPTPRSGNTNPLSSFSTRTLPSNSQGIPPFLRIPVGNDLNASNACIYNNADDIVGMEASSMPSADLYGISDPNMLSNCSVNMMTTSSDSMGETDNPRLLSMNLENPSCNSVLDPRDLRQLHQMSSSSMSAGANSNTTVFVSQSDAFEGSDFSCADNSMINESGPSNSTNPNSHGFVQDSQYSGIGSMQNEQLSDSFPYEFFQV

SEQ ID NO: 109971 - DNA, 1764 bp, Artificial Sequence
  derived and/or modified sequence
atggccagcggcgcctacaacccctacatcgagatcatcgagcagcccagacagagaggcatgagattcagatacaagtgcgagggcagaagcgccggcagcatccccggcgagcacagcaccgacaacaacagaacctaccccagcatccagatcatgaactactacggcaagggcaaggtgagaatcaccctggtgaccaagaacgacccctacaagccccacccccacgacctggtgggcaaggactgcagagacggctactacgaggccgagttcggccaggagagaagacccctgttcttccagaacctgggcatcagatgcgtgaagaagaaggaggtgaaggaggccatcatcaccagaatcaaggccggcatcaaccccttcaacgtgcccgagaagcagctgaacgacatcgaggactgcgacctgaacgtggtgagactgtgcttccaggtgttcctgcccgacgagcacggcaacctgaccaccgccctgccccccgtggtgagcaaccccatctacgacaacagagcccccaacaccgccgagctgagaatctgcagagtgaacaagaactgcggcagcgtgagaggcggcgacgagatcttcctgctgtgcgacaaggtgcagaaggacgacatcgaggtgagattcgtgctgaacgactgggaggccaagggcatcttcagccaggccgacgtgcacagacaggtggccatcgtgttcaagacccccccctactgcaaggccatcaccgagcccgtgaccgtgaagatgcagctgagaagacccagcgaccaggaggtgagcgagagcatggacttcagatacctgcccgacgagaaggacacctacggcaacaaggccaagaagcagaagaccaccctgctgttccagaagctgtgccaggaccacgtgaacttccccgagagacccagacccggcctgctgggcagcatcggcgagggcagatacttcaagaaggagcccaacctgttcagccacgacgccgtggtgagagagatgcccaccggcgtgagcagccaggccgagagctactaccccagccccggccccatcagcagcggcctgagccaccacgccagcatggcccccctgcccagcagcagctggagcagcgtggcccaccccacccccagaagcggcaacaccaaccccctgagcagcttcagcaccagaaccctgcccagcaacagccagggcatcccccccttcctgagaatccccgtgggcaacgacctgaacgccagcaacgcctgcatctacaacaacgccgacgacatcgtgggcatggaggccagcagcatgcccagcgccgacctgtacggcatcagcgaccccaacatgctgagcaactgcagcgtgaacatgatgaccaccagcagcgacagcatgggcgagaccgacaaccccagactgctgagcatgaacctggagaaccccagctgcaacagcgtgctggaccccagagacctgagacagctgcaccagatgagcagcagcagcatgagcgccggcgccaacagcaacaccaccgtgttcgtgagccagagcgacgccttcgagggcagcgacttcagctgcgccgacaacagcatgatcaacgagagcggccccagcaacagcaccaaccccaacagccacggcttcgtgcaggacagccagtacagcggcatcggcagcatgcagaacgagcagctgagcgacagcttcccctacgagttcttccaggtgtag

SEQ ID NO: 109972 - DNA, 1764 bp, Artificial Sequence
  derived and/or modified sequence
atggctagcggtgcttataacccttatatcgagatcatcgagcagccaaggcagcgcggaatgcggtttcgatacaagtgtgaggggaggagcgccggcagtatcccgggtgagcactcgacagataacaatcggacttatccttccatccagatcatgaattattacgggaaaggcaaggttagaatcactctggtcaccaagaatgacccgtataagcctcaccctcacgatttggtcggcaaagattgtcgtgacgggtactatgaggctgagttcggtcaggaaagacggcccttatttttccagaatctcggcatccgctgcgtgaagaaaaaagaagtgaaagaagcaattatcactcggatcaaagcaggcataaatccattcaacgtccccgagaagcaattaaatgacattgaggactgcgacctgaatgtcgttaggctctgcttccaggtatttcttccagatgagcacggaaatctaaccaccgcattacctcctgtcgtgtcaaatcctatctacgataatcgagccccaaacactgcggaactgcgtatttgccgagtaaataagaactgcggcagcgtcaggggaggagacgagatatttctcctctgtgataaagttcagaaagatgatattgaagtacggtttgtgcttaacgactgggaggccaaggggatctttagtcaggcagatgtgcataggcaggttgccatagttttcaaaacccccccgtattgtaaggcaatcacagaacctgtcacagttaagatgcagttgcgtcggcccagcgaccaggaagtgtcagagtctatggacttccggtatttacccgatgaaaaagatacatacggcaataaagccaagaaacagaagacgactcttctatttcagaagctgtgccaggaccatgtgaattttccggagcgccctaggcccggtcttttgggatcaataggtgagggtcgatactttaagaaagagccgaatctcttcagccacgacgctgttgttcgcgagatgcccaccggcgtgagcagccaggccgagtcttattaccctagccctggccccatcagtagcggtctgtcccatcacgcatcgatggccccgttgccttccagttcttggtcgagcgtggctcaccccactccacgctcaggtaacacaaacccactcagcagcttctcgacaaggactctgccatccaacagccagggaatcccacctttcctcaggatacctgtgggtaacgatctcaacgcatcaaatgcttgcatttacaacaatgctgacgacattgttgggatggaggcttctagcatgccttccgccgatctgtacggcatatccgaccctaacatgctgagcaattgctctgtgaacatgatgacgacttctagtgattctatgggagagacggataaccccaggcttctttcaatgaacctcgagaaccccagttgcaattcagtgcttgatcctagggacttacggcagcttcatcagatgagttcatcttctatgagcgcaggcgcgaactctaacacaaccgtattcgttagtcagagcgacgcatttgagggctcagatttctcttgtgctgacaatagcatgattaatgaatccgggccctccaacagcaccaatcctaactcccacgggtttgtgcaggactctcagtattcgggaattgggagtatgcaaaatgagcagctgagcgacagcttcccatacgagtttttccaggtttag

SEQ ID NO: 109973 - DNA, 1764 bp, Artificial Sequence
  derived and/or modified sequence
atggccagcggggcctacaacccctacatcgagatcatcgagcagccccggcagaggggcatgaggttccgctacaagtgtgagggccgctctgctggcagcatccctggagagcacagcacagacaacaacagaacctaccccagcatccagatcatgaactactacggcaagggcaaggtgcgcatcaccctggtgaccaagaatgacccctacaagccccacccccatgacctggtgggcaaggactgcagagatggctactatgaagctgagtttggccaggagcggcggcccctcttcttccagaacctgggcatccgctgtgtgaagaagaaggaggtgaaggaggccatcatcacccgcatcaaggccggcatcaaccccttcaacgtgcctgagaagcagctgaatgacatcgaggactgtgacctgaatgtggtgcggctgtgcttccaggtgttcctgcctgatgagcacggcaacctgaccacagccctgccccctgtggtgagcaaccccatctatgacaacagagcccccaacacagctgagctgcgcatctgccgggtgaacaagaactgtggctctgtgagaggaggagatgagatcttcctgctgtgtgacaaggtgcagaaggatgacatcgaggtgcgctttgtgctgaatgactgggaggccaagggcatcttcagccaggctgatgtgcaccggcaggtggccatcgtgttcaagaccccaccctactgcaaggccatcacagagcctgtgacagtgaagatgcagctgcggcggcccagcgaccaggaggtgtctgagagcatggacttccgctacctgcctgatgagaaggacacctacggcaacaaggccaagaagcagaagaccaccctgctcttccagaagctgtgccaggaccacgtgaacttccctgagcggccccggcccggcctgctgggcagcatcggggagggccgctacttcaagaaggagcccaacctcttcagccatgatgctgtggtgcgggagatgcccaccggggtgagcagccaggccgagagctactaccccagccctggccccatcagcagcggcctgagccaccacgcctccatggcccccctgcccagcagctcctggagctctgtggcccaccccacccccaggagcggcaacaccaaccccctgagcagcttcagcaccaggaccctgcccagcaacagccagggcatcccccccttcctgcgcatccctgtgggcaatgacctgaatgccagcaatgcctgcatctacaacaatgctgatgacatcgtgggcatggaggccagctccatgcccagcgctgacctgtatggcatcagtgaccccaacatgctgagcaactgcagcgtgaacatgatgaccaccagcagtgacagcatgggagaaacagacaacccccggctgctgtccatgaacctggagaaccccagctgcaacagcgtgctggacccccgggacctgcggcagctgcaccagatgagcagcagctccatgtctgctggggccaacagcaacaccaccgtgtttgtgtcccagagtgatgcctttgagggcagtgacttcagctgtgccgacaacagcatgatcaatgaaagtggccccagcaacagcaccaaccccaacagccacggctttgtgcaggacagccagtacagcggcatcggctccatgcagaatgagcagctgagtgacagcttcccctatgagttcttccaggtgtag

SEQ ID NO: 109974 - DNA, 1764 bp, Artificial Sequence
  derived and/or modified sequence
atggccagcggcgcctacaacccctacatcgagatcatcgagcagcctaggcaacgggggatgagattcaggtacaaatgtgaggggcgatccgccggtagcatccccggtgagcacagtaccgacaataataggacatatccctcaatacaaatcatgaactattacggcaaagggaaggttcggatcacattggtcaccaaaaacgatccatataaaccgcacccacatgacctcgtgggcaaggattgtcgggatgggtactatgaggctgaattcgggcaagagcgccgtcccctgtttttccagaatttgggcatcaggtgtgttaagaaaaaagaagtgaaagaggccatcatcacacgcattaaagctgggatcaatccgtttaacgttccggagaaacagctcaatgatattgaggattgtgatctcaatgtagtaagactctgctttcaggtctttcttccagacgaacacggcaatctgaccactgccctgccaccagtggtctccaacccaatatatgataacagagcccctaacacagcggagctccggatttgcagggttaataagaactgcgggagcgtgcgtggcggcgatgaaatcttcctgttgtgcgataaggtccagaaggacgacatcgaggttaggttcgtccttaatgactgggaggcgaaaggcatctttagtcaggcagacgtacaccgccaagtcgcaattgtctttaaaaccccgccatattgtaaggcaataacagaaccagtaaccgtgaagatgcagctgagacgcccgtctgaccaggaagtgtccgaatctatggattttagatacttgcctgacgagaaggacacctacggtaataaggcaaagaaacaaaagaccactctgttgttccagaaactgtgccaggatcacgtgaacttccccgagcggcccagacctggtctgctgggcagcattggagaggggcgatattttaagaaggagccaaacctgttctcccatgacgccgttgtccgggagatgccgaccggagtgtctagccaggccgaatcatactaccccagcccaggcccaatcagttccggtctcagccaccacgcaagcatggccccattgccatcatcctcttggtccagtgtggctcaccctactcccagatcaggcaacactaatccgcttagctctttctcaacaagaactctgccgagcaatagtcaggggatcccccccttcctgagaatccctgtcggcaatgacctgaacgcctccaacgcatgtatctacaataatgctgatgacatcgttggtatggaggccagttcaatgccttccgctgacctttatggtatctctgatcctaacatgttaagcaactgtagtgtgaacatgatgacaacgagtagcgactcaatgggagagacagacaatccgagattgctcagcatgaacctggagaacccatcctgtaattctgtgctggaccctcgtgacctgcgtcaactgcaccagatgtcatccagctccatgtctgccggcgcaaatagcaatacgaccgtgttcgtaagccagtccgacgcatttgaggggtctgatttctcatgcgctgataatagcatgattaacgagagcggaccaagcaattcgactaatccaaactcccacgggttcgtgcaagactcccaatactctggtattggaagtatgcagaacgagcagctcagtgactccttcccctatgagtttttccaggtttag

SEQ ID NO: 109975 - DNA, 1764 bp, Artificial Sequence
  derived and/or modified sequence
atggccagcggcgcatacaacccttacatcgaaatcatagagcagccgcgacagaggggcatgagatttcgatacaaatgtgaagggcgttcagctggttcgatcccaggcgaacactccacagacaacaatcggacatatccatccattcagattatgaattattacggcaaaggcaaggtgagaatcactctcgtgacaaagaacgacccctataaaccccatccacacgatctggtggggaaggactgccgcgacggttactacgaagctgaattcggccaggagcgccgtcctctgttctttcagaacctcggcattagatgcgtaaaaaaaaaagaagtcaaggaagctattattaccagaatcaaggccggaatcaatccattcaatgtcccggagaagcaactgaatgacattgaggactgcgacctgaacgtagtccgtctgtgtttccaggtgtttctacctgacgaacatggcaatctgaccacagctttgccgccagtggtgtctaatcccatttacgataacagagcacccaatacagcagaactcagaatttgtagggtgaataaaaactgtggcagtgttagggggggagatgagattttcttgctgtgcgacaaagtacaaaaagatgacatcgaggtgaggttcgtgttaaacgactgggaagctaagggtatcttttctcaggccgatgtccacagacaggtagccattgtgtttaagacacctccctattgtaaggcaattacagagcccgtgactgttaagatgcagctgaggcgcccatctgaccaggaggtctcggagagcatggattttcgatacctccccgatgaaaaggatacttacggaaataaggcgaagaaacagaagaccaccctgctatttcagaagctctgtcaggatcacgtgaacttccccgagcgacctcggcctggactcttgggctcaatcggagaagggagatacttcaaaaaagaacccaatctttttagccacgacgccgtcgttagggagatgccgactggtgtgagttcacaggccgaaagctattacccttcacctggtccaatttccagtggcctgtctcaccacgcttccatggcaccgctaccctcctctagctggtcctccgttgcacacccaaccccgcgttccggcaataccaatccgctgtccagcttttccactagaacacttccatctaacagccagggaattccccctttcctgcgcatacccgtgggcaacgacttgaacgctagcaatgcatgtatctataacaatgccgacgacatcgtcggtatggaagcatctagcatgccaagcgccgatctctacggcatcagtgatcctaatatgctcagcaattgttccgtgaatatgatgacgacatcttctgacagcatgggtgagaccgacaaccccaggttgctatctatgaatttagagaatcccagttgtaactcagttctcgaccctagggatctccgtcagctgcatcagatgtccagctcttctatgagtgccggtgccaactctaacaccactgtttttgtttcccaatcagacgcgtttgaagggtccgatttttcctgtgcagacaattccatgataaatgaatctggtccaagtaacagtaccaatccaaactcgcacggcttcgtgcaggattcgcagtattcggggataggcagcatgcagaacgaacaattatccgattcattcccatacgagttctttcaggtctag

SEQ ID NO: 109976 - DNA, 2398 bp, Artificial Sequence
  derived and/or modified sequence
caggggttgggaaggtgtgagccgcaaacccagcggagggcgggaagaaggaggaggcctctagggtggtcgggggactgggggccccgccggcagaggtccctcggcctcctgactgactgactgcggccgcctccggccaggacgctgggagctgcctgcgggaaggtgcggggagcggagccatggcctccggtgcgtataacccgtatatagagataattgaacaacccaggcagaggggaatgcgttttagatacaaatgtgaagggcgatcagcaggcagcattccaggggagcacagcacagacaacaaccgaacatacccttctatccagattatgaactattatggaaaaggaaaagtgagaattacattagtaacaaagaatgacccatataaacctcatcctcatgatttagttggaaaagactgcagagacggctactatgaagcagaatttggacaagaacgcagacctttgtttttccaaaatttgggtattcgatgtgtgaagaaaaaagaagtaaaagaagctattattacaagaataaaggcaggaatcaatccattcaatgtccctgaaaaacagctgaatgatattgaagattgtgacctcaatgtggtgagactgtgttttcaagtttttctccctgatgaacatggtaatttgacgactgctcttcctcctgttgtctcgaacccaatttatgacaaccgtgctccaaatactgcagaattaaggatttgtcgtgtaaacaagaattgtggaagtgtcagaggaggagatgaaatatttctactttgtgacaaagttcagaaagatgacatagaagttcgttttgtgttgaacgattgggaagcaaaaggcatcttttcacaagctgatgtacaccgtcaagtagccattgttttcaaaactccaccatattgcaaagctatcacagaacccgtaacagtaaaaatgcagttgcggagaccttctgaccaggaagttagtgaatctatggattttagatatctgccagatgaaaaagatacttacggcaataaagcaaagaaacaaaagacaactctgcttttccagaaactgtgccaggatcacgttaattttcctgagagaccaagacctggtctcctcggttcaattggagaaggaagatacttcaaaaaagaaccaaacttgttttctcatgatgcagttgtgagagaaatgcctacaggggtttcaagtcaagcagaatcctactatccctcacctgggcccatctcaagtggattgtcacatcatgcctcaatggcacctctgccttcttcaagctggtcatcagtggcccaccccaccccacgctcaggcaatacaaacccactgagtagtttttcaacaaggacacttccttctaattcgcaaggtatcccaccattcctgagaatacctgttgggaatgatttaaatgcttctaatgcttgcatttacaacaatgccgatgacatagtcggaatggaagcgtcatccatgccatcagcagatttatatggtatttctgatcccaacatgctgtctaattgttctgtgaatatgatgacaaccagcagtgacagcatgggagagactgataatccaagacttctgagcatgaatcttgaaaacccctcatgtaattcagtgttagacccaagagacttgagacagctccatcagatgtcctcttccagtatgtcagcaggcgccaattccaatactactgtttttgtttcacaatcagatgcatttgagggatctgacttcagttgtgcagataacagcatgataaatgagtcgggaccatcaaacagtactaatccaaacagtcatggttttgttcaagatagtcagtattcaggtattggcagtatgcaaaatgagcaattgagtgactcctttccatatgaattttttcaagtataacttgcaagatttaaatccttttaaatcttgataccacctatatagatgcagcattttgtatttgtctaactggggatataatactatatttatactgtatatataatactgactgagaatataatactgtatttgagaatataaaaaacttttttcagggaagaagcatacaactttggacatagcgaatacaaaattggaagctgtcataaaaagacaactcagaggccaggcgcaggggctcacacctgtaatcctagcactttgggaggccaaggcgggtggatcacttgagaccaggaattcgagaccagcctggccaacatggtgaaaccccgtctctactaaaaatacaaaaattagctgagcatggtggtacgtgcctgtactgtcagctacttgggaggctgaggcacaataattgtttgaacccaggaagcagaggttgc

SEQ ID NO: 109977 - protein, 251 aa, Artificial Sequence
  derived and/or modified sequence
MSDTEEQEYEEEQPEEEAAEEEEEEEERPKPSRPVVPPLIPPKIPEGERVDFDDIHRKRMEKDLLELQTLIDVHFEQRKKEEEELVALKERIERRRSERAEQQRFRTEKERERQAKLAEEKMRKEEEEAKKRAEDDAKKKKVLSNMGAHFGGYLVKAEQKRGKRQTGREMKVRILSERKKPLDIDYMGEEQLREKAQELSDWIHQLESEKFDLMAKLKQQKYEINVLYNRISHAQKFRKGAGKGRVGGRWK

SEQ ID NO: 109978 - protein, 251 aa, Artificial Sequence
  derived and/or modified sequence
MSDTEEQEYEEEQPEEEAAEEEEEAPEEPEPVRPVVPPLIPPKIPEGERVDFDDIHRKRMEKDLLELQTLIDVHFEQRKKEEEELVALKERIERRRSERAEQQRFRTEKERERQAKLAEEKMRKEEEEAKKRAEDDAKKKKVLSNMGAHFGGYLVKAEQKRGKRQTGREMKVRILSERKKPLDIDYMGEEQLREKAQELSDWIHQLESEKFDLMAKLKQQKYEINVLYNRISHAQKFRKGAGKGRVGGRWK

SEQ ID NO: 109979 - DNA, 756 bp, Artificial Sequence
  derived and/or modified sequence
atgagcgacaccgaggagcaggagtacgaggaggagcagcccgaggaggaggccgccgaggaggaggaggaggaggaggagagacccaagcccagcagacccgtggtgccccccctgatcccccccaagatccccgagggcgagagagtggacttcgacgacatccacagaaagagaatggagaaggacctgctggagctgcagaccctgatcgacgtgcacttcgagcagagaaagaaggaggaggaggagctggtggccctgaaggagagaatcgagagaagaagaagcgagagagccgagcagcagagattcagaaccgagaaggagagagagagacaggccaagctggccgaggagaagatgagaaaggaggaggaggaggccaagaagagagccgaggacgacgccaagaagaagaaggtgctgagcaacatgggcgcccacttcggcggctacctggtgaaggccgagcagaagagaggcaagagacagaccggcagagagatgaaggtgagaatcctgagcgagagaaagaagcccctggacatcgactacatgggcgaggagcagctgagagagaaggcccaggagctgagcgactggatccaccagctggagagcgagaagttcgacctgatggccaagctgaagcagcagaagtacgagatcaacgtgctgtacaacagaatcagccacgcccagaagttcagaaagggcgccggcaagggcagagtgggcggcagatggaagtag

SEQ ID NO: 109980 - DNA, 522 bp, Artificial Sequence
  derived and/or modified sequence
agcaaggcccagccccaggacagccagcacctgagacacagcctgggcagaaccagaatgagcgacaccgaggagcaggagtacgaggaggagcagcccgaggaggaggccgccgaggaggaggaggagggcgaggtgcccgacagcgccgaggaggagagacccaagcccagcagacccgtggtgccccccctgatcccccccaagatccccgagggcgagagagtggacttcgacgacatccacagaaagagaatggagaaggacctgctggagctgcagaccctgatcgacgtgcacttcgagcagagaaagaaggaggaggaggagctggtggccctgaaggagagaatcgagagaagaagaagcgagagagccgagcagcagagattcagaaccgagaaggagagagagagacaggccaagctggccgaggagaagatgagaaaggaggaggaggaggccaagaagagagccgaggacgacgccaagaagaagaagaagaagaagaagaagaagtag

SEQ ID NO: 109981 - DNA, 756 bp, Artificial Sequence
  derived and/or modified sequence
atgagcgacaccgaggagcaggagtacgaggaggagcagcccgaggaggaggccgccgaggaggaggaggaggcccccgaggagcccgagcccgtgagacccgtggtgccccccctgatcccccccaagatccccgagggcgagagagtggacttcgacgacatccacagaaagagaatggagaaggacctgctggagctgcagaccctgatcgacgtgcacttcgagcagagaaagaaggaggaggaggagctggtggccctgaaggagagaatcgagagaagaagaagcgagagagccgagcagcagagattcagaaccgagaaggagagagagagacaggccaagctggccgaggagaagatgagaaaggaggaggaggaggccaagaagagagccgaggacgacgccaagaagaagaaggtgctgagcaacatgggcgcccacttcggcggctacctggtgaaggccgagcagaagagaggcaagagacagaccggcagagagatgaaggtgagaatcctgagcgagagaaagaagcccctggacatcgactacatgggcgaggagcagctgagagagaaggcccaggagctgagcgactggatccaccagctggagagcgagaagttcgacctgatggccaagctgaagcagcagaagtacgagatcaacgtgctgtacaacagaatcagccacgcccagaagttcagaaagggcgccggcaagggcagagtgggcggcagatggaagtag

SEQ ID NO: 109982 - DNA, 579 bp, Artificial Sequence
  derived and/or modified sequence
atggagaaggacctgctggagctgcagaccctgatcgacgtgcacttcgagcagagaaagaaggaggaggaggagctggtggccctgaaggagagaatcgagagaagaagaagcgagagagccgagcagcagagattcagaaccgagaaggagagagagagacaggccaagctggccgaggagaagatgagaaaggaggaggaggaggccaagaagagagccgaggacgacgccaagaagaagaaggtgctgagcaacatgggcgcccacttcggcggctacctggtgaaggccgagcagaagagaggcaagagacagaccggcagagagatgaaggtgagaatcctgagcgagagaaagaagcccctggacatcgactacatgggcgaggagcagctgagagagaaggcccaggagctgagcgactggatccaccagctggagagcgagaagttcgacctgatggccaagctgaagcagcagaagtacgagatcaacgtgctgtacaacagaatcagccacgcccagaagttcagaaagggcgccggcaagggcagagtgggcggcagatggaagtag

SEQ ID NO: 109983 - DNA, 756 bp, Artificial Sequence
  derived and/or modified sequence
atgtccgacactgaggaacaggagtatgaagaggagcagccagaggaagaagctgcagaggaggaggaagaggaagaggaaaggccgaagccttctcggcccgtggtacctccactgatcccacctaagattcccgaaggcgagcgtgttgatttcgacgacatccatagaaagcgaatggagaaagacctgctcgagttacagaccctcattgacgtgcatttcgaacaacggaagaaggaggaggaagagctggtagccctgaaggaaaggattgaacgccgtcgtagtgagagggccgagcaacagcgcttcagaacagaaaaggaaagggagcggcaggctaaattagccgaagaaaaaatgagaaaggaggaggaagaggcaaagaagagagccgaagacgacgccaagaaaaaaaaagtccttagtaacatgggggcccactttgggggttatctggtgaaagcagaacagaaaaggggaaagcggcaaacaggacgagagatgaaagttaggatactgagcgaaaggaaaaaaccactcgacatcgattacatgggggaggagcaacttagagagaaggcacaggagctgagcgattggatccaccagttagagagtgaaaaatttgatctgatggctaagctgaagcagcagaaatacgagattaatgtgctctacaaccggatcagtcatgcccaaaagtttaggaagggcgcaggcaaaggcagggtggggggcagatggaagtag

SEQ ID NO: 109984 - DNA, 522 bp, Artificial Sequence
  derived and/or modified sequence
agtaaggctcagccgcaggattcccagcacttaaggcactcactggggcgcacgcgcatgagcgacaccgaagagcaggaatatgaagaggaacagcccgaggaagaagccgcagaggaggaagaggagggggaagttcccgactcagccgaagaggagcgccctaaaccaagcaggccggtggtccctccactcatcccgccaaagatcccagaaggggagagagtcgattttgatgacattcacaggaagcgcatggagaaggatctgcttgaactacagaccctgattgatgtgcacttcgagcagcgaaaaaaggaggaggaagaactggtggccctcaaggagcgcatagagcgcagacgatctgagagggctgagcaacagcggtttaggacagaaaaagagcgggagcgtcaggcaaagttggcagaagaaaaaatgaggaaagaggaagaagaagccaaaaaacgggccgaggatgacgccaaaaaaaaaaagaagaagaaaaaaaagaaatag

SEQ ID NO: 109985 - DNA, 756 bp, Artificial Sequence
  derived and/or modified sequence
atgtctgacaccgaagagcaggagtatgaagaggagcaacccgaagaggaagccgccgaagaggaggaagaggcaccagaagaacccgagcccgtgcgtccagttgtgcctcctctgattcccccaaaaatccctgaaggggaaagagtcgatttcgacgatatacacagaaaacggatggaaaaggacctattagagctgcaaactttgatcgacgtacattttgaacagcggaagaaagaagaggaggaattggtggccctgaaggagcggatcgagcgcaggcggagcgagcgcgccgaacagcagaggttcaggactgaaaaggagagagagcgccaggcgaagttggcagaagaaaaaatgaggaaggaagaggaggaggctaagaagcgggcggaagacgacgctaaaaagaagaaggtgctttccaatatgggggcccacttcggtggctacttagtgaaagccgaacagaagagaggcaagcggcagacaggcagggagatgaaggtcaggattctgagcgagcggaagaaacctctcgatatagattatatgggggaagaacagctgagggaaaaagcgcaggaattaagcgactggatccaccagctggagagtgaaaaattcgacctaatggcgaagctgaagcagcaaaagtatgaaatcaatgttctttataatagaatttcacacgcacagaaattcaggaaaggcgcgggcaagggacgagtcggaggccgttggaaatag

SEQ ID NO: 109986 - DNA, 579 bp, Artificial Sequence
  derived and/or modified sequence
atggagaaggacctcttggagctgcagacactgatcgatgttcactttgagcagcgtaagaaggaggaagaagaactggtcgctctgaaagagaggatcgagagaaggagatcggaaagggcagagcaacaacggttccgcacagaaaaggagcgcgagaggcaggcaaagttagccgaagagaaaatgcgaaaggaagaggaagaggcgaaaaagcgtgccgaagatgatgctaagaaaaagaaggtcctgtcaaacatgggggcccatttcggcggatacctggtaaaggccgagcaaaagcgaggtaaacggcagacaggccgggagatgaaggtaaggatactttccgaacgcaagaaacctctggatatcgactacatgggagaggaacagttacgggaaaaggcccaggaactgtccgactggatccatcaactggaaagcgagaaattcgatctgatggctaaattgaagcaacagaaatacgaaatcaatgtcctttacaatcgcatatcacacgcccagaaattccgaaaaggggcaggcaaagggcgagttggcggaaggtggaaatag

SEQ ID NO: 109987 - DNA, 756 bp, Artificial Sequence
  derived and/or modified sequence
atgtctgacacagaggagcaggagtatgaggaggagcagcctgaggaggaggccgctgaggaggaggaggaggaggaggagcggcccaagcccagcaggcctgtggtgcccccactcatcccccccaagatccctgagggggagcgggtggactttgatgacatccacaggaagaggatggagaaggacctgctggagctgcagaccctgattgatgtgcactttgagcagaggaagaaggaggaggaggagctggtggccctgaaggagcgcatcgagaggagaagaagtgagcgggcagagcagcagcgcttcagaacagagaaggagcgggagcggcaggccaagctggccgaggagaagatgaggaaggaggaggaggaggccaagaagagagcagaagatgatgccaagaagaagaaggtgctgagcaacatgggcgcccactttggaggctacctggtgaaggccgagcagaagaggggcaagaggcagacaggccgggagatgaaggtgcgcatcctgtctgagaggaagaagcccctggacatcgactacatgggagaggagcagctgcgggagaaggcccaggagctgagtgactggatccaccagctggagagcgagaagtttgacctgatggccaagctgaagcagcagaagtatgagatcaacgtgctgtacaaccgcatcagccacgcccagaagttcagaaaaggagctgggaagggccgggtgggcggccgctggaagtag

SEQ ID NO: 109988 - DNA, 522 bp, Artificial Sequence
  derived and/or modified sequence
agcaaggcccagccccaggacagccagcacctgcggcacagcctgggccgcaccaggatgtctgacacagaggagcaggagtatgaggaggagcagcctgaggaggaggccgctgaggaggaggaggagggggaggtgcctgattctgctgaggaggagcggcccaagcccagcaggcctgtggtgcccccactcatcccccccaagatccctgagggggagcgggtggactttgatgacatccacaggaagaggatggagaaggacctgctggagctgcagaccctgattgatgtgcactttgagcagaggaagaaggaggaggaggagctggtggccctgaaggagcgcatcgagaggagaagaagtgagcgggcagagcagcagcgcttcagaacagagaaggagcgggagcggcaggccaagctggccgaggagaagatgaggaaggaggaggaggaggccaagaagagagcagaagatgatgccaagaagaagaagaagaagaagaagaagaagtag

SEQ ID NO: 109989 - DNA, 756 bp, Artificial Sequence
  derived and/or modified sequence
atgtctgacacagaggagcaggagtatgaggaggagcagcctgaggaggaggccgctgaggaggaggaggaggcccctgaggagcctgagcctgtgcggcctgtggtgcccccactcatcccccccaagatccctgagggggagcgggtggactttgatgacatccacaggaagaggatggagaaggacctgctggagctgcagaccctgattgatgtgcactttgagcagaggaagaaggaggaggaggagctggtggccctgaaggagcgcatcgagaggagaagaagtgagcgggcagagcagcagcgcttcagaacagagaaggagcgggagcggcaggccaagctggccgaggagaagatgaggaaggaggaggaggaggccaagaagagagcagaagatgatgccaagaagaagaaggtgctgagcaacatgggcgcccactttggaggctacctggtgaaggccgagcagaagaggggcaagaggcagacaggccgggagatgaaggtgcgcatcctgtctgagaggaagaagcccctggacatcgactacatgggagaggagcagctgcgggagaaggcccaggagctgagtgactggatccaccagctggagagcgagaagtttgacctgatggccaagctgaagcagcagaagtatgagatcaacgtgctgtacaaccgcatcagccacgcccagaagttcagaaaaggagctgggaagggccgggtgggcggccgctggaagtag

SEQ ID NO: 109990 - DNA, 579 bp, Artificial Sequence
  derived and/or modified sequence
atggagaaggacctgctggagctgcagaccctgattgatgtgcactttgagcagaggaagaaggaggaggaggagctggtggccctgaaggagagaattgaaagaagaagaagtgaaagagctgagcagcagcgcttcagaacagagaaggagcgggagcggcaggccaagctggccgaggagaagatgaggaaggaggaggaggaggccaagaagagagcagaagatgatgccaagaagaagaaggtgctgagcaacatgggcgcccactttggaggctacctggtgaaggccgagcagaagaggggcaagaggcagacaggccgggagatgaaggtgcgcatcctgtctgagaggaagaagcccctggacatcgactacatgggagaggagcagctgcgggagaaggcccaggagctgagtgactggatccaccagctggagagcgagaagtttgacctgatggccaagctgaagcagcagaagtatgagatcaacgtgctgtacaaccgcatcagccacgcccagaagttcaggaagggggccggcaagggccgggtgggcggccgctggaagtag

SEQ ID NO: 109991 - DNA, 756 bp, Artificial Sequence
  derived and/or modified sequence
atgagcgacaccgaggagcaggagtacgaggaggagcagcccgaggaggaggcagcagaggaggaagaagaggaggaggagagacctaaaccctcgcgcccagtggtccctcctctcatcccgcccaagatcccagagggagaacgcgtcgacttcgacgatatccacagaaaaaggatggaaaaggatctgctggagctgcaaactctgatagacgtgcacttcgagcaaagaaaaaaggaagaagaggaactggtcgcattaaaggagcggatcgagagaaggcgttcggaacgcgcagagcaacagcggtttcgtaccgagaaggaacgcgagagacaagctaagttggccgaagaaaagatgcgcaaggaagaagaggaggcaaaaaaacgggctgaggatgacgccaagaagaagaaggtcctgtctaacatgggagcacacttcgggggatacctggtgaaggcagagcagaaacgcggcaaaagacagactggtagggaaatgaaggtgcggatcctgagtgaaaggaaaaagcccctcgatatagactacatgggggaggaacagctgagggagaaagcccaagagctgagtgactggatccaccagctagagtctgagaagtttgatctgatggccaaactcaagcagcagaagtacgagatcaatgtgctgtacaacagaataagtcacgcccagaaatttcgaaagggcgctggcaagggccgagttggagggcgatggaagtag

SEQ ID NO: 109992 - DNA, 522 bp, Artificial Sequence
  derived and/or modified sequence
agcaaggcccagccccaggacagccagcacctgcggcacagcctggggcggacgaggatgtcggacacagaagagcaggaatatgaagaggagcagcctgaggaagaagccgccgaagaagaggaggaaggggaggtgcctgatagcgcggaagaggagcgacctaaaccctcgcgacctgtcgtgcctcccctcatcccccccaaaatcccagagggtgagagagtcgattttgacgacatccatcggaagaggatggaaaaggaccttcttgagcttcagaccctgatcgacgttcattttgagcagagaaagaaggaagaagaagagctggtggccctaaaggaaagaatcgaacggaggcgcagtgaaagagctgagcagcagaggttccgcacagagaaggagcgagaacggcaggccaagctcgcagaagagaagatgcgaaaggaggaggaggaggccaagaagagagccgaggacgatgcaaagaaaaagaaaaaaaaaaaaaaaaaaaagtag

SEQ ID NO: 109993 - DNA, 756 bp, Artificial Sequence
  derived and/or modified sequence
atgagcgacaccgaggagcaggagtacgaggaggagcagcccgaggaggaagcggccgaggaagaggaggaagctcccgaagagcccgaacccgtgagaccagtggtgcctcccttgattccgcctaaaatccctgagggggagcgcgtggactttgacgacatccacagaaagagaatggagaaggatctactagagctacagacactaatagatgtccattttgaacaacgcaaaaaagaggaggaagaactggtggctttaaaggaaagaattgagagaaggcgatctgagagagcagagcagcagcggttccgcaccgagaaggaacgcgagcggcaggctaagcttgcggaggaaaaaatgcggaaggaggaggaagaggctaaaaagagggctgaggatgacgctaaaaaaaagaaggtgctaagcaatatgggagctcatttcgggggttatctggttaaagctgaacagaaaagggggaagcgccagactgggagagagatgaaggtgagaattctctcagaaaggaaaaaaccactggatatcgactatatgggagaggaacagctccgggagaaggcccaggaactctctgactggattcaccagctggaatcggaaaagttcgatctgatggcaaagcttaaacagcaaaaatatgaaattaatgttctgtacaatcgaatcagccatgctcagaagttccgcaagggtgctggcaagggccgagtcggagggcggtggaaatag

SEQ ID NO: 109994 - DNA, 579 bp, Artificial Sequence
  derived and/or modified sequence
atggagaaggacctgctggagctgcagaccctgatcgacgtgcactttgagcaaaggaagaaggaggaagaggaactcgtggctctcaaagagcggatcgagaggagacggtctgagcgggctgagcagcagaggtttcgcacggagaaggagagagaacgccaggctaaactggctgaggaaaagatgaggaaagaggaggaagaggccaaaaaaagggccgaggacgacgccaagaagaagaaggtgctgtcaaatatgggagcacactttgggggttatctggttaaagccgagcagaaaaggggcaaacggcaaacggggcgcgagatgaaagtgagaatcttaagtgaacgcaagaaaccgttagacattgactacatgggtgaggagcagctccgggaaaaagcacaggagctatcagattggattcatcagctggaatcggaaaaatttgacctgatggccaagctgaagcagcagaaatacgagataaacgttttgtacaaccgcatcagtcacgcccaaaagttccgcaagggagcaggtaaagggcgcgtaggcggacgctggaagtag

SEQ ID NO: 109995 - DNA, 756 bp, Artificial Sequence
  derived and/or modified sequence
atgagtgacaccgaagagcaggagtatgaggaggaacagcctgaagaagaggcggctgaagaggaagaagaagaggaagagcggcctaagcccagcaggccagtggttccccctttgatcccccctaaaattcctgaaggagagagggtcgacttcgacgacattcaccggaagcgcatggaaaaggacttgctggagttgcagacactgattgacgtgcacttcgaacaacggaaaaaggaagaagaagagctggtggcactgaaggaaagaatcgaacgtcgccgaagcgaacgcgcagaacagcagcggtttcgcacagaaaaggagcgcgagcgacaggccaagctggctgaagagaaaatgcgcaaggaagaggaggaggccaagaagagggcggaggatgacgctaagaaaaagaaggtcctgtctaatatgggagcgcatttcgggggttacttagttaaggcagaacagaaacgcggaaagaggcaaacaggtcgggagatgaaggtgcggatcttgtctgaacgaaaaaaacccctggacattgattatatgggggaggaacagctccgagaaaaggcacaggaacttagtgactggatacatcagcttgagtccgaaaaatttgatcttatggccaaacttaagcagcagaaatacgagatcaatgtgttgtacaatagaatcagccacgcccaaaaattccggaaaggtgcagggaagggtagagtcggcggtaggtggaaatag

SEQ ID NO: 109996 - DNA, 522 bp, Artificial Sequence
  derived and/or modified sequence
tctaaagcgcagccgcaggactcacaacatctgcggcattcactcgggcgtacccgcatgtcagacacggaagaacaagaatacgaagaagagcagcccgaagaggaagcagcagaggaggaagaggaaggcgaggtccctgattcggcagaagaagagagacctaaaccgagcaggcctgtggttccccctctcattcccccaaaaattcccgagggcgaacgggtggattttgatgacattcacaggaagagaatggagaaggatctactggagctgcagactcttatcgatgtgcatttcgagcagcggaagaaggaggaggaggaacttgtcgcgcttaaggaaagaatcgagaggaggcgcagcgaacgggctgagcaacagaggtttcggactgagaaggaacgggaaaggcaggctaagctggcggaagaaaagatgcgcaaagaagaagaggaagctaaaaagcgtgccgaggacgacgctaaaaagaaaaaaaaaaaaaaaaagaaaaaatag

SEQ ID NO: 109997 - DNA, 756 bp, Artificial Sequence
  derived and/or modified sequence
atgagcgacactgaagaacaggaatatgaggaggagcagcccgaggaagaagcagctgaggaggaggaagaagctcctgaagagcctgagccagttcgccctgtagtgcctcctctcatccccccaaaaatccccgaaggcgaacgcgtggattttgacgacattcaccgcaagcgcatggagaaggacttgcttgagctgcaaactttaatcgacgtccatttcgagcagcgcaagaaagaagaagaggagctcgttgcgctgaaagaacgcatcgagagacgcagaagcgagcgtgctgaacagcagagatttcggactgaaaaggaacgggaacggcaggctaaactcgccgaggagaaaatgcggaaggaggaggaagaggcgaaaaagcgcgctgaagacgatgccaaaaaaaaaaaggtgctttccaacatgggggcacattttggcggatatctagtgaaggcagaacaaaagcggggtaaaagacaaactgggagagaaatgaaagtaagaatattaagtgagcggaaaaagccactagacatagattacatgggagaagagcagctgagagaaaaagcccaggagctgtctgactggatacaccagcttgagagcgaaaaattcgacctaatggccaagctgaaacaacagaagtacgagattaatgtgctgtacaatcgcatctcacatgcacagaagttccggaaaggagctggtaaggggagggtgggcggacgatggaaatag

SEQ ID NO: 109998 - DNA, 579 bp, Artificial Sequence
  derived and/or modified sequence
atggagaaggacttgttggagctccagaccctgattgatgtacactttgaacaacggaagaaggaagaagaggagctcgtcgctcttaaggaacgaatcgagcgcagacggagtgagagagccgagcaacaacgtttcaggacagagaaagagcgcgaacggcaggccaagctcgccgaagagaaaatgcgtaaggaggaagaagaggcaaaaaaacgggctgaggatgacgctaagaagaaaaaggtgctgagcaatatgggtgctcactttgggggttatctggttaaggccgaacagaaacggggaaagcgccaaacagggcgagagatgaaagtgaggattctgagtgagcgcaagaagcccctggacatcgattacatgggcgaagagcagctacgggaaaaggcccaggaattatcagattggatccaccaactcgaatctgagaagttcgacttgatggcgaagttgaagcagcagaaatatgagataaatgtgctgtataaccggattagccatgctcaaaaattccggaaaggtgcaggcaagggacgcgtgggcggtcggtggaagtag

SEQ ID NO: 109999 - DNA, 966 bp, Artificial Sequence
  derived and/or modified sequence
agctataaactccccggagcttcagtgccctcagcaaggctcagcctcaagattcacagcatctcagacacagcctaggccgcaccaggatgtcggacaccgaggagcaggaatatgaggaggagcagccggaagaggaggctgcggaggaggaggaggaagaagaggaacgccccaaaccaagccgccccgtggtgcctcctttgatcccgccaaagatcccagaaggggagcgcgttgacttcgatgacatccaccgcaagcgcatggagaaagacctgctggagctgcagacactcatcgatgtacatttcgagcagcggaagaaggaggaagaggagctggttgccttgaaggagcgcattgagcggcgccggtcagagagagccgagcaacagcgcttcagaactgagaaggaacgcgaacgtcaggctaagctggcggaggagaagatgaggaaggaagaggaagaggccaagaagcgggcagaggatgatgccaagaaaaagaaggtgctgtccaacatgggggcccattttggcggctacctggtcaaggcagaacagaagcgtggtaagcggcagacggggcgggagatgaaggtgcgcatcctctccgagcgtaagaagcctctggacattgactacatgggggaggaacagctccgggagaaagcccaggagctgtcggactggatccaccagctggagtctgagaagttcgacctgatggcgaagctgaaacagcagaaatatgagatcaacgtgctgtacaaccgcatcagccacgcccagaagttccgtaagggggcagggaagggccgcgttggaggccgctggaagtgaggatgccgccccggacagtggcacctgggaagcctgggagtgtttgtcccatcggtagcttgaaataaacgctcccctcagacacccgctgggttctctgatgttattatggttgagatgc

SEQ ID NO: 110000 - DNA, 551 bp, Artificial Sequence
  derived and/or modified sequence
agctataaactccccggagcttcagtgccctcagcaaggctcagcctcaagattcacagcatctcagacacagcctaggccgcaccaggatgtcggacaccgaggagcaggaatatgaggaggagcagccggaagaggaggctgcggaggaggaggaggaaggtgaggtcccggactccgcagaagaggaacgccccaaaccaagccgccccgtggtgcctcctttgatcccgccaaagatcccagaaggggagcgcgttgacttcgatgacatccaccgcaagcgcatggagaaagacctgctggagctgcagacactcatcgatgtacatttcgagcagcggaagaaggaggaagaggagctggttgccttgaaggagcgcattgagcggcgccggtcagagagagccgagcaacagcgcttcagaactgagaaggaacgcgaacgtcaggctaagctggcggaggagaagatgaggaaggaagaggaagaggccaagaagcgggcagaggatgatgccaagaaaaagaagaaaaaaaaaaaaaaaaag

SEQ ID NO: 110001 - DNA, 966 bp, Artificial Sequence
  derived and/or modified sequence
agctataaactccccggagcttcagtgccctcagcaaggctcagcctcaagattcacagcatctcagacacagcctaggccgcaccaggatgtcggacaccgaggagcaggaatatgaggaggagcagccggaagaggaggctgcggaggaggaggaggaagcccccgaagagccggagccggtccgccccgtggtgcctcctttgatcccgccaaagatcccagaaggggagcgcgttgacttcgatgacatccaccgcaagcgcatggagaaagacctgctggagctgcagacactcatcgatgtacatttcgagcagcggaagaaggaggaagaggagctggttgccttgaaggagcgcattgagcggcgccggtcagagagagccgagcaacagcgcttcagaactgagaaggaacgcgaacgtcaggctaagctggcggaggagaagatgaggaaggaagaggaagaggccaagaagcgggcagaggatgatgccaagaaaaagaaggtgctgtccaacatgggggcccattttggcggctacctggtcaaggcagaacagaagcgtggtaagcggcagacggggcgggagatgaaggtgcgcatcctctccgagcgtaagaagcctctggacattgactacatgggggaggaacagctccgggagaaagcccaggagctgtcggactggatccaccagctggagtctgagaagttcgacctgatggcgaagctgaaacagcagaaatatgagatcaacgtgctgtacaaccgcatcagccacgcccagaagttccgtaagggggcagggaagggccgcgttggaggccgctggaagtgaggatgccgccccggacagtggcacctgggaagcctgggagtgtttgtcccatcggtagcttgaaataaacgctcccctcagacacccgctgggttctctgatgttattatggttgagatgc

SEQ ID NO: 110002 - DNA, 901 bp, Artificial Sequence
  derived and/or modified sequence
agcaaggctcagcctcaagattcacagcatctcagacacagcctaggccgcaccaggatgtcggacaccgaggagcaggaatatgaggagtgagtgctgcactgggagaggaggctgcggaggaggaggaggaagaagaggaacgccccaaaccaagccgccccgtggtgcctcctttgatcccgccaaagatcccagaaggggagcgcgttgacttcgatgacatccaccgcaagcgcatggagaaagacctgctggagctgcagacactcatcgatgtacatttcgagcagcggaagaaggaggaagaggagctggttgccttgaaggagcgcattgagcggcgccggtcagagagagccgagcaacagcgcttcagaactgagaaggaacgcgaacgtcaggctaagctggcggaggagaagatgaggaaggaagaggaagaggccaagaagcgggcagaggatgatgccaagaaaaagaaggtgctgtccaacatgggggcccattttggcggctacctggtcaaggcagaacagaagcgtggtaagcggcagacggggcgggagatgaaggtgcgcatcctctccgagcgtaagaagcctctggacattgactacatgggggaggaacagctccgggagaaagcccaggagctgtcggactggatccaccagctggagtctgagaagttcgacctgatggcgaagctgaaacagcagaaatatgagatcaacgtgctgtacaaccgcatcagccacgcccagaagttccgtaagggggcagggaagggccgcgttggaggccgctggaagtgaggatgccgccccggacagtggcacctgggaagcctgggagtgtttgtcccatcggtagcttgaaataaacgctcccctcagac

SEQ ID NO: 110003 - protein, 158 aa, Artificial Sequence
  derived and/or modified sequence
MADRAAAERACKDPNPIIDGRKANVNLAYLGAKPRSLQTGFAIGVQQLHPTLIQRTYGLTPHYIYPPAIVQPSVVIPAAPVPSLSSPYIEYTPASPAYAQYPPATYDQYPYAASPATAASFVGYSYPAAVPQALSAAAPAGTTFVQYQAPQLQPDRMQ

SEQ ID NO: 110004 - DNA, 760 bp, Artificial Sequence
  derived and/or modified sequence
ataaacatcagcttaagtaaaaacgtcttgaagacactttcctgcttaccttccaagcatagcgtcgcaaactccttctcagaggaaagtctcggccctcactggtgggcaagtccaggcggccccccaagctcccttcggggttcatttttgccctatccccgcaggggattatttttgtccttgaaggccacatttcccaggccttgaactttgacgggaggagctggaatccaggaggcatctttgtgggagagccccaggtgaccatggccgaccgggcggcagctgagagggcttgcaaagacccgaaccccatcatcgacggccgcaaggccaacgtgaacctggcatatctgggcgccaagccgcggagcctccagacgggctttgccattggggtgcagcagctgcaccccaccttgatccagcggacttacgggctgaccccgcactacatctacccaccagccatcgtgcagcccagcgtggtgatcccagccgcccctgtcccgtcgctgtcctcgccctacattgagtacacgccggccagcccggcctacgcccagtacccaccggccacctatgaccagtacccatacgccgcctcgcctgccacggctgccagcttcgtgggctacagctaccctgccgccgtgccccaggccctctcagccgcagcacccgcgggcaccactttcgtgcagtaccaggcgccgcagctgcagcctgacaggatgcagtgaggggcgttcctgcc

SEQ ID NO: 110005 - protein, 735 aa, Artificial Sequence
  derived and/or modified sequence
MKTWVKIVFGVATSAVLALLVMCIVLRPSRVHNSEENTMRALTLKDILNGTFSYKTFFPNWISGQEYLHQSADNNIVLYNIETGQSYTILSNRTMLWRYSYTATYYIYDLSNGEFVRGNELPRPIQYLCWSPVGSKLAYVYQNNIYLKQRPGDPPFQITFNGRENKIFNGIPDWVYEEEMLATKYALWWSPNGKFLAYAEFNDTDIPVIAYSYYGDEQYPRTINIPYPKAGAKNPVVRIFIIDTTYPAYVGPQEVPVPAMIASSDYYFSWLTWVTDERVCLQWLKRVQNVSVLSICDFREDWQTWDCPKTQEHIEESRTGWAGGFFVSTPVFSYDAISYYKIFSDKDGYKHIHYIKDTVENAIQITSGKWEAINIFRVTQDSLFYSSNEFEEYPGRRNIYRISIGSYPPSKKCVTCHLRKERCQYYTASFSDYAKYYALVCYGPGIPISTLHDGRTDQEIKILEENKELENALKNIQLPKEEIKKLEVDEITLWYKMILPPQFDRSKKYPLLIQVYGGPCSQSVRSVFAVNWISYLASKEGMVIALVDGRGTAFQGDKLLYAVYRKLGVYEVEDQITAVRKFIEMGFIDEKRIAIWGWSYGGYVSSLALASGTGLFKCGIAVAPVSSWEYYASVYTERFMGLPTKDDNLEHYKNSTVMARAEYFRNVDYLLIHGTADDNVHFQNSAQIAKALVNAQVDFQAMWYSDQNHGLSGLSTNHLYTHMTHFLKQCFSLSD

SEQ ID NO: 110006 - DNA, 2208 bp, Artificial Sequence
  derived and/or modified sequence
atgaagacctgggtgaagatcgtgttcggcgtggccaccagcgccgtgctggccctgctggtgatgtgcatcgtgctgagacccagcagagtgcacaacagcgaggagaacaccatgagagccctgaccctgaaggacatcctgaacggcaccttcagctacaagaccttcttccccaactggatcagcggccaggagtacctgcaccagagcgccgacaacaacatcgtgctgtacaacatcgagaccggccagagctacaccatcctgagcaacagaaccatgctgtggagatacagctacaccgccacctactacatctacgacctgagcaacggcgagttcgtgagaggcaacgagctgcccagacccatccagtacctgtgctggagccccgtgggcagcaagctggcctacgtgtaccagaacaacatctacctgaagcagagacccggcgacccccccttccagatcaccttcaacggcagagagaacaagatcttcaacggcatccccgactgggtgtacgaggaggagatgctggccaccaagtacgccctgtggtggagccccaacggcaagttcctggcctacgccgagttcaacgacaccgacatccccgtgatcgcctacagctactacggcgacgagcagtaccccagaaccatcaacatcccctaccccaaggccggcgccaagaaccccgtggtgagaatcttcatcatcgacaccacctaccccgcctacgtgggcccccaggaggtgcccgtgcccgccatgatcgccagcagcgactactacttcagctggctgacctgggtgaccgacgagagagtgtgcctgcagtggctgaagagagtgcagaacgtgagcgtgctgagcatctgcgacttcagagaggactggcagacctgggactgccccaagacccaggagcacatcgaggagagcagaaccggctgggccggcggcttcttcgtgagcacccccgtgttcagctacgacgccatcagctactacaagatcttcagcgacaaggacggctacaagcacatccactacatcaaggacaccgtggagaacgccatccagatcaccagcggcaagtgggaggccatcaacatcttcagagtgacccaggacagcctgttctacagcagcaacgagttcgaggagtaccccggcagaagaaacatctacagaatcagcatcggcagctacccccccagcaagaagtgcgtgacctgccacctgagaaaggagagatgccagtactacaccgccagcttcagcgactacgccaagtactacgccctggtgtgctacggccccggcatccccatcagcaccctgcacgacggcagaaccgaccaggagatcaagatcctggaggagaacaaggagctggagaacgccctgaagaacatccagctgcccaaggaggagatcaagaagctggaggtggacgagatcaccctgtggtacaagatgatcctgcccccccagttcgacagaagcaagaagtaccccctgctgatccaggtgtacggcggcccctgcagccagagcgtgagaagcgtgttcgccgtgaactggatcagctacctggccagcaaggagggcatggtgatcgccctggtggacggcagaggcaccgccttccagggcgacaagctgctgtacgccgtgtacagaaagctgggcgtgtacgaggtggaggaccagatcaccgccgtgagaaagttcatcgagatgggcttcatcgacgagaagagaatcgccatctggggctggagctacggcggctacgtgagcagcctggccctggccagcggcaccggcctgttcaagtgcggcatcgccgtggcccccgtgagcagctgggagtactacgccagcgtgtacaccgagagattcatgggcctgcccaccaaggacgacaacctggagcactacaagaacagcaccgtgatggccagagccgagtacttcagaaacgtggactacctgctgatccacggcaccgccgacgacaacgtgcacttccagaacagcgcccagatcgccaaggccctggtgaacgcccaggtggacttccaggccatgtggtacagcgaccagaaccacggcctgagcggcctgagcaccaaccacctgtacacccacatgacccacttcctgaagcagtgcttcagcctgagcgactag

SEQ ID NO: 110007 - DNA, 2208 bp, Artificial Sequence
  derived and/or modified sequence
atgaagacttgggtaaagattgtttttggcgtggcaacatccgcagtcctggcgttactggtgatgtgtatcgtactgcggcccagtcgggttcataattctgaagaaaatactatgcgcgctttgacgctgaaagatatcctcaatggcacctttagctacaaaacattttttcctaactggatcagtggccaggaatatctgcaccaatctgcagataacaatatcgtcctctataatatcgagactggtcagagctacacgattttgtctaacaggaccatgctttggcgatattcatacactgcaacatactacatctacgatcttagtaacggagagttcgtgaggggaaacgaactaccccggccaattcagtacttgtgctggagccctgttggaagtaagctcgcctatgtgtaccagaacaacatctatctcaagcagagaccgggcgacccaccattccagattaccttcaacggtcgtgagaataaaatatttaatggcattccggactgggtctatgaggaggagatgctggccacaaaatacgccttgtggtggtcaccaaacggaaaatttctggcatatgcagagtttaatgacaccgacatccctgtgatcgcctattcatattatggagacgaacaatatcctcgcaccatcaatattccctatcccaaggctggggcaaaaaaccccgtagttcgtattttcattattgacaccacttaccctgcgtacgtggggccacaagaggtgccagtaccggccatgatagcttccagtgactactacttttcttggttgacctgggtaaccgatgaaagagtgtgcctgcagtggctcaagcgagtccagaatgtgagcgtactctctatctgtgatttccgcgaagactggcaaacatgggactgtccgaagacacaggagcatatagaggaatcaaggactgggtgggccggcggattcttcgttagcaccccagtgttctcgtatgacgccatcagttattataaaatttttagcgataaagatgggtataagcatatccattacataaaagacaccgtcgagaatgcgatacaaatcacctccggaaagtgggaggcgatcaatatattcagagtgactcaggattcactgttttatagctccaacgagttcgaggaataccctggccggaggaacatttatagaatctctattgggtcgtaccccccctcgaagaagtgcgtaacttgccacctccgtaaagagcggtgtcagtattacaccgcatcgtttagcgactatgccaagtattacgccctggtatgttacggacctggcattcctatttctaccctccacgacggcagaaccgatcaagaaattaagatactagaggagaacaaagagctcgagaatgcacttaaaaacattcaactgccgaaggaagaaattaagaagttagaagttgacgagatcaccctctggtataagatgatcttgccccctcagtttgaccgcagcaagaagtaccccctactgattcaagtgtatggcggaccctgctctcagtcagtccgtagtgtctttgccgtgaattggattagctatcttgcgtccaaggagggcatggtgatcgcgctcgtagatggccggggaaccgcattccagggcgataagttactctatgctgtttataggaagctgggcgtgtatgaagtggaagaccagataactgccgtgcgcaagtttattgaaatgggctttatcgacgagaagaggatcgccatatggggttggtcatacggaggatatgtgagctcactcgctctcgcctcagggacagggctgttcaaatgcgggattgcagtcgctccggtatcctcctgggagtattatgcctccgtgtacaccgaaagattcatggggctgcccaccaaggatgacaacctggaacattacaaaaacagcaccgtaatggcccgtgcagagtatttccgaaatgtggattatctcttgattcatggaacagccgacgacaacgttcatttccagaattctgcccaaattgcaaaagcccttgtcaacgcccaggtagactttcaggccatgtggtacagcgatcagaaccatggtttaagcggactctctactaaccacctctacactcacatgacgcattttctgaaacaatgcttctcactgagcgattag

SEQ ID NO: 110008 - DNA, 2598 bp, Artificial Sequence
  derived and/or modified sequence
aaaaaaaccttgtcctggcttcagcttccaactacaaagacagacttggtccttttcaacggttttcacagatccagtgacccacgctctgaagacagaattagctaactttcaaaaacatctggaaaaatgaagacttgggtaaaaatcgtatttggagttgccacctctgctgtgcttgccttattggtgatgtgcattgtcttacgcccttcaagagttcataactctgaagaaaatacaatgagagcactcacactgaaggatattttaaatggaacattttcttataaaacattttttccaaactggatttcaggacaagaatatcttcatcaatctgcagataacaatatagtactttataatattgaaacaggacaatcatataccattttgagtaatagaaccatgctttggagatactcttacacagcaacatattacatctatgaccttagcaatggagaatttgtaagaggaaatgagcttcctcgtccaattcagtatttatgctggtcgcctgttgggagtaaattagcatatgtctatcaaaacaatatctatttgaaacaaagaccaggagatccaccttttcaaataacatttaatggaagagaaaataaaatatttaatggaatcccagactgggtttatgaagaggaaatgcttgctacaaaatatgctctctggtggtctcctaatggaaaatttttggcatatgcggaatttaatgatacggatataccagttattgcctattcctattatggcgatgaacaatatcctagaacaataaatattccatacccaaaggctggagctaagaatcccgttgttcggatatttattatcgataccacttaccctgcgtatgtaggtccccaggaagtgcctgttccagcaatgatagcctcaagtgattattatttcagttggctcacgtgggttactgatgaacgagtatgtttgcagtggctaaaaagagtccagaatgtttcggtcctgtctatatgtgacttcagggaagactggcagacatgggattgtccaaagacccaggagcatatagaagaaagcagaactggatgggctggtggattctttgtttcaacaccagttttcagctatgatgccatttcgtactacaaaatatttagtgacaaggatggctacaaacatattcactatatcaaagacactgtggaaaatgctattcaaattacaagtggcaagtgggaggccataaatatattcagagtaacacaggattcactgttttattctagcaatgaatttgaagaataccctggaagaagaaacatctacagaattagcattggaagctatcctccaagcaagaagtgtgttacttgccatctaaggaaagaaaggtgccaatattacacagcaagtttcagcgactacgccaagtactatgcacttgtctgctacggcccaggcatccccatttccacccttcatgatggacgcactgatcaagaaattaaaatcctggaagaaaacaaggaattggaaaatgctttgaaaaatatccagctgcctaaagaggaaattaagaaacttgaagtagatgaaattactttatggtacaagatgattcttcctcctcaatttgacagatcaaagaagtatcccttgctaattcaagtgtatggtggtccctgcagtcagagtgtaaggtctgtatttgctgttaattggatatcttatcttgcaagtaaggaagggatggtcattgccttggtggatggtcgaggaacagctttccaaggtgacaaactcctctatgcagtgtatcgaaagctgggtgtttatgaagttgaagaccagattacagctgtcagaaaattcatagaaatgggtttcattgatgaaaaaagaatagccatatggggctggtcctatggaggatacgtttcatcactggcccttgcatctggaactggtcttttcaaatgtggtatagcagtggctccagtctccagctgggaatattacgcgtctgtctacacagagagattcatgggtctcccaacaaaggatgataatcttgagcactataagaattcaactgtgatggcaagagcagaatatttcagaaatgtagactatcttctcatccacggaacagcagatgataatgtgcactttcaaaactcagcacagattgctaaagctctggttaatgcacaagtggatttccaggcaatgtggtactctgaccagaaccacggcttatccggcctgtccacgaaccacttatacacccacatgacccacttcctaaagcagtgtttctctttgtcagactaaaaacgatgcagatgcaagcctgtatcagaatctgaaaaccttatataaacccctcagacagtttgcttattttattttttatgttgtaaaatgctagtataaacaaacaaattaatgttgttctaaaggctgttaaaaaaaagatgaggactcagaagttcaagctaaatattgtttacattttctggtactctgtgaaagaagagaaaagggagtcatgcattttgctttggacacagtgttttatcacctgttcatttg

SEQ ID NO: 110009 - DNA, 2208 bp, Artificial Sequence
  derived and/or modified sequence
atgaagacctgggtgaagatcgtgtttggagtggccaccagcgctgtgctggccctgctggtgatgtgcatcgtgctgcggcccagccgggtgcacaacagcgaggagaacaccatgagggccctgaccctgaaggacatcctgaatggcaccttctcctacaagaccttcttccccaactggatcagcggccaggagtacctgcaccagagcgctgacaacaacatcgtgctgtacaacattgaaacaggccagagctacaccatcctgagcaacagaaccatgctgtggagatacagctacacagccacctactacatctatgacctgagcaatggagaatttgtgagaggaaatgagctgccccggcccatccagtacctgtgctggagccctgtgggcagcaagctggcctacgtgtaccagaacaacatctacctgaagcagaggcctggggacccccccttccagatcaccttcaacggccgggagaacaagatcttcaacggcatcccagactgggtgtatgaggaggagatgctggccaccaagtatgccctgtggtggagccccaacgggaagttcctggcctatgcagagttcaatgacacagacatccctgtgattgcctacagctactatggagatgagcagtaccccaggaccatcaacatcccctaccccaaggccggggccaagaaccctgtggtgcgcatcttcatcatcgacaccacctacccagcctacgtgggcccccaggaggtgcctgtgcctgccatgattgccagcagtgactactacttctcctggctgacctgggtgacagatgagcgggtgtgcctgcagtggctgaagagggtgcagaatgtgtctgtgctgagcatctgtgacttccgggaggactggcagacctgggactgccccaagacccaggagcacatcgaggagagcaggacaggctgggccggcggcttctttgtgtccacccctgtgttctcctatgatgccatctcctactacaagatcttcagtgacaaggatggctacaagcacatccactacatcaaggacacagtggagaatgccatccagatcaccagcggcaagtgggaggccatcaacatcttccgggtgacccaggacagcctcttctacagcagcaatgaatttgaggagtacccaggaagaagaaacatctaccgcatcagcatcggcagctacccacccagcaagaagtgtgtgacctgccacctgaggaaggagcgctgccagtactacacagccagcttcagtgactatgccaagtactatgccctggtgtgctacggccctggcatccccatcagcaccctgcatgatggccgcacagaccaggagatcaagatcctggaggagaacaaggagctggagaatgccctgaagaacatccagctgcccaaggaggagatcaagaagctggaggtggatgagatcaccctgtggtacaagatgatcctgcccccccagtttgacaggagcaagaagtaccccctgctgatccaggtgtatggaggcccctgcagccagagcgtgcgctctgtgtttgctgtgaactggatctcctacctggccagcaaggagggcatggtgattgccctggtggatggccggggcacagccttccagggcgacaagctgctgtatgctgtgtacaggaagctgggcgtgtatgaggtggaggaccagatcacagctgtgaggaagttcatcgagatgggcttcattgatgagaagagaattgccatctggggctggagctatggaggctacgtgagcagcctggccctggccagcggcaccggcctcttcaagtgtggcattgctgtggcccctgtgtcctcctgggagtactatgcctctgtgtacacagagcgcttcatgggcctgcccaccaaggatgacaacctggagcactacaagaacagcacagtgatggcccgggcagagtacttcagaaatgtggactacctgctgattcatggaacagcagatgacaacgtgcacttccagaacagcgcccagatcgccaaggccctggtgaatgcccaggtggacttccaggccatgtggtacagcgaccagaaccacggcctgagcggcctgagcaccaaccacctgtacacccacatgacccacttcctgaagcagtgcttcagcctgagtgactag

SEQ ID NO: 110010 - DNA, 2208 bp, Artificial Sequence
  derived and/or modified sequence
atgaagacctgggtgaagatcgtgttcggcgtggccaccagcgccgtgttggcactactggttatgtgcatcgtgctgcgcccctctagagtgcacaattccgaggagaacacaatgagggccctcacactgaaagatattctgaacggaacattttcatacaaaacattttttccaaattggatctcaggccaggagtacctacatcaatctgctgacaacaatatagtcctttataatattgaaaccggacagtcatatacaatcctgtctaatagaacaatgctgtggcggtatagttacacagctacatattacatatacgatctctccaatggagagttcgttcgaggaaacgagctgccaaggcccattcagtatctctgttggtcccccgtcgggagcaagcttgcttacgtgtatcagaataacatatacctgaagcagcgtcctggcgacccacccttccagattacattcaacggccgcgagaacaaaatctttaacggaatacccgactgggtgtatgaagaggaaatgcttgctactaagtatgctctgtggtggagcccaaatgggaaattcctcgcatatgcggaatttaatgataccgacatccccgttatagcgtattcatactacggggatgaacagtaccctaggaccataaacattccatacccgaaagctggtgctaagaaccctgtggtgagaatattcatcatagacaccacttaccccgcatacgttgggccacaggaagttcccgttccagcaatgattgcttcaagtgactactacttttcctggctcacctgggttacagacgaacgggtctgcttgcaatggctgaagcgcgtccagaatgtttccgtattgtccatctgcgatttccgggaggactggcagacctgggactgccccaagacgcaggagcacatcgaggagtcacgaaccggatgggctgggggatttttcgtcagcactccagtgttctcgtacgacgcaatttcttattacaaaattttttccgacaaagatggatacaagcatattcattacatcaaggacacagttgaaaacgccattcagatcaccagtggcaagtgggaagcaatcaacattttccgcgtcacacaggattcgctgttctatagcagtaacgagttcgaggaataccctgggagacggaacatttacaggatatctatcggtagctacccaccaagcaagaaatgtgtgacatgtcacttaagaaaagaaaggtgtcagtactataccgcgtctttctcagattacgctaagtactacgctttagtgtgctacgggcccggaatccctataagcaccttgcatgatgggcgcacagatcaagagataaaaatcttggaggaaaataaggagcttgagaacgctctgaagaacatccaactgcccaaggaggaaatcaaaaaactggaagtagatgagattactctctggtataagatgatactgcccccccaatttgaccgaagcaaaaagtaccctctgctgatacaggtgtacggcgggccatgttcccaatctgtgcgtagtgtattcgccgtgaactggatttcttaccttgccagcaaggaggggatggtgatagctttggtggatgggagaggaaccgctttccagggcgataagctgctgtacgcggtgtatcgtaaactgggagtatatgaagtggaggaccagattacagccgtgcgtaaatttatcgagatggggttcatcgacgaaaagcgaatagcaatatggggctggagctatggtggctacgtgtcaagcctagccttggcatcgggtaccggcctctttaagtgcggaatcgccgtggcgcccgtcagctcttgggaatattatgcatccgtctacaccgaacggttcatggggctgccgaccaaggacgataacctggaacactataaaaactcaacagtaatggcgcgggctgaatactttaggaatgttgattacctcttgatacacggcaccgccgacgataacgtgcattttcaaaatagtgcccagatcgctaaagcccttgtgaatgcgcaggtggatttccaggccatgtggtatagcgaccagaaccacggcctgtcgggacttagcacaaatcatctgtacactcacatgacccacttcctaaagcagtgcttttctcttagcgattag

SEQ ID NO: 110011 - DNA, 2208 bp, Artificial Sequence
  derived and/or modified sequence
atgaagacgtgggttaaaattgtgtttggggtggcaacgtcagccgtgctggcactgctcgtaatgtgtatcgttcttagaccgagccgagtgcacaatagtgaggagaacaccatgcgcgcacttacgctgaaggatatcctgaacggtactttcagctacaaaacattctttccgaactggatctctggccaggagtaccttcatcagtccgccgacaacaacattgtactttataatatcgagacaggccagagctatacaattctgagcaatagaaccatgctgtggcggtactcatacacggctacatactatatctatgatctatctaatggggaatttgtaagagggaatgagctgcctcgtcccatccaatatctttgctggtctcctgtgggcagtaaactggcgtacgtgtaccaaaataatatatacctgaagcagaggcccggagaccctcctttccagatcacctttaatggacgagaaaacaaaatttttaatggtattcctgactgggtctatgaggaggagatgctcgctacaaagtatgctttatggtggagtcccaacggaaagttcttggcttatgctgaatttaatgatacagacatccccgttatcgcttactcttactacggagatgagcaatacccccgaactataaacatcccataccccaaggcgggtgctaagaaccctgtggtgcggatattcattatcgacacaacatacccagcctacgtggggccacaggaggtccccgtgcccgcaatgattgcctctagcgactattatttcagctggctgacctgggtgacagacgaacgcgtgtgcttacaatggctgaaaagagttcagaatgtaagcgttcttagcatctgcgacttccgcgaggactggcagacttgggactgcccaaaaacccaagaacatattgaggaaagcagaaccgggtgggctggtggttttttcgtgagcaccccagttttctcttacgacgcaataagctattataaaatattctcagacaaagatggttacaaacacatccactatatcaaagatacagtggaaaatgccatccagataaccagtggcaagtgggaagccatcaacatctttcgcgtcacacaggatagtttattctattcttcaaatgaatttgaagaatacccaggaagacgcaatatctaccggatcagtatcggctcttaccctcccagtaagaagtgtgttacctgccaccttcgaaaggaaaggtgccagtattacacggcgtcattcagcgattacgctaaatattatgctctggtgtgttacgggccaggaatacctatttcgacgctgcacgacggtcggacagatcaagaaattaagatcctcgaggaaaataaggagttggagaatgccttgaaaaatattcagcttccaaaggaggagatcaaaaagttggaggtggatgagattaccttgtggtacaagatgatacttccaccacagtttgaccgctcaaaaaagtaccccctgcttatacaggtttacggaggcccttgtagccagtcagtccggtccgtcttcgccgttaactggatttcctacttggcctccaaggaaggaatggtaatcgccctcgttgacggtcgcggaacggccttccagggagataagttgctctacgctgtctaccgcaaactcggtgtgtatgaagttgaggatcagatcactgcagtccgaaagttcatagaaatggggttcatagacgagaaaagaattgccatctggggatggtcctatggcggttatgtttcttctctggccctagcctctggaacggggttgttcaagtgtggaattgctgttgcccctgtgtccagctgggaatattacgcatccgtgtatactgaaaggtttatggggttaccaacaaaggacgacaaccttgagcactacaagaacagcaccgtcatggcccgtgccgagtacttcagaaacgtggactatctactgatccatggaacggcagatgataatgttcattttcagaactctgcccagatcgccaaagccttggttaatgcccaggtagacttccaagccatgtggtactctgatcagaatcacggattgtcagggctgtccaccaaccatctttatactcacatgacacactttttgaaacagtgcttctctctgtctgattag

SEQ ID NO: 110012 - protein, 330 aa, Artificial Sequence
  derived and/or modified sequence
MEAVAKFDFTASGEDELSFHTGDVLKILSNQEEWFKAELGSQEGYVPKNFIDIQFPKWFHEGLSRHQAENLLMGKEVGFFIIRASQSSPGDFSISVRHEDDVQHFKVMRDNKGNYFLWTEKFPSLNKLVDYYRTNSISRQKQIFLRDRTREDQGHRGNSLDRRSQGGPHLSGAVGEEIRPSMNRKLSDHPPTLPLQQHQHQPQPPQYAPAPQQLQQPPQQRYLQHHHFHQERRGGSLDINDGHCGTGLGSEMNAALMHRRHTDPVQLQAAGRVRWARALYDFEALEDDELGFHSGEVVEVLDSSNPSWWTGRLHNKLGLFPANYVAPMTR

SEQ ID NO: 110013 - protein, 97 aa, Artificial Sequence
  derived and/or modified sequence
MEAVAKFDFTASGEDELSFHTGDVLKILSNQEEWFKAELGSQEGYVPKNFIDIQFPKWFHEGLSRHQAENLLMGKEVGFFIIRASQSSPGDFSISVR

SEQ ID NO: 110014 - protein, 278 aa, Artificial Sequence
  derived and/or modified sequence
MEAVAKFDFTASGEDELSFHTGDVLKILSNQEEWFKAELGSQEGYVPKNFIDIQFPKHEDDVQHFKVMRDNKGNYFLWTEKFPSLNKLVDYYRTNSISRQKQIFLRDRTREDQGHRGNSLDRRSQGGPHLSGAVGEEIRPSMNRKLSDHPPTLPLQQHQHQPQPPQYAPAPQQLQQPPQQRYLQHHHFHQERRGGSLDINDGHCGTGLGSEMNAALMHRRHTDPVQLQAAGRVRWARALYDFEALEEVLDSSNPSWWTGRLHNKLGLFPANYVAPMTR

SEQ ID NO: 110015 - DNA, 993 bp, Artificial Sequence
  derived and/or modified sequence
atggaagctgttgccaagttcgattttacggccagcggtgaggacgagttgtcttttcacactggtgacgtgctgaagatcctgagtaatcaggaagaatggtttaaggctgagctgggaagtcaggaggggtacgtccctaagaacttcatcgacatccagttcccaaagtggttccatgaaggactgagtaggcaccaagctgaaaatctgctcatgggaaaggaagtgggcttcttcataattcgtgccagccagagctccccaggagacttctcgatcagtgtgcgacacgaggatgacgtgcaacacttcaaggtgatgagagataataaaggcaattacttcttatggacagaaaagtttccaagcttgaacaagctggtggattactaccgcactaattcgatcagtcggcagaagcagatattcctgcgcgacaggacacgcgaagatcagggtcaccgcggcaacagcctagaccgtcgatcacaggggggcccccatctatccggggccgtgggggaggaaattcgtccatctatgaaccggaagcttagcgatcacccgccgaccctacccctgcagcagcaccagcatcaaccccaacctccgcaatatgcgcccgcccctcagcagttacagcaaccaccgcagcagagatatctgcaacatcatcactttcaccaagaaaggcgcgggggctcactggatatcaacgatgggcattgtggtactggacttgggtctgaaatgaacgcagcactgatgcaccgtaggcacaccgatccagtccagttgcaggctgcaggaagagtcagatgggctagagccctgtacgacttcgaagcactggaagatgacgagctgggttttcactctggtgaggtcgtggaagtgctcgactcaagcaacccatcttggtggacaggccgccttcataataaattgggcttgttcccagcgaattacgtggctccgatgacaagatag

SEQ ID NO: 110016 - DNA, 993 bp, Artificial Sequence
  derived and/or modified sequence
atggaggcagtggctaaatttgacttcaccgcctcgggcgaagatgagttatcttttcacactggcgatgtcctgaaaatcctgagcaatcaagaagagtggtttaaggccgaactcggatctcaagagggctatgtcccaaaaaactttatcgacattcagttccccaagtggtttcatgagggtctgtctcgacatcaggccgaaaacctgttaatgggcaaagaagtgggatttttcatcatacgcgcctctcagagctcacccggggatttttctatcagcgtgaggcacgaagacgacgtacaacacttcaaagtaatgcgcgacaataagggaaattattttttgtggaccgaaaaatttccctcactaaacaaactcgtggactactataggactaacagcatttcgagacagaaacagatctttctgcgcgaccgtaccagagaggatcagggccatcgggggaacagtctcgaccgccgaagccagggggggccccatttaagcggagcagttggggaagaaatcaggccgagcatgaatcgcaagctgagtgatcacccacccacgctacctctgcagcaacatcaacaccagccccagccaccacagtacgctccagctcctcagcagctgcaacagcctcctcagcagcgatatctccagcatcaccacttccaccaggaacggaggggcggatctctggatatcaatgacggtcactgcggaaccggtctgggatctgagatgaatgctgctcttatgcacaggcggcacaccgaccctgtgcaactccaggccgctgggagagtcaggtgggcacgcgccttgtacgactttgaggctctggaggacgacgagctggggttccactcaggggaagttgtggaagttcttgattcctccaaccccagctggtggaccggccggctgcacaacaaattgggactatttcccgctaattacgtggccccaatgactcggtag

SEQ ID NO: 110017 - DNA, 294 bp, Artificial Sequence
  derived and/or modified sequence
atggaggcagtagccaagttcgacttcacagcttccggcgaggacgaactcagctttcataccggcgatgtgttaaaaattctctctaatcaggaggaatggtttaaagccgagctggggtcccaggagggttacgtgccgaagaactttatcgatatccagttcccgaagtggttccacgaaggtctcagtaggcatcaggctgagaatctgctgatgggcaaagaagttggcttctttataattcgggcaagtcagtcttctcctggggacttttctatctctgtaagatag

SEQ ID NO: 110018 - DNA, 837 bp, Artificial Sequence
  derived and/or modified sequence
atggaggccgttgctaaattcgactttactgcctctggagaagatgaactatcctttcacacaggggacgtcctgaagattctcagcaaccaagaagaatggttcaaggccgaactgggatcccaggaaggatacgtgcccaaaaactttatagatatccagttccctaagcacgaggacgatgtgcaacatttcaaggtgatgcgagacaataaagggaactatttcttatggaccgagaagtttccctccttaaataaactcgttgactactatcgcacaaatagcattagccgccagaagcagatctttctaagggaccgcaccagagaagaccagggccaccgcgggaacagcctagatcgtcggagccagggcggaccacatttgtctggggcagtgggggaggagatcagaccttcaatgaatcggaaactatccgatcatcccccaaccctcccgctccagcagcaccagcaccagcctcagcctcctcagtacgcgcctgccccccaacagctccagcagcccccccagcagcgttaccttcagcaccatcatttccaccaggagaggcggggtgggagtctggatattaacgacgggcactgtgggacagggctggggtccgagatgaacgcggctctcatgcaccgcaggcacaccgacccagttcagttgcaggccgcagggagagtcagatgggcccgcgccctgtatgacttcgaagctttggaggaggttctggacagcagcaatccatcttggtggacgggaagactgcacaacaagcttgggctatttcctgcaaattatgttgcacccatgacgcgctag

SEQ ID NO: 110019 - DNA, 915 bp, Artificial Sequence
  derived and/or modified sequence
atgctcgagttcgtctcgctgcttgcccgcaaggactccaataacagcgtgtccaaaccaagacataagctgaacccattcagctcaaaacgctggttccacgagggactcagccgccaccaggcagagaatctgctgatggggaaggaagtgggcttcttcatcatcagagccagccaatcctcccccggcgacttcagtatttccgtgcgacatgaagacgatgtacaacattttaaagttatgagagataataaaggaaactacttcctttggacagaaaagtttcccagcctgaacaagctagtggattattataggacgaattctatcagtcggcaaaagcagatctttctgagggataggaccagggaggatcaaggacatagagggaattcactggataggcgaagtcaggggggtcctcatctatcaggggccgtgggcgaagagatccgcccttcgatgaataggaagttgtccgatcaccctcccacgctccccctacagcagcaccagcatcaacctcaacccccacagtacgccccagcccctcagcagttacagcagcctccgcaacaaagataccttcaacatcatcacttccatcaagaacgacggggaggcagcctcgatattaatgatggtcactgtggtacgggcttgggtagcgagatgaacgctgcgttgatgcatcggagacacaccgacccagttcagttgcaagctgctggacgggttcggtgggcacgggctctgtacgacttcgaggccctggaggacgacgagctgggctttcacagcggggaggtcgtggaggttctagactcctccaatccaagttggtggacgggccgcttgcataacaaactgggcctgtttcccgctaactacgtggccccaatgacaagatag

SEQ ID NO: 110020 - DNA, 3893 bp, Artificial Sequence
  derived and/or modified sequence
acagactgcagggctgactagggttagtttggaggagggagtaagaggtggggaggaggaggcacagttaatggatctgtaaacttgcaccctctttcagagtggtacatggaagacagcacaaagtggatccatactctgaaatgcagtaactctgatgcttgaatttgtctcccttcttgccagaaaggattctaataactcggtgtcaaagccaagacataaactcaaccccttctcttccaaaagcttcacgttacagcatggaagctgttgccaagtttgatttcactgcttcaggtgaggatgaactgagctttcacactggagatgttttgaagattttaagtaaccaagaggagtggtttaaggcggagcttgggagccaggaaggatatgtgcccaagaatttcatagacatccagtttcccaaatggtttcacgaaggcctctctcgacaccaggcagagaacttactcatgggcaaggaggttggcttcttcatcatccgggccagccagagctccccaggggacttctccatctctgtcaggcatgaggatgacgttcaacacttcaaggtcatgcgagacaacaagggtaattactttctgtggactgagaagtttccatccctaaataagctggtagactactacaggacaaattccatctccagacagaagcagatcttccttagagacagaacccgagaagaccagggtcaccggggcaacagcctggaccggaggtcccagggaggcccacacctcagtggggctgtgggagaagaaatccgaccttcgatgaaccggaagctgtcggatcaccccccgacccttcccctgcagcagcaccagcaccagccacagcctccgcaatatgccccagcgccccagcagctgcagcagcccccacagcagcgatatctgcagcaccaccatttccaccaggaacgccgaggaggcagccttgacataaatgatgggcattgtggcaccggcttgggcagtgaaatgaatgcggccctcatgcatcggagacacacagacccagtgcagctccaggcggcagggcgagtgcggtgggcccgggcgctgtatgactttgaggccctggaggatgacgagctggggttccacagcggggaggtggtggaggtcctggatagctccaacccatcctggtggaccggccgcctgcacaacaagctgggcctcttccctgccaactacgtggcacccatgacccgataaactcttcaggggacagaagctttttgtctggagctgcccacaagaaagagggcaaggaaaaaaggctggactccatgactatatatacatacatctatctacatctgcctgtgtacacacacaactttttatactagtaatttattggcaattgggctggtaattagttgatgcaaaagggaactcaggtggagaataatattgacacttgcttttctgcccccctcaggggtgtgtggaaggcagtgggggagttgggaggggggcagggaaatgaaatggagttttgtcctggccttcagctgtcactgcttcctccttgtcttgggaattttcacggagaacagctaagcagagaccacacctcggcactggacacagaacaacagggtggggttgaacttggtggggcacgttctagctgacctgcaagccccgctcacctggagggcttgcagagcagctctcctcctgttctccaaggggtgggcactgttgcattaggaattaaggtgcagcccagtgctgcgggcagccaagcgagtctgagcggggatgtgaaggcaggacggggttggagagaccctgcctgtgcaaggctggcctcctagtcaacacctagctgagacattcatctctgttcaaattaatattccttgggtctttcaaatgaatgtttcaatgtgaggagcgaagtactgggaaatcgagggattttccacaatccccaagcagcttactcagtggaacctctgtttccccagctatgaaggaaatagcatcctacattccgtaaagtgcttgaagaagctctagctgagaatgctgaattttacagtcattgttttatggttacaagggtatgtcttcagggctctgttcattttccctcttgattttctcttttgaagatgccttgcccagtggcatggaaagaagcccacttgatgataggagcctgactatgaattgattgactaaacatgaccccaggtggaagctggctttgacaccagcttcctgttcagtctgaccactgctgtcctcctgctgcccaagagttgcacctggagcaaggaaccccaccatggctgtcgctctccatcccatcacgctagaatcatgtgtccaagggctcactctggaggtgcacagcacaggtcagcctggccaggggcgaaggagacagtagagaggaagctcagggccttaggggaggccgggtgcaaacccgttctgcaccaagtgcactcggagtttgtgggtatgggtgtgtacccctgcaggtgtgcacatgtgtgcttgcacgcacatatttgtgcactcctgtgtgtatacatgtgtgcttgtgtatgcatatgtgtgcattcctgcatgtgtggacatgtgcgtgcatgcatctgtgtgtctgtgtgtgtgctgagacaggaaagggggtgaaagtgttggtgagggagcctggaagttttctcttccccaacctctcttgctctaaggagggatggggttgggggcagccgttattgaaggtgatcggagaagaaagattttctgactcagaagtgactgccagtgtagcacaagcagtgtcccttgtgactgtgattctacagttctctgatcctcatgtttcctttagaggaaagaggaaaaaaggaactctgtggtgggtattgggagggaaaagaaaatagcctggtggaggcaggagggagtcgagtgtgagtaaggagcacctgcagcttttggaagtgaaagcagagagagggaaaggtagctaagacatccaggaggatcaaggggcagcgtgagaggcacagggggaggaaagggagagggtgagtggggccagggaagagaacggtgtggagttggtgggcagatggtgcaggaggagggctgggcagtggggagaggaagaatcagagcagagaaaccgctgctgcggaaggcagggagcaaagaagcataaggaaaagaacaggagaaagaacaaaggcagagaagacctcctcagctattttggtgctaggtaatgtgaaatgctgcagtaaataaaagccataagtaatgtttgattttacagtatttacaaaccatatgctttaaacagcccacaaactccatccagttgtctgatgatgtgggaggaccagctctagttagacggaggtatgtgattcgattctggtggagactttgtgccttgaaaggcttctcaggaaagcagtaataaaacaaagtgtccttgtttggccaggccgtgtctggtgtctgcgttgcatacccctcaggtagagagtgagaacgagaccagggggtgacaggggtcatcggcctgcaggagctgaccccgtaggcaggcggtatgagcagagctttcagaacccctggagctcggtgttctgttgtagcaaaagctactgaagagtattttgtactgagatgccaaagcatctttcccttgctcatcagcctccattcagaaggaagcgggaaagtcacccaaaccacctacaaggaatgagggctcttagcggccaggtaaagaggacaagaaccaaactgtccacattatggaggggagggggaaagagagctcaacccccctcagcctctggtgctgccagggggagc

SEQ ID NO: 110021 - DNA, 1304 bp, Artificial Sequence
  derived and/or modified sequence
gatgatgaaaggagaagggaaaggctgcggatggccttcatttcctgctcctggcatctggggattccgagaatgatcccaggacctagatcctatagattccggcagctcttcctgcaaacacaagcccttgttgtgtgcctgagccttgctctccggcctggagacatccatctgcccactctcctaggaactgctgattaccaggaagcaccatcggctctgctgccctccccctggcagagaggcacaatgaccacattatttctcttccagcttcacgttacagcatggaagctgttgccaagtttgatttcactgcttcaggtgaggatgaactgagctttcacactggagatgttttgaagattttaagtaaccaagaggagtggtttaaggcggagcttgggagccaggaaggatatgtgcccaagaatttcatagacatccagtttcccaaatggtttcacgaaggcctctctcgacaccaggcagagaacttactcatgggcaaggaggttggcttcttcatcatccgggccagccagagctccccaggggacttctccatctctgtcaggcatgaggatgacgttcaacacttcaaggtcatgcgagacaacaagggtaattactttctgtggactgagaagtttccatccctaaataagctggtagactactacaggacaaattccatctccagacagaagcagatcttccttagagacagaacccgagaagaccagggtcaccggggcaacagcctggaccggaggtcccagggaggcccacacctcagtggggctgtgggagaagaaatccgaccttcgatgaaccggaagctgtcggatcaccccccgacccttcccctgcagcagcaccagcaccagccacagcctccgcaatatgccccagcgccccagcagctgcagcagcccccacagcagcgatatctgcagcaccaccatttccaccaggaacgccgaggaggcagccttgacataaatgatgggcattgtggcaccggcttgggcagtgaaatgaatgcggccctcatgcatcggagacacacagacccagtgcagctccaggcggcagggcgagtgcggtgggcccgggcgctgtatgactttgaggccctggaggatgacgagctggggttccacagcggggaggtggtggaggtcctggatagctccaacccatcctggtggaccggccgcctgcacaacaagctgggcctcttccctgccaactacgtggcacccatgacccgataaactcttcaggggacagaagct

SEQ ID NO: 110022 - DNA, 568 bp, Artificial Sequence
  derived and/or modified sequence
aaaagtcataaaagcattctatgctggaccggttcgtgttaagtctgagttcctcaatcgctggctctcaggagctgtttggaaaattcgttgccatgcatgagtcgggggattggttttttttccactggaaattgttaatggggactgcattagcggccccttatcgctttgcctgatagagagacagcaggttcgcccaaacaattctggaaccctgatcactgccaattaggggagtattgtctggctgacataatcaacttcacgttacagcatggaagctgttgccaagtttgatttcactgcttcaggtgaggatgaactgagctttcacactggagatgttttgaagattttaagtaaccaagaggagtggtttaaggcggagcttgggagccaggaaggatatgtgcccaagaatttcatagacatccagtttcccaaatggtttcacgaaggcctctctcgacaccaggcagagaacttactcatgggcaaggaggttggcttcttcatcatccgggccagccagagctccccaggggacttctccatctctgtcagg

SEQ ID NO: 110023 - DNA, 1100 bp, Artificial Sequence
  derived and/or modified sequence
acagactgcagggctgactagggttagtttggaggagggagtaagaggtggggaggaggaggcacagttaatggatctgtaaacttgcaccctctttcagagtggtacatggaagacagcacaaagtggatccatactctgaaatgcagtaactctgatgcttgaatttgtctcccttcttgccagaaaggattctaataactcggtgtcaaagccaagacataaactcaaccccttctcttccaaaagcttcacgttacagcatggaagctgttgccaagtttgatttcactgcttcaggtgaggatgaactgagctttcacactggagatgttttgaagattttaagtaaccaagaggagtggtttaaggcggagcttgggagccaggaaggatatgtgcccaagaatttcatagacatccagtttcccaagcatgaggatgacgttcaacacttcaaggtcatgcgagacaacaagggtaattactttctgtggactgagaagtttccatccctaaataagctggtagactactacaggacaaattccatctccagacagaagcagatcttccttagagacagaacccgagaagaccagggtcaccggggcaacagcctggaccggaggtcccagggaggcccacacctcagtggggctgtgggagaagaaatccgaccttcgatgaaccggaagctgtcggatcaccccccgacccttcccctgcagcagcaccagcaccagccacagcctccgcaatatgccccagcgccccagcagctgcagcagcccccacagcagcgatatctgcagcaccaccatttccaccaggaacgccgaggaggcagccttgacataaatgatgggcattgtggcaccggcttgggcagtgaaatgaatgcggccctcatgcatcggagacacacagacccagtgcagctccaggcggcagggcgagtgcggtgggcccgggcgctgtatgactttgaggccctggaggaggtcctggatagctccaacccatcctggtggaccggccgcctgcacaacaagctgggcctcttccctgccaactacgtggcacccatgacccgataa

SEQ ID NO: 110024 - DNA, 1393 bp, Artificial Sequence
  derived and/or modified sequence
agactgcagggctgactagggttagtttggaggagggagtaagaggtggggaggaggaggcacagttaatggatctgtaaacttgcaccctctttcagagtggtacatggaagacagcacaaagtggatccatactctgaaatgcagtaactctgatgcttgaatttgtctcccttcttgccagaaaggattctaataactcggtgtcaaagccaagacataaactcaaccccttctcttccaaaagatggtttcacgaaggcctctctcgacaccaggcagagaacttactcatgggcaaggaggttggcttcttcatcatccgggccagccagagctccccaggggacttctccatctctgtcaggcatgaggatgacgttcaacacttcaaggtcatgcgagacaacaagggtaattactttctgtggactgagaagtttccatccctaaataagctggtagactactacaggacaaattccatctccagacagaagcagatcttccttagagacagaacccgagaagaccagggtcaccggggcaacagcctggaccggaggtcccagggaggcccacacctcagtggggctgtgggagaagaaatccgaccttcgatgaaccggaagctgtcggatcaccccccgacccttcccctgcagcagcaccagcaccagccacagcctccgcaatatgccccagcgccccagcagctgcagcagcccccacagcagcgatatctgcagcaccaccatttccaccaggaacgccgaggaggcagccttgacataaatgatgggcattgtggcaccggcttgggcagtgaaatgaatgcggccctcatgcatcggagacacacagacccagtgcagctccaggcggcagggcgagtgcggtgggcccgggcgctgtatgactttgaggccctggaggatgacgagctggggttccacagcggggaggtggtggaggtcctggatagctccaacccatcctggtggaccggccgcctgcacaacaagctgggcctcttccctgccaactacgtggcacccatgacccgataaactcttcaggggacagaagctttttgtctggagctgcccacaagaaagagggcttgcagagcagctctcctcctgttctccaaggggtgggcactgttgcattaggaattaaggtgcagcccagtgctgcgggcagccaagcgagtctgagcggggatgtgaaggcaggacggggttggagagaccctgcctgtgcaaggctggcctcctagtcaacacctagctgagacattcatctctgttcaaattaatattccttgggtctttcaaatgaatgtttcaatgtgaggagcgaagtactgggaaatcgagggattttccac

SEQ ID NO: 110025 - DNA, 1425 bp, Artificial Sequence
  derived and/or modified sequence
attctatgctggaccggttcgtgttaagtctgagttcctcaatcgctggctctcaggagctgtttggaaaattcgttgccatgcatgagtcgggggattggttttttttccactggaaattgttaatggggactgcattagcggccccttatcgctttgcctgatagagagacagcaggttcgcccaaacaattctggaaccctgatcactgccaattaggggagtattgtctggctgacataatcaacttcacgttacagcatggaagctgttgccaagtttgatttcactgcttcaggtgaggatgaactgagctttcacactggagatgttttgaagatggtttcacgaaggcctctctcgacaccaggcagagaacttactcatgggcaaggaggttggcttcttcatcatccgggccagccagagctccccaggggacttctccatctctgtcaggcatgaggatgacgttcaacacttcaaggtcatgcgagacaacaagggtaattactttctgtggactgagaagtttccatccctaaataagctggtagactactacaggacaaattccatctccagacagaagcagatcttccttagagacagaacccgagaagaccagggtcaccggggcaacagcctggaccggaggtcccagggaggcccacacctcagtggggctgtgggagaagaaatccgaccttcgatgaaccggaagctgtcggatcaccccccgacccttcccctgcagcagcaccagcaccagccacagcctccgcaatatgccccagcgccccagcagctgcagcagcccccacagcagcgatatctgcagcaccaccatttccaccaggaacgccgaggaggcagccttgacataaatgatgggcattgtggcaccggcttgggcagtgaaatgaatgcggccctcatgcatcggagacacacagacccagtgcagctccaggcggcagggcgagtgcggtgggcccgggcgctgtatgactttgaggccctggaggatgacgagctggggttccacagcggggaggtggtggaggtcctggatagctccaacccatcctggtggaccggccgcctgcacaacaagctgggcctcttccctgccaactacgtggcacccatgacccgataaactcttcaggggacagaagctttttgtctggagctgcccacaagaaagagggcaaggaaaaaaggctggactccatgactatatatacatacatctatctacatctgcctgtgtacacacacaactttttatactagtaatttattggcaattgggctggtaattagttgatgcaaaagggaactcaggtggagaataatattgacacttgcttttctgcccccctcaggggtgtgtggaaggcagtgggggagttgggagg

SEQ ID NO: 110026 - DNA, 993 bp, Artificial Sequence
  derived and/or modified sequence
atggaggccgtggccaagtttgacttcaccgccagcggggaggatgagctgtccttccacactggagatgtgctgaagatcctgagcaaccaggaggagtggttcaaggccgagctgggcagccaggagggctacgtgcccaagaacttcatcgacatccagttccccaagtggttccacgagggcctgagccgccaccaggccgagaacctgctgatgggcaaggaggtgggcttcttcatcatccgggccagccagagcagccctggggacttcagcatctctgtgagacatgaagatgatgtgcagcacttcaaggtgatgagggacaacaagggcaactacttcctgtggacagagaagttccccagcctgaacaagctggtggactactaccgcaccaacagcatcagccggcagaagcagatcttcctgcgggacaggacccgggaggaccagggccaccggggcaacagcctggaccggcgcagccagggcggcccccacctgtctggagctgtgggggaggagatccggcccagcatgaacaggaagctgagtgaccacccccccaccctgcccctgcagcagcaccagcaccagccccagcccccccagtatgccccagccccccagcagctgcagcagcccccccagcagcgctacctgcagcaccaccacttccaccaggagcggcggggcggcagcctggacatcaatgatggccactgcggcaccggcctgggcagcgagatgaatgctgccctgatgcacagaagacacacagatcctgtgcagctgcaggccgccggccgggtgcgctgggcccgggccctgtatgactttgaggccctggaggatgatgagctgggcttccacagcggggaggtggtggaggtgctggacagcagcaaccccagctggtggacaggccgcctgcacaacaagctgggcctcttccctgccaactacgtggcccccatgaccaggtag

SEQ ID NO: 110027 - DNA, 294 bp, Artificial Sequence
  derived and/or modified sequence
atggaggccgtggccaagtttgacttcaccgccagcggggaggatgagctgtccttccacactggagatgtgctgaagatcctgagcaaccaggaggagtggttcaaggccgagctgggcagccaggagggctacgtgcccaagaacttcatcgacatccagttccccaagtggttccacgagggcctgagccgccaccaggccgagaacctgctgatgggcaaggaggtgggcttcttcatcatccgggccagccagagcagccctggggacttcagcatctctgtgaggtag

SEQ ID NO: 110028 - DNA, 837 bp, Artificial Sequence
  derived and/or modified sequence
atggaggccgtggccaagtttgacttcaccgccagcggggaggatgagctgtccttccacactggagatgtgctgaagatcctgagcaaccaggaggagtggttcaaggccgagctgggcagccaggagggctacgtgcccaagaacttcatcgacatccagttccccaagcatgaagatgatgtgcagcacttcaaggtgatgagggacaacaagggcaactacttcctgtggacagagaagttccccagcctgaacaagctggtggactactaccgcaccaacagcatcagccggcagaagcagatcttcctgcgggacaggacccgggaggaccagggccaccggggcaacagcctggaccggcgcagccagggcggcccccacctgtctggagctgtgggggaggagatccggcccagcatgaacaggaagctgagtgaccacccccccaccctgcccctgcagcagcaccagcaccagccccagcccccccagtatgccccagccccccagcagctgcagcagcccccccagcagcgctacctgcagcaccaccacttccaccaggagcggcggggcggcagcctggacatcaatgatggccactgcggcaccggcctgggcagcgagatgaatgctgccctgatgcacagaagacacacagatcctgtgcagctgcaggccgccggccgggtgcgctgggcccgggccctgtatgactttgaggccctggaggaggtgctggacagcagcaaccccagctggtggacaggccgcctgcacaacaagctgggcctcttccctgccaactacgtggcccccatgaccaggtag

SEQ ID NO: 110029 - DNA, 915 bp, Artificial Sequence
  derived and/or modified sequence
atgctggagtttgtgtccctgctggccaggaaggacagcaacaacagcgtgtccaagcccaggcacaagctgaaccccttcagcagcaagcgctggttccacgagggcctgagccgccaccaggccgagaacctgctgatgggcaaggaggtgggcttcttcatcatccgggccagccagagcagccctggggacttcagcatctctgtgagacatgaagatgatgtgcagcacttcaaggtgatgagggacaacaagggcaactacttcctgtggacagagaagttccccagcctgaacaagctggtggactactaccgcaccaacagcatcagccggcagaagcagatcttcctgcgggacaggacccgggaggaccagggccaccggggcaacagcctggaccggcgcagccagggcggcccccacctgtctggagctgtgggggaggagatccggcccagcatgaacaggaagctgagtgaccacccccccaccctgcccctgcagcagcaccagcaccagccccagcccccccagtatgccccagccccccagcagctgcagcagcccccccagcagcgctacctgcagcaccaccacttccaccaggagcggcggggcggcagcctggacatcaatgatggccactgcggcaccggcctgggcagcgagatgaatgctgccctgatgcacagaagacacacagatcctgtgcagctgcaggccgccggccgggtgcgctgggcccgggccctgtatgactttgaggccctggaggatgatgagctgggcttccacagcggggaggtggtggaggtgctggacagcagcaaccccagctggtggacaggccgcctgcacaacaagctgggcctcttccctgccaactacgtggcccccatgaccaggtag

SEQ ID NO: 110030 - DNA, 993 bp, Artificial Sequence
  derived and/or modified sequence
atggaggccgtggccaagttcgacttcaccgccagcggcgaggacgagctctcatttcatactggtgacgtgctgaagattctgtcaaaccaagaggaatggtttaaggctgaactcggatcacaggagggctacgttccaaagaatttcattgacattcagtttccaaagtggtttcatgaagggctgagcaggcaccaagcggaaaacctgctaatgggaaaggaagtaggatttttcattatccgggcttcccagtcctccccgggagatttctcaatcagtgtgcgccatgaggacgacgtccagcatttcaaagtgatgcgagacaacaaaggcaattattttctctggaccgaaaaatttcccagcttgaacaaactagtggattactatagaacgaattctatatcccgccagaagcagattttcctccgagaccgaactcgggaggatcaaggacatcgcggtaattctctcgataggaggtctcagggtggacctcatctgtccggcgctgtgggcgaagagatccgacccagtatgaacagaaaactgagcgatcatccccccacattgccgctgcaacagcatcagcaccaaccccagccccctcagtatgccccagcgccacagcaacttcagcagcccccccagcagcggtatttacagcaccatcatttccaccaggaaagaaggggcggtagcctggatatcaatgatggccattgcgggactggcctgggctctgaaatgaacgcggccctcatgcacagacggcatacggaccccgttcagcttcaggcggctggccgagtgagatgggccagggctttgtacgattttgaggcgttagaagatgacgaattagggtttcactcaggcgaggtagtagaggtcctcgactccagcaatcctagctggtggacaggtcggctgcacaataagctaggactcttccccgctaactatgtggctccaatgactaggtag

SEQ ID NO: 110031 - DNA, 993 bp, Artificial Sequence
  derived and/or modified sequence
atggaggccgtggccaagttcgacttcaccgccagcggcgaggacgagctgtcctttcataccggcgatgtactgaagatcctctcgaaccaggaggaatggttcaaggcagagctgggttctcaggagggctacgttcctaaaaacttcattgacattcagttccccaagtggttccacgagggattgagtcggcaccaggctgaaaaccttctgatgggcaaggaggtcggcttttttatcatccgcgcctctcagtcaagcccaggtgacttcagtatatccgttagacatgaggatgacgtccaacacttcaaagtgatgagagacaataaagggaattacttcctgtggaccgagaagttcccttctttgaataaacttgtcgactactaccggactaactcaatctcccggcaaaaacagattttcctgagggatcgcacccgggaggatcagggccacagagggaactccttggatcgcaggtcacagggcggtccccacctctctggagccgttggcgaggagattcggccaagcatgaaccgtaaactgtcagatcaccccccaaccctgcccctgcaacagcaccagcaccaaccccaacccccccagtatgcccccgccccccagcaactccagcagcccccacagcagcggtacctgcagcatcaccacttccaccaggagagacgcggcgggagcctggacataaacgatggtcattgcggcaccggcctcgggtcagaaatgaacgctgccctaatgcatcggcgtcataccgaccccgtccagttgcaagcagcaggccgggtaaggtgggctcgggctttatacgatttcgaggcgctcgaggatgatgagctgggattccactctggcgaagtggtcgaggtacttgactcttccaacccctcctggtggacaggccgattacacaacaaactcggtctgttcccagcaaactacgtggctcccatgactcggtag

SEQ ID NO: 110032 - DNA, 294 bp, Artificial Sequence
  derived and/or modified sequence
atggaggccgtggccaagttcgacttcaccgccagcggcgaggacgagctcagtttccacacgggggatgttcttaagatattgtccaatcaagaggagtggttcaaggcggagttgggaagccaggaaggatacgtgccaaaaaacttcatcgatatccaattcccaaaatggtttcacgaaggtctgtccaggcatcaagctgagaatcttttaatgggcaaggaagtgggattctttattatcagggcttctcagagttcaccaggcgatttcagtatttcagtccgctag

SEQ ID NO: 110033 - DNA, 837 bp, Artificial Sequence
  derived and/or modified sequence
atggaggccgtggccaagttcgacttcaccgccagcggcgaggacgaactatcattccataccggagacgttctgaagatcctaagcaaccaggaagaatggttcaaagcagaacttggtagtcaagagggttacgtaccaaaaaatttcattgacatccagtttccaaaacatgaggatgatgtccagcacttcaaagtgatgagagataacaaaggcaactatttcctgtggacggagaaattcccaagcttgaacaagctagttgattactaccggaccaattcaatttctcggcagaaacagatctttctgcgggacaggactcgcgaagaccagggccatagggggaattcactggatcgccgaagccagggtggacctcacctgtctggcgctgtcggagaagagatacgtccttccatgaatcggaagcttagcgaccaccccccgactctccctctgcaacaacaccagcatcagccccagcctccgcaatacgcccctgccccacaacagctgcagcaaccgccgcaacagcgctacctgcagcatcaccacttccaccaggaacggcgcggagggtctctggatatcaatgacggccattgtggcactgggctcgggtcggagatgaacgcagcactgatgcacagacgccacacagatccggtacagctccaggccgctggacgggttcggtgggcgcgagcgctgtacgacttcgaagcactggaagaggtcctcgattccagtaatccctcgtggtggacgggccggctgcacaataagttaggcctgtttccggctaactatgtggccccaatgacacgatag

SEQ ID NO: 110034 - DNA, 915 bp, Artificial Sequence
  derived and/or modified sequence
atgctggagttcgtgagcctgctggcccggaaggacagcaacaactcagtgtcgaaaccaaggcataagttgaacccattctcttccaaacgatggtttcacgagggactgtccagacaccaggcagagaatctcttgatgggaaaggaagttggattttttattatacgtgcatcccagtcctcaccgggtgactttagcattagcgtcagacacgaggacgacgtgcagcatttcaaggtcatgcgggacaacaaaggcaattactttctctggactgagaagttcccgtctttgaacaagctcgtggattattatcgtaccaattcaatcagtagacagaagcagatcttcctgcgtgaccgaacccgcgaggaccaaggacacagaggtaactcactcgaccggcggtcccaagggggtcctcatctcagcggcgccgtcggggaggaaattagaccctccatgaatcggaaactcagcgatcatccccccactctacccctgcaacagcatcagcatcagccccagccccctcagtacgcccctgctccgcaacaactgcaacaacctccccaacagcggtatttacagcatcatcacttccatcaagaacggaggggtggtagcctggacatcaacgatggccattgcggtaccgggttgggctcagagatgaacgccgccttgatgcaccgaagacacactgaccctgtgcagctccaagccgccggtagggtccgctgggccagagcactgtatgatttcgaggcgctagaagacgatgagctgggattccatagtggcgaggtcgtggaggtcctcgacagcagcaatccctcttggtggacaggaagactgcataacaaactaggactctttcctgctaactacgtggctcccatgactcgatag

SEQ ID NO: 110035 - DNA, 993 bp, Artificial Sequence
  derived and/or modified sequence
atggaggcggttgcgaagttcgatttcactgcctcaggcgaggatgagctctctttccacaccggtgatgtcctgaagatcctctctaatcaagaagaatggtttaaagccgagctgggcagccaagaaggttatgtgcctaaaaatttcatcgacattcagttcccaaagtggttccatgagggactgagccgtcaccaggccgaaaacctactgatgggcaaagaagtgggatttttcattatcagggcgtctcagagctctccaggcgatttttccatcagtgtgaggcatgaggatgatgtccaacacttcaaagtcatgcgggacaacaaaggcaattatttcctttggaccgaaaagtttccatcgttgaacaagctggtcgactactaccgcactaactccatcagccgccaaaaacagatatttcttcgggacagaacgcgggaggaccaggggcatcgcggtaactccttagatcggaggtctcagggaggcccacatctgagtggagccgtcggcgaagagattagacccagtatgaatcgcaaactctcagatcatccacccacacttccgttacagcagcaccagcaccagcctcaacctccacagtacgctcctgcgcctcagcagctacaacagccaccacaacagaggtatctccaacaccatcattttcaccaggagagacgcggaggttcactggacatcaatgacggacactgcggcaccggtcttggttcagaaatgaatgctgcactcatgcacaggcgtcataccgacccagtgcaactgcaagccgctggcagggtgagatgggctcgcgcattgtacgactttgaggcactggaggatgatgagctgggttttcattccggcgaggtggtggaggtcttagactcgagcaatccctcatggtggaccggacgcctccacaataaattgggcctgtttccagcgaactatgtggcgcctatgacaaggtag

SEQ ID NO: 110036 - DNA, 993 bp, Artificial Sequence
  derived and/or modified sequence
atggaagccgtggctaaatttgacttcactgcaagtggtgaggatgaactatcttttcatacaggagatgtgctaaagattctctccaatcaagaggaatggttcaaggccgagctggggagccaggagggttacgttcccaagaattttattgatatccaattcccaaaatggtttcacgaaggactctcccgccatcaggccgagaatctgctcatgggaaaagaggtaggttttttcatcatacgcgcatcacaaagtagtccaggcgacttcagtatcagcgtccggcatgaagatgatgttcagcatttcaaggttatgcgggacaacaagggcaactacttcctttggaccgagaagttccccagcctgaataaacttgtcgattattatcgaacaaattccatctcccgccaaaagcaaatcttcctgagagatagaacccgcgaggatcaggggcacaggggcaactccctcgatcgcagatcacagggcggaccacacctttccggggctgtcggcgaggaaatacggcctagtatgaaccggaagctgtctgatcaccctcccaccctcccgctgcagcagcaccagcaccagccacagccaccccagtacgctcccgcacctcagcagctgcagcagcctccccagcaacgatatctccagcatcaccattttcatcaggagcgacgcggagggagccttgatatcaatgatgggcactgtggtacagggctgggctcggagatgaacgccgctttaatgcataggaggcacacagatcccgtgcaattacaggccgcaggcagagttcggtgggccagggctctgtacgacttcgaggcgcttgaagacgacgagctgggtttccacagcggcgaggtggtcgaggtgctggacagctctaacccctcatggtggactggacgactccacaacaaattgggcttattcccagcaaactatgttgcccctatgaccagatag

SEQ ID NO: 110037 - DNA, 294 bp, Artificial Sequence
  derived and/or modified sequence
atggaagccgtagccaaatttgatttcaccgctagcggtgaagatgagctgtccttccacacaggcgacgtgctgaagattctctccaaccaggaggagtggttcaaggcagaactgggcagccaggagggatacgtgcctaagaacttcatagacattcagttcccgaagtggttccacgagggattgagtcgtcaccaggccgagaatctcctcatggggaaagaggtaggatttttcatcataagagccagccagtccagccctggggacttctccataagcgtgaggtag

SEQ ID NO: 110038 - DNA, 837 bp, Artificial Sequence
  derived and/or modified sequence
atggaagccgtcgcgaaattcgatttcactgccagtggagaggacgagttatcatttcacacaggcgatgtcttgaagattcttagtaaccaggaagaatggttcaaggccgagctgggctcacaagaggggtatgtgcccaaaaatttcattgatattcagtttcctaagcatgaagatgatgtgcagcacttcaaagtcatgagagacaacaaagggaactatttcctttggacggaaaagtttccctctctgaataaacttgtggactactatcgaactaactctattagccgccagaagcagatattcctgcgtgatcggacaagagaggaccagggacacaggggcaattctttggatcgaaggtcacaggggggacctcatctgagtggagctgtgggagaggagatccgacctagcatgaacaggaagctctcagatcatccacctaccctgcctcttcagcagcaccaacatcaaccccagcccccacagtacgccccagcaccacaacagctacagcagccacctcagcagcgatatttacagcaccatcactttcaccaggagcgcagggggggaagtctggatatcaacgacggtcattgcggcaccggactcggcagcgaaatgaatgccgcactgatgcaccgtaggcacacagatcctgtgcagctccaggctgccggtagagtgaggtgggcaagagccctgtacgacttcgaggctctggaggaggtgctggactccagcaatccctcatggtggacagggcgactgcacaacaagcttggactgtttccagccaactatgtggcccctatgactagatag

SEQ ID NO: 110039 - DNA, 915 bp, Artificial Sequence
  derived and/or modified sequence
atgctggagtttgtgtcactgctggcacgcaaagacagtaataattcagtatctaagccaagacataagctgaaccctttttcatcaaaaagatggtttcacgagggcttgagccgccaccaggcggaaaacttgctgatggggaaggaagtcggcttctttattatacgggctagccagtcatcacctggcgatttctccatctcggtccgccatgaagacgacgtgcagcacttcaaggtgatgcgggataacaaggggaattatttcctttggaccgagaagttcccctctttaaacaagctggtcgactattaccgtaccaacagtatctcccgtcagaagcagatcttcctgcgggatagaacacgcgaggaccaaggccatcggggaaactctctggataggagaagtcaagggggaccgcacctgtctggggcagtgggggaggagattagaccatccatgaatcggaagctgagcgatcacccaccaacgctgccattgcagcagcatcaacatcaacctcagccccctcagtacgccccagccccacaacagctgcaacagccaccccaacagaggtacttgcagcaccatcacttccaccaggagcggagaggtggatcactcgacattaacgacgggcactgcggcacgggcctaggctcagaaatgaatgcagcgcttatgcatcgtagacacactgaccctgtgcaattgcaggccgcaggacgtgtccgatgggcacgggctctgtacgatttcgaggccctggaggacgacgagctgggattccactccggcgaggtagttgaggtgcttgactcatcaaacccatcctggtggaccggacgtctgcataacaagctgggcctgttccctgccaattacgtggcccctatgactagatag

SEQ ID NO: 110040 - DNA, 993 bp, Artificial Sequence
  derived and/or modified sequence
atggaggccgtggccaagttcgacttcaccgccagcggcgaggacgagctgagcttccacaccggcgacgtgctgaagatcctgagcaaccaggaggagtggttcaaggccgagctgggcagccaggagggctacgtgcccaagaacttcatcgacatccagttccccaagtggttccacgagggcctgagcagacaccaggccgagaacctgctgatgggcaaggaggtgggcttcttcatcatcagagccagccagagcagccccggcgacttcagcatcagcgtgagacacgaggacgacgtgcagcacttcaaggtgatgagagacaacaagggcaactacttcctgtggaccgagaagttccccagcctgaacaagctggtggactactacagaaccaacagcatcagcagacagaagcagatcttcctgagagacagaaccagagaggaccagggccacagaggcaacagcctggacagaagaagccagggcggcccccacctgagcggcgccgtgggcgaggagatcagacccagcatgaacagaaagctgagcgaccacccccccaccctgcccctgcagcagcaccagcaccagccccagcccccccagtacgcccccgccccccagcagctgcagcagcccccccagcagagatacctgcagcaccaccacttccaccaggagagaagaggcggcagcctggacatcaacgacggccactgcggcaccggcctgggcagcgagatgaacgccgccctgatgcacagaagacacaccgaccccgtgcagctgcaggccgccggcagagtgagatgggccagagccctgtacgacttcgaggccctggaggacgacgagctgggcttccacagcggcgaggtggtggaggtgctggacagcagcaaccccagctggtggaccggcagactgcacaacaagctgggcctgttccccgccaactacgtggcccccatgaccagatag

SEQ ID NO: 110041 - DNA, 294 bp, Artificial Sequence
  derived and/or modified sequence
atggaggccgtggccaagttcgacttcaccgccagcggcgaggacgagctgagcttccacaccggcgacgtgctgaagatcctgagcaaccaggaggagtggttcaaggccgagctgggcagccaggagggctacgtgcccaagaacttcatcgacatccagttccccaagtggttccacgagggcctgagcagacaccaggccgagaacctgctgatgggcaaggaggtgggcttcttcatcatcagagccagccagagcagccccggcgacttcagcatcagcgtgagatag

SEQ ID NO: 110042 - DNA, 837 bp, Artificial Sequence
  derived and/or modified sequence
atggaggccgtggccaagttcgacttcaccgccagcggcgaggacgagctgagcttccacaccggcgacgtgctgaagatcctgagcaaccaggaggagtggttcaaggccgagctgggcagccaggagggctacgtgcccaagaacttcatcgacatccagttccccaagcacgaggacgacgtgcagcacttcaaggtgatgagagacaacaagggcaactacttcctgtggaccgagaagttccccagcctgaacaagctggtggactactacagaaccaacagcatcagcagacagaagcagatcttcctgagagacagaaccagagaggaccagggccacagaggcaacagcctggacagaagaagccagggcggcccccacctgagcggcgccgtgggcgaggagatcagacccagcatgaacagaaagctgagcgaccacccccccaccctgcccctgcagcagcaccagcaccagccccagcccccccagtacgcccccgccccccagcagctgcagcagcccccccagcagagatacctgcagcaccaccacttccaccaggagagaagaggcggcagcctggacatcaacgacggccactgcggcaccggcctgggcagcgagatgaacgccgccctgatgcacagaagacacaccgaccccgtgcagctgcaggccgccggcagagtgagatgggccagagccctgtacgacttcgaggccctggaggaggtgctggacagcagcaaccccagctggtggaccggcagactgcacaacaagctgggcctgttccccgccaactacgtggcccccatgaccagatag

SEQ ID NO: 110043 - DNA, 915 bp, Artificial Sequence
  derived and/or modified sequence
atgctggagttcgtgagcctgctggccagaaaggacagcaacaacagcgtgagcaagcccagacacaagctgaaccccttcagcagcaagagatggttccacgagggcctgagcagacaccaggccgagaacctgctgatgggcaaggaggtgggcttcttcatcatcagagccagccagagcagccccggcgacttcagcatcagcgtgagacacgaggacgacgtgcagcacttcaaggtgatgagagacaacaagggcaactacttcctgtggaccgagaagttccccagcctgaacaagctggtggactactacagaaccaacagcatcagcagacagaagcagatcttcctgagagacagaaccagagaggaccagggccacagaggcaacagcctggacagaagaagccagggcggcccccacctgagcggcgccgtgggcgaggagatcagacccagcatgaacagaaagctgagcgaccacccccccaccctgcccctgcagcagcaccagcaccagccccagcccccccagtacgcccccgccccccagcagctgcagcagcccccccagcagagatacctgcagcaccaccacttccaccaggagagaagaggcggcagcctggacatcaacgacggccactgcggcaccggcctgggcagcgagatgaacgccgccctgatgcacagaagacacaccgaccccgtgcagctgcaggccgccggcagagtgagatgggccagagccctgtacgacttcgaggccctggaggacgacgagctgggcttccacagcggcgaggtggtggaggtgctggacagcagcaaccccagctggtggaccggcagactgcacaacaagctgggcctgttccccgccaactacgtggcccccatgaccagatag

SEQ ID NO: 110044 - protein, 217 aa, Artificial Sequence
  derived and/or modified sequence
MVSRRPLSTPGRELTHGQGGWLLHHPGQPELPRGLLHLCQGHRGNSLDRRSQGGPHLSGAVGEEIRPSMNRKLSDHPPTLPLQQHQHQPQPPQYAPAPQQLQQPPQQRYLQHHHFHQERRGGSLDINDGHCGTGLGSEMNAALMHRRHTDPVQLQAAGRVRWARALYDFEALEDDELGFHSGEVVEVLDSSNPSWWTGRLHNKLGLFPANYVAPMTR

SEQ ID NO: 110045 - DNA, 654 bp, Artificial Sequence
  derived and/or modified sequence
atggtctcacggcgcccccttagtacccccggacgcgagctgacacacggacagggcggctggttactgcatcacccaggtcagccagagttgcctcgcgggctcctacatctgtgccaggggcacaggggtaattctctggatcggagatcgcagggcggtcctcatcttagtggcgccgtcggggaggagatccgcccttctatgaaccgcaagttgtccgaccaccctcctacgcttcccttgcaacagcatcaacaccagcctcaaccaccgcagtatgcacctgcaccacaacaactgcagcaacccccacagcagcgatatctccagcatcaccatttccatcaggagcgtagaggggggtctttggatataaatgacggccactgcggcaccggcctagggtctgagatgaacgccgctctcatgcataggagacatacggaccccgtccaacttcaggcagccgggcgggtgcggtgggctcgcgcactttacgatttcgaagctctggaggacgatgagttaggtttccatagtggagaagtggtggaggtgctggattcttctaacccaagttggtggaccggaagactacacaacaaactcgggctcttcccggccaactacgtggctccgatgacacggtag

SEQ ID NO: 110046 - DNA, 1066 bp, Artificial Sequence
  derived and/or modified sequence
gagttcctcaatcgctggctctcaggagctgtttggaaaattcgttgccatgcatgagtcgggggattggttttttttccactggaaattgttaatggggactgcattagcggccccttatcgctttgcctgatagagagacagcaggttcgcccaaacaattctggaaccctgatcactgccaattaggggagtattgtctggctgacataatcaaatggtttcacgaaggcctctctcgacaccaggcagagaacttactcatgggcaaggaggttggcttcttcatcatccgggccagccagagctccccaggggacttctccatctctgtcagggtcaccggggcaacagcctggaccggaggtcccagggaggcccacacctcagtggggctgtgggagaagaaatccgaccttcgatgaaccggaagctgtcggatcaccccccgacccttcccctgcagcagcaccagcaccagccacagcctccgcaatatgccccagcgccccagcagctgcagcagcccccacagcagcgatatctgcagcaccaccatttccaccaggaacgccgaggaggcagccttgacataaatgatgggcattgtggcaccggcttgggcagtgaaatgaatgcggccctcatgcatcggagacacacagacccagtgcagctccaggcggcagggcgagtgcggtgggcccgggcgctgtatgactttgaggccctggaggatgacgagctggggttccacagcggggaggtggtggaggtcctggatagctccaacccatcctggtggaccggccgcctgcacaacaagctgggcctcttccctgccaactacgtggcacccatgacccgataaactcttcaggggacagaagctttttgtctggagctgcccacaagaaagagggcaaggaaaaaaggctggactccatgactatatatacatacatctatctacatctgcctgtgtacacacacaactttttatactagtaatttattggcaattgggctggtaattagttgatgcaaaagggaactcaggtggaga

SEQ ID NO: 110047 - DNA, 654 bp, Artificial Sequence
  derived and/or modified sequence
atggtgtcccggcggcccctgagcaccccaggccgggagctgacccacggccagggcggctggctgctgcaccaccctggccagcctgagctgccccggggcctgctgcacctgtgccagggccaccggggcaacagcctggacagaagaagccagggcggcccccacctgagcggggctgtgggggaggagatccggcccagcatgaacaggaagctgagtgaccacccccccaccctgcccctgcagcagcaccagcaccagccccagcccccccagtatgccccagccccccagcagctgcagcagcccccccagcagcgctacctgcagcaccaccacttccaccaggagaggagaggaggcagcctggacatcaatgatggccactgcggcaccggcctgggcagcgagatgaatgctgccctgatgcaccggcggcacacagatcctgtgcagctgcaggccgccggccgggtgcgctgggcccgggccctgtatgactttgaggccctggaggatgatgagctgggcttccacagcggggaggtggtggaggtgctggacagcagcaaccccagctggtggacaggccgcctgcacaacaagctgggcctcttccctgccaactacgtggcccccatgaccaggtag

SEQ ID NO: 110048 - DNA, 654 bp, Artificial Sequence
  derived and/or modified sequence
atggtgagccggcggcccctgagcacccccggccgggagctgacccacggacagggtggctggctgctgcaccatcccggccagccagaactaccgcgcgggctgctgcatctgtgccaaggacatcgtggtaacagtctcgacagacgctcccagggcggtccacacttgagtggcgctgttggcgaggagatccgaccgtctatgaaccggaagctgagcgaccatcccccaacgttgccacttcagcagcatcagcaccagccccagcccccacagtatgcacctgctccacagcagcttcagcagccaccacagcagcgatatctacaacatcaccattttcaccaagaaaggcgaggcggtagtctggacatcaacgatggccattgtgggaccgggctcgggagcgaaatgaacgctgctctgatgcatcgtcggcacactgaccccgtccaactgcaagccgccggcagagtgcggtgggcacgggcattatacgactttgaggccctggaggatgatgagctgggcttccattccggagaggtcgtggaagtcttggatagcagcaaccccagctggtggacaggtaggttgcataacaagcttggattatttcctgccaactatgtggcccctatgacccggtag

SEQ ID NO: 110049 - DNA, 654 bp, Artificial Sequence
  derived and/or modified sequence
atggtttcccggagacccctgtctaccccgggacgcgagttgacacatggccaaggcggatggctgctccaccaccctgggcagccagagctgccgcgtgggctgctacatctgtgccagggccacagaggaaactctttggacaggcggtctcagggtggccctcacttgtccggggctgtcggggaagagatacgtccctctatgaacaggaagttgagtgatcacccacccacacttccgctccaacagcaccagcatcagccccaacctcctcaatacgccccagctccacagcagctccagcagcccccacagcagcgatacctccagcaccatcattttcaccaagaacgcaggggaggatctctagacattaacgacggccattgtggaacaggcctcggcagcgaaatgaacgccgcattgatgcaccggaggcacacagacccggtccagcttcaggccgctgggagggtgagatgggcccgtgcgttgtacgacttcgaggcacttgaggatgatgagttgggttttcactccggagaagtggtggaagtgttggacagttcaaacccgagctggtggactggcagactgcacaataagctcggtttgttcccagctaactacgtagctcccatgacccgctag

SEQ ID NO: 110050 - DNA, 654 bp, Artificial Sequence
  derived and/or modified sequence
atggtgagcagaagacccctgagcacccccggcagagagctgacccacggccagggcggctggctgctgcaccaccccggccagcccgagctgcccagaggcctgctgcacctgtgccagggccacagaggcaacagcctggacagaagaagccagggcggcccccacctgagcggcgccgtgggcgaggagatcagacccagcatgaacagaaagctgagcgaccacccccccaccctgcccctgcagcagcaccagcaccagccccagcccccccagtacgcccccgccccccagcagctgcagcagcccccccagcagagatacctgcagcaccaccacttccaccaggagagaagaggcggcagcctggacatcaacgacggccactgcggcaccggcctgggcagcgagatgaacgccgccctgatgcacagaagacacaccgaccccgtgcagctgcaggccgccggcagagtgagatgggccagagccctgtacgacttcgaggccctggaggacgacgagctgggcttccacagcggcgaggtggtggaggtgctggacagcagcaaccccagctggtggaccggcagactgcacaacaagctgggcctgttccccgccaactacgtggcccccatgaccagatag

SEQ ID NO: 110051 - protein, 492 aa, Artificial Sequence
  derived and/or modified sequence
MQLLMLELLLLFIVYGTRTHGLFKRLGIPGPTPLPLLGNVLSYRQGLWKFDTECYKKYGKMWGTYEGQLPVLAITDPDVIRTVLVKECYSVFTNRRSLGPVGFMKSAISLAEDEEWKRIRSLLSPTFTSGKLKEMFPIIAQYGDVLVRNLRREAEKGKPVTLKDIFGAYSMDVITGTSFGVNIDSLNNPQDPFVESTKKFLKFGFLDPLFLSIILFPFLTPVFEALNVSLFPKDTINFLSKSVNRMKKSRLNDKQKHRLDFLQLMIDSQNSKETESHKALSDLELAAQSIIFIFAGYETTSSVLSFTLYELATHPDVQQKLQKEIDAVLPNKAPPTYDAVVQMEYLDMVVNETLRLFPVAIRLERTCKKDVEINGVFIPKGSMVVIPTYALHHDPKYWTEPEEFRPERFSKKKDSIDPYIYTPFGTGPRNCIGMRFALMNMKLALIRVLQNFSFKPCKETQIPLKLDTQGLLQPEKPIVLKVDSRDGTLSGE

SEQ ID NO: 110052 - DNA, 1479 bp, Artificial Sequence
  derived and/or modified sequence
atgcagttgctcatgctggaacttctgctgctctttatagtttacggtacccgcactcacggtctgtttaagagattagggattcctgggcccacacctctgccactactgggcaacgtactgtcctaccgacaaggtctgtggaagtttgacactgaatgctataagaagtatggaaagatgtggggtacctatgaagggcaacttccggtgctagctattacagaccctgacgtcattcgcacagtccttgttaaagaatgctattctgtgttcacaaatcgtagaagtctcgggcctgttggcttcatgaagtctgcaatttcccttgccgaggacgaggaatggaagaggataaggtcattgctgtcgccaacattcacgagcggaaaacttaaggagatgttccccatcatcgcccagtacggggatgtgctggttagaaacctgcggagagaagccgagaaggggaagcctgtcacccttaaagatattttcggggcttactcgatggacgtgattactgggacttctttcggcgtaaacattgattctctgaataacccacaggacccattcgtggaatccacaaaaaagtttctgaagtttgggttcctggacccccttttccttagtatcatactgtttcctttcctgactccagtgttcgaggcgctgaatgtgtctttattcccaaaagacacaataaattttctgagcaaatccgtgaataggatgaagaagagtcgactgaatgataagcagaagcaccgcctcgatttcttgcagctgatgatcgattctcagaattccaaagaaactgagtctcacaaggcactgagcgacctcgaactcgccgcacagtcgatcatttttatctttgccggatacgaaacaactagttcagtgctttcgtttactctttatgagctggctactcacccagacgtgcaacagaagctgcaaaaggaaatcgacgcggtgctgccaaacaaagctccacctacatacgacgctgtggtgcagatggaatacctcgatatggttgtgaacgaaacactccgtctgtttcctgttgccatacggctggaacggacctgtaaaaaggatgtagagattaacggggtttttattccaaagggatctatggtcgtgatcccaacctacgcccttcatcacgacccgaagtactggacagaacctgaggaatttcgacctgagcggtttagcaagaagaaggattctattgatccttatatctatacacccttcgggacagggccgcggaactgtatcgggatgaggttcgccctgatgaatatgaagctggctctgattcgcgtgctgcagaatttctcctttaagccttgtaaagagacgcagattcccctgaagttggacacccagggcctgctgcagcccgagaagccaattgtgctgaaagtcgatagtagagacggaacactgtcaggcgagtag

SEQ ID NO: 110053 - DNA, 1479 bp, Artificial Sequence
  derived and/or modified sequence
atgcagctgctgatgctggagctgctgctgctcttcatcgtgtatggcaccaggacccacggcctcttcaagaggctgggcatccctggccccacccccctgcccctgctgggcaatgtgctgagctaccggcagggcctgtggaagtttgacacagagtgctacaagaagtatggcaagatgtggggcacctatgagggccagctgcctgtgctggccatcacagatcctgatgtgatcagaacagtgctggtgaaggagtgctacagcgtcttcaccaacagaagaagcctgggccctgtgggcttcatgaagagcgccatcagcctggccgaggatgaggagtggaagaggatccgcagcctgctgagccccaccttcaccagcggcaagctgaaggagatgttccccatcatcgcccagtatggagatgtgctggtgaggaacctgcggcgggaggccgagaagggcaagcctgtgaccctgaaggacatctttggagcctacagcatggatgtgatcaccggcaccagctttggagtgaacatcgacagcctgaacaacccccaggacccctttgtggagagcaccaagaagttcctgaagtttggcttcctggaccccctcttcctgagcatcatcctcttccccttcctgacccctgtgtttgaggccctgaatgtgtccctcttccccaaggacaccatcaacttcctgagcaagtctgtgaacaggatgaagaagagccggctgaatgacaagcagaagcaccggctggacttcctgcagctgatgattgacagccagaacagcaaggagacagagagccacaaggccctgagtgacctggagctggccgcccagagcatcatcttcatctttgctggctatgagaccaccagctctgtgctgtccttcaccctgtatgagctggccacccacccagatgtgcagcagaagctgcagaaggagattgatgctgtgctgcccaacaaggccccacccacctatgatgctgtggtgcagatggagtacctggacatggtggtgaatgagaccctgcggctcttccctgtggccatccggctggagaggacctgcaagaaggatgtggagatcaacggggtcttcatccccaagggctccatggtggtgatccccacctacgccctgcaccacgaccccaagtactggacagagcctgaggagttccggcctgagcgcttcagcaagaagaaggacagcattgacccctacatctacacccccttcggcaccggccccaggaactgcatcggcatgagatttgccctgatgaacatgaagctggccctgatccgggtgctgcagaacttctccttcaagccctgcaaggagacccagatccccctgaagctggacacccagggcctgctgcagcctgagaagcccatcgtgctgaaggtggacagcagagatggcaccctgagcggggagtag

SEQ ID NO: 110054 - DNA, 1479 bp, Artificial Sequence
  derived and/or modified sequence
atgcagctgctgatgctggagctgctgctgctgttcatcgtgtacggaacacgtacccacggcctgtttaagcggcttgggatcccaggcccgacaccattgccccttctcggcaatgtcctaagttacagacagggactctggaagtttgataccgaatgttacaaaaagtatggtaagatgtggggaacttatgaagggcagttaccagtactcgcaattaccgatccagacgtgattcggacggtgcttgtgaaggaatgctattccgtctttactaaccgacggagccttgggcccgtcggctttatgaaatccgccatttccttggccgaagatgaagaatggaagcgcattcgctctttactatcccctacgttcacatcaggaaagctgaaagagatgttccctatcatagcccagtatggggatgtactggtcagaaatctgcggcgggaggcagaaaaggggaaacccgtaaccctgaaggacattttcggcgcatattccatggatgtgatcaccggaactagtttcggtgttaacatcgacagtctgaacaatccacaggatcccttcgtggaatcgactaaaaaattcctgaaatttggcttcctggatccactcttcctgtccataatcctgtttccgtttctcactcccgtctttgaagcactcaacgttagtttattccctaaagacactattaatttcctgagcaagtccgtcaacagaatgaagaagagccggctcaacgacaagcagaaacacagactggattttttacagctcatgatcgatagccaaaactccaaagaaaccgagtcacataaggccctgagtgatctggagctggccgcccagtccattatttttatcttcgccggctacgaaactacatcatcagtcctcagctttaccctctacgagctggccacacacccagatgtgcagcagaagctgcagaaggagattgatgctgtcctgcctaacaaagctcctcctacgtacgacgccgtggtccaaatggaatacctggatatggtagtgaacgagaccctgagactgttccccgtcgcgatcaggctggagagaacttgcaaaaaagatgtcgagatcaatggcgtctttatcccaaaaggcagtatggtggtcatcccaacttatgccctgcaccatgatccgaagtattggacagagccagaggagttcagacccgagagattttctaagaagaaggattccatagatccttatatctacacaccatttggtacaggcccgcggaattgtatagggatgcgatttgcactcatgaatatgaaacttgctttaatcagagtcctacagaatttcagcttcaagccgtgtaaggaaacgcaaattccactcaaactcgacacccaaggcctccttcaaccagaaaaacctatcgtcctcaaggtcgactccagggacggaacactgtccggcgagtag

SEQ ID NO: 110055 - DNA, 1479 bp, Artificial Sequence
  derived and/or modified sequence
atgcaactgctgatgctcgaactgttgctgttgttcattgtgtacgggacgcggacccacgggctgttcaaacgcctggggatcccagggcctacacctctccctctgctgggaaacgtcttgagctacagacaaggactctggaaattcgataccgaatgctacaaaaagtacggcaaaatgtgggggacctacgaggggcaactccccgtgttggccatcaccgaccctgacgttatccgcactgtactggtaaaggagtgctatagcgtcttcactaataggcggtccctggggcctgtgggttttatgaagtctgcaataagcctggcagaggatgaagagtggaagaggattcgatcactgctctcccccacgtttacttctgggaagttgaaagagatgttccctataattgctcagtatggggacgtcttggtcaggaacttgagacgcgaggccgagaaggggaagcccgtgaccctgaaagatatctttggcgcatactcaatggatgttattaccggcacctcgtttggggtcaatatagatagccttaataacccccaggatcccttcgtcgaaagtacaaagaagtttctgaagtttggtttcctcgaccctttatttcttagtatcattcttttcccgtttttgaccccggtattcgaagcattaaacgtgtctctgttccccaaagacaccatcaactttctcagcaagagcgtgaatagaatgaagaagagtcgtcttaatgataagcagaagcatcggctggatttcctccagttaatgattgatagccagaattccaaagaaactgagagccacaaggccttaagtgacttggagctggctgcccaaagtatcatattcattttcgcaggttatgagaccacctcatcagtcctgtcatttacgctgtacgagcttgccacgcatcccgacgtccagcagaagttacagaaggagattgatgcagttctgcccaacaaggcaccgccaacctatgatgcagtcgtccagatggaatatctggatatggtggttaacgagaccttgaggttattcccagtggcgatacgactggagcggacgtgcaagaaggatgtggagatcaatggggtttttattcccaagggaagcatggtggttattccaacatacgccttgcatcatgaccccaaatattggactgagccggaggagttccgaccagaacggttctccaagaaaaaggactccatagacccctatatctatactcctttcgggaccggcccaagaaactgcattgggatgcgttttgcacttatgaacatgaaactcgctttgattcgcgtattgcagaacttcagctttaagccctgcaaagagacgcaaattcctctgaagctggatacacaaggcctgcttcagccagaaaaacctatcgttctgaaagtcgattccagggacggcactctttctggggaatag

SEQ ID NO: 110056 - DNA, 1971 bp, Artificial Sequence
  derived and/or modified sequence
gtgcagggcagggaagctccaggcaaacagcccagcaaacagcagcactcagctaaaaggaagactcacagaacacagttgaagaaggaaagtggcgatggacctcatcccaaatttggcggtggaaacctggcttctcctggctgtcagcctggtgctcctctatctgatgagagtccccaaatcagcgaagagtccacttactaaacagacataaggaaatgaagtgtcctggaagaattcctgcctgaacctctcaggagcatttgaggacatttatcaagtattcactccaggattgggactatgaagacttcagctgctttcagctaatcattgagacttttcaggggtctcagaatagtcaggaaaggacctgatgagtgaatgcaattactgatgttggagttgctgttattatttatcgtatatgggacccgtacacatggactttttaagagactgggaattccagggcccacacctctgcctttgttgggaaatgttttgtcctatcgtcagggtctctggaaatttgacacagagtgctataaaaagtatggaaaaatgtggggaacgtatgaaggtcaactccctgtgctggccatcacagatcccgacgtgatcagaacagtgctagtgaaagaatgttattctgtcttcacaaatcgaaggtctttaggcccagtgggatttatgaaaagtgccatctctttagctgaggatgaagaatggaagagaatacggtcattgctgtctccaaccttcaccagcggaaaactcaaggagatgttccccatcattgcccagtatggagatgtattggtgagaaacttgaggcgggaagcagagaaaggcaagcctgtcaccttgaaagacatctttggggcctacagcatggatgtgattactggcacatcatttggagtgaacatcgactctctcaacaatccacaagacccctttgtggagagcactaagaagttcctaaaatttggtttcttagatccattatttctctcaataatactctttccattccttaccccagtttttgaagcattaaatgtctctctgtttccaaaagataccataaattttttaagtaaatctgtaaacagaatgaagaaaagtcgcctcaacgacaaacaaaagcaccgactagatttccttcagctgatgattgactcccagaattcgaaagaaactgagtcccacaaagctctgtctgatctggagctcgcagcccagtcaataatcttcatttttgctggctatgaaaccaccagcagtgttctttccttcactttatatgaactggccactcaccctgatgtccagcagaaactgcaaaaggagattgatgcagttttgcccaataaggcaccacctacctatgatgccgtggtacagatggagtaccttgacatggtggtgaatgaaacactcagattattcccagttgctattagacttgagaggacttgcaagaaagatgttgaaatcaatggggtattcattcccaaagggtcaatggtggtgattccaacttatgctcttcaccatgacccaaagtactggacagagcctgaggagttccgccctgaaaggttcagtaagaagaaggacagcatagatccttacatatacacaccctttggaactggacccagaaactgcattggcatgaggtttgctctcatgaacatgaaacttgctctaatcagagtccttcagaacttctccttcaaaccttgtaaagaaacacagatccccttgaaattagacacgcaaggacttcttcaaccagaaaaacccattgttctaaaggtggattcaagagatggaaccctaagtggagaatgagttattctaaggatttctactttggtcttcaagaaagctgtgccccagaacaccagagatttcaacttagtcaataaaaccttgaaataaagatgggcttaatct

SEQ ID NO: 110057 - DNA, 1479 bp, Artificial Sequence
  derived and/or modified sequence
atgcagctgctgatgctggagctgctgctgctgttcatcgtgtacggcaccagaacccacggcctgttcaagagactgggcatccccggccccacccccctgcccctgctgggcaacgtgctgagctacagacagggcctgtggaagttcgacaccgagtgctacaagaagtacggcaagatgtggggcacctacgagggccagctgcccgtgctggccatcaccgaccccgacgtgatcagaaccgtgctggtgaaggagtgctacagcgtgttcaccaacagaagaagcctgggccccgtgggcttcatgaagagcgccatcagcctggccgaggacgaggagtggaagagaatcagaagcctgctgagccccaccttcaccagcggcaagctgaaggagatgttccccatcatcgcccagtacggcgacgtgctggtgagaaacctgagaagagaggccgagaagggcaagcccgtgaccctgaaggacatcttcggcgcctacagcatggacgtgatcaccggcaccagcttcggcgtgaacatcgacagcctgaacaacccccaggaccccttcgtggagagcaccaagaagttcctgaagttcggcttcctggaccccctgttcctgagcatcatcctgttccccttcctgacccccgtgttcgaggccctgaacgtgagcctgttccccaaggacaccatcaacttcctgagcaagagcgtgaacagaatgaagaagagcagactgaacgacaagcagaagcacagactggacttcctgcagctgatgatcgacagccagaacagcaaggagaccgagagccacaaggccctgagcgacctggagctggccgcccagagcatcatcttcatcttcgccggctacgagaccaccagcagcgtgctgagcttcaccctgtacgagctggccacccaccccgacgtgcagcagaagctgcagaaggagatcgacgccgtgctgcccaacaaggccccccccacctacgacgccgtggtgcagatggagtacctggacatggtggtgaacgagaccctgagactgttccccgtggccatcagactggagagaacctgcaagaaggacgtggagatcaacggcgtgttcatccccaagggcagcatggtggtgatccccacctacgccctgcaccacgaccccaagtactggaccgagcccgaggagttcagacccgagagattcagcaagaagaaggacagcatcgacccctacatctacacccccttcggcaccggccccagaaactgcatcggcatgagattcgccctgatgaacatgaagctggccctgatcagagtgctgcagaacttcagcttcaagccctgcaaggagacccagatccccctgaagctggacacccagggcctgctgcagcccgagaagcccatcgtgctgaaggtggacagcagagacggcaccctgagcggcgagtag

SEQ ID NO: 110058 - DNA, 1434 bp, Artificial Sequence
  derived and/or modified sequence
atggatgcggatgagggccaggatatgagccaggtctccggaaaggaaagcccacccgtctccgacacccctgatgagggtgatgaacccatgcccatacccgaagatctgtctactacaagcgggggacagcagtctagtaagtcggatagagtcgtcgcgtctaatgttaaagtggaaacccagagtgatgaagagaatggacgcgcgtgcgagatgaacggtgaagaatgtgcagaggatctgcgcatgcttgatgcctctggtgaaaaaatgaacggatcccaccgggaccagggctcttcggccctatcaggtgtaggcggtatcaggcttccgaatgggaagttgaagtgcgacatatgtgggattatttgtatcggaccaaatgtcctgatggtgcacaaaagaagccataccggggaaagaccattccagtgtaaccaatgcggcgcctcctttactcagaaaggcaacctactgagacacataaaattacacagtggcgagaaaccctttaagtgccatctctgtaattacgcctgcaggcgtagagacgctctgaccgggcacctgagaacccatagcgtcataaaagaggagactaaccattccgaaatggccgaggatttatgcaagattggatcggaaagaagcttagtcctcgatagattggcaagcaacgttgccaagcgcaagtcatcaatgcctcagaagtttctcggggacaaaggactgagtgacaccccttacgattcttcagcctcctacgaaaaagaaaacgagatgatgaagtcccacgtcatggaccaagcgataaacaacgccatcaattacctgggcgccgaaagcctccggcctctggtccaaacgcctcccgggggaagtgaagtggtccctgttatctcccctatgtatcagctacataagccgctggctgaggggactcctagatccaatcactccgcccaagactcggccgtagaaaacctcctccttctgtcgaaagccaaactagttccctctgagcgcgaggctagccctagtaatagttgccaagacagcactgacactgagtcgaacaacgaagagcagcgatcaggactaatctatctgaccaatcacatagccccacatgctcgtaacggtctgtccctcaaggaggagcaccgcgcttatgacctactcagagccgctagcgagaattcccaggacgccctccgtgtggtgagtacttccggcgaacaaatgaaagtctacaaatgcgaacattgccgcgttctatttctggaccatgtgatgtatactatccacatgggctgtcatggcttccgtgacccctttgagtgcaatatgtgcggctatcactcacaggaccgctacgaattctcctctcacattaccagaggggaacatagattccatatgtcttag

SEQ ID NO: 110059 - DNA, 1434 bp, Artificial Sequence
  derived and/or modified sequence
atggacgccgatgagggccaggatatgagtcaagtgagcggtaaagagtcccctcccgttagcgacaccccggatgagggagatgagcctatgccaattccggaagacttgtccactacttccgggggacaacagagttcaaagtccgatcgggtagtcgcctccaacgtgaaagtggaaacccagagcgatgaggaaaacggacgtgcctgcgagatgaatggagaggagtgcgctgaagatctccgaatgttggacgcatcgggagagaaaatgaatggtagccatcgggaccagggtagctctgccctcagcggagtaggtgggataaggctccctaacgggaagttgaagtgcgatatatgtggtattatttgtatcgggcctaacgttcttatggttcataaaagatctcatacaggagaaaggccttttcagtgcaaccaatgcggagcgagttttactcagaaggggaatctcctgcgtcacataaagctgcattccggggagaaaccatttaaatgtcatctgtgtaattatgcatgcagaagaagagacgccctgaccggacacctgagaacccattcagtaatcaaggaggaaaccaaccacagcgaaatggcagaagacttatgtaaaattggcagcgagcgaagcctagttcttgacagactcgcaagcaatgtcgctaagagaaaatctagcatgcctcagaagttcctgggagacaagggcctgagcgatactccctacgatagctccgcctcctacgagaaagaaaacgagatgatgaagagccacgtcatggatcaggccatcaataacgccataaactatttaggcgcagagagcctgagacctctcgtgcaaaccccccctggcgggagtgaggtcgttccagtcattagccctatgtatcagctccataagccactggcagaggggacaccacgttctaaccatagcgctcaggatagcgccgtggaaaatcttcttttactgtcaaaggcaaagcttgtccctagcgagcgggaggcgtcccccagtaattcctgccaggacagcactgacaccgagagcaacaatgaagaacagcgctctgggctgatctatcttactaaccatattgccccccatgcccggaatggtcttagcctcaaagaggaacaccgggcttacgatctcctgcgtgctgcatctgaaaatagtcaggacgcgctgcgggtggtgtcaaccagcggagagcagatgaaagtctacaagtgtgaacattgccgggtcttgtttctcgaccacgttatgtacactattcacatgggatgccacggatttcgtgacccttttgaatgcaatatgtgcgggtaccacagtcaggacaggtacgagttctcctctcacatcactcggggagagcatagattccatatgagctag

SEQ ID NO: 110060 - DNA, 681 bp, Artificial Sequence
  derived and/or modified sequence
atggacgccgatgagggccaagacatgtcccaggtgtccgggaaggaaagcccacctgtctccgacacaccagacgagggtgatgaacctatgcctatccccgaagacctaagtactaccagtggagggcagcagagttccaaatcggatcgtgttgtggcgagtaatgtaaaagtcgaaacccagagtgacgaagagaatgggcgggcctgcgaaatgaatggcgaggagtgtgctgaagacctgcggatgctcgacgctagtggtgagaaaatgaatggatcccatcgcgatcagggcagtagtgccctaagcggggtcggagggatccgactaccaaatggcaagctgaagtgcgatatttgtggtatcatctgtatcgggccaaacgtactgatggtccacaagagatcccataccggcgaacggcctttccagtgtaatcagtgcggcgccagcttcacccagaaagggaatctgttgagacacatcaagcttcattctggcgagaaaccattcaaatgtcatctttgtaactatgcctgcaggaggcgagatgcgctaacggggcacctgcgaactcactccgtgattaaggaagaaactaaccattctgaaatggccgaggatctgtgtaagatcggtagtgagatctctcgagcaggccagacctcaaaatag

SEQ ID NO: 110061 - DNA, 1434 bp, Artificial Sequence
  derived and/or modified sequence
atggatgctgatgagggccaggacatgagccaggtgtctgggaaggagagcccccctgtgtctgacaccccagatgaaggagatgagcccatgcccatccctgaggacctgagcaccaccagcggcggccagcagagcagcaagagtgacagagtggtggccagcaatgtgaaggtggagacccagagtgatgaggagaatggccgggcctgtgagatgaatggagaagaatgtgccgaggacctgaggatgctggatgccagcggggagaagatgaatggcagccaccgggaccagggcagcagcgccctgtctggagtgggcggcatccggctgcccaacgggaagctgaagtgtgacatctgtggcatcatctgcatcggccccaacgtgctgatggtgcacaagaggagccacactggagagcggcccttccagtgcaaccagtgtggggccagcttcacccagaagggcaacctgctgcggcacatcaagctgcacagcggggagaagcccttcaagtgccacctgtgcaactatgcctgcagaagaagagatgccctgaccggccacctgcggacccacagcgtcatcaaggaggagaccaaccacagcgagatggccgaggacctgtgcaagattggcagcgagaggagcctggtgctggaccggctggccagcaatgtggccaagaggaagagctccatgccccagaagttcctgggggacaagggcctgagtgacaccccctatgacagcagcgccagctatgagaaggaaaatgagatgatgaagagccacgtgatggaccaggccatcaacaatgccatcaactacctgggcgctgagagcctgcggcccctggtgcagaccccacctgggggcagcgaggtggtgcctgtgatcagccccatgtaccagctgcacaagcccctggccgagggcacccccaggagcaaccacagcgcccaggacagcgctgtggagaacctgctgctgctgagcaaggccaagctggtgcccagcgagcgggaggccagccccagcaacagctgccaggacagcacagacacagagagcaacaatgaggagcagaggagcggcctcatctacctgaccaaccacatcgcccctcatgccagaaatggcctgagcctgaaggaggagcaccgggcctatgacctgctgcgggccgccagcgagaacagccaggatgccctgcgggtggtgtccaccagcggggagcagatgaaggtgtacaagtgtgagcactgccgggtgctcttcctggaccacgtgatgtacaccatccacatgggctgccacggcttccgggacccctttgagtgcaacatgtgtggctaccacagccaggacagatatgagttcagcagccacatcaccagaggagagcaccgcttccacatgtcctag

SEQ ID NO: 110062 - DNA, 681 bp, Artificial Sequence
  derived and/or modified sequence
atggatgctgatgagggccaggacatgagccaggtgtctgggaaggagagcccccctgtgtctgacaccccagatgaaggagatgagcccatgcccatccctgaggacctgagcaccaccagcggcggccagcagagcagcaagagtgacagagtggtggccagcaatgtgaaggtggagacccagagtgatgaggagaatggccgggcctgtgagatgaatggagaagaatgtgccgaggacctgaggatgctggatgccagcggggagaagatgaatggcagccaccgggaccagggcagcagcgccctgtctggagtgggcggcatccggctgcccaacgggaagctgaagtgtgacatctgtggcatcatctgcatcggccccaacgtgctgatggtgcacaagaggagccacactggagagcggcccttccagtgcaaccagtgtggggccagcttcacccagaagggcaacctgctgcggcacatcaagctgcacagcggggagaagcccttcaagtgccacctgtgcaactatgcctgcagaagaagagatgccctgaccggccacctgcggacccacagcgtcatcaaggaggagaccaaccacagcgagatggccgaggacctgtgcaagattggcagcgagatcagcagagctggccagaccagcaagtag

SEQ ID NO: 110063 - DNA, 1434 bp, Artificial Sequence
  derived and/or modified sequence
atggacgccgacgagggccaggacatgagccaggtgagcggcaaggaaagtccaccagtttctgacacacctgatgagggggatgaacctatgcctatccctgaagatcttagcacaacttccggtggccagcagtcgagcaagtcagaccgggtggtggccagtaatgtgaaggtggaaacccagagcgatgaagaaaatggccgggcatgtgaaatgaacggtgaggagtgtgccgaggacctgagaatgttggatgcctccggcgaaaagatgaatggctcccatagggatcagggcagctctgccctgtcgggagttggagggatccggctccctaacggaaagctgaagtgcgatatctgtggcatcatctgcatcggacccaacgtgctgatggtacacaagaggagtcacacaggtgagcggccattccagtgtaatcagtgcggggcctcttttacacagaagggcaacctgctccggcatatcaaacttcattccggtgaaaagccctttaaatgtcacctctgcaactacgcttgtagacggagggatgccttgacaggccaccttaggacccattctgtgattaaggaagagacaaaccattctgaaatggccgaggacctctgcaagattgggagcgaaaggagtctggtccttgaccggctggcttcaaacgtggcaaagaggaaaagcagtatgccgcaaaaatttctgggggacaaaggtttgtcagacaccccttacgactcctcagcttcttacgaaaaagagaatgagatgatgaagtcccacgtgatggatcaggctataaacaacgcaatcaattacctgggtgctgagtcattgagacctctggtgcagactccaccaggggggtcggaggtcgtcccagtcattagtcctatgtaccaacttcacaaaccgttggccgagggcacgcctaggtccaatcattctgcccaagattcggcagtggagaaccttctcctgctgtcgaaggctaaactcgtaccctcagagagggaggccagccctagtaacagttgtcaagattccaccgacacggagtccaataatgaagagcagagaagcggcctcatttacctaaccaatcatatcgcgccccacgcccgaaacggcttgagcttaaaggaagagcatagagcttacgaccttctcagggccgcctccgagaatagtcaggatgcactgagggttgtcagcacctccggagaacagatgaaagtgtacaaatgcgagcactgccgcgtgttgtttctggaccacgttatgtacaccattcacatgggctgtcacgggtttcgcgaccctttcgagtgcaatatgtgtggataccattcccaggaccgatatgaattttcctcgcatattacacgtggagagcacagatttcatatgtcctag

SEQ ID NO: 110064 - DNA, 1434 bp, Artificial Sequence
  derived and/or modified sequence
atggacgccgacgagggccaggacatgagccaggtgagcggcaaggagtctccacctgtctccgatacccctgacgagggagatgagcccatgcctatcccagaagacctcagcacgaccagtgggggccaacaatcaagcaagtctgaccgggtggtggcttccaacgtcaaagtggagacacaatcggacgaggagaatggacgtgcttgtgaaatgaacggagaggagtgtgctgaggacctgcgcatgttagacgcatccggggagaaaatgaatggtagtcatcgtgaccagggcagttccgccctgtcaggggtgggaggaattagactccccaacggcaaactcaagtgtgacatctgtggcattatctgtataggtcccaacgtgctaatggtccataagaggtcacacacgggggagcggccattccagtgcaaccagtgtggtgcttcatttactcagaagggaaacttgctccgacacattaagttgcactcaggcgagaagccatttaagtgccatctatgtaactacgcatgccggaggcgtgatgcattgaccggccacttacgaacacacagcgtgatcaaggaagaaactaatcatagcgaaatggctgaggacttgtgtaaaattggctccgagaggtccctcgtgctggaccggctcgcaagtaacgtggccaagcgtaagagttcgatgccccagaaattcctcggagataaaggtctttcagacactccatacgactccagcgcaagttacgaaaaggagaatgagatgatgaaaagccacgtgatggatcaggccatcaacaacgcaataaactatctgggggcagagagtctgcgccccttggtacagactccccccggaggctcggaggttgtgccagtgatctcccccatgtaccaattgcacaaacctctggcagagggtacaccgcgcagtaaccactccgcgcaggactctgcagtcgagaatttacttctgctaagcaaagctaaactcgtcccctctgaaagagaggctagccccagtaactcttgtcaggactccacagataccgaaagtaacaacgaggagcaaaggtccggcctgatctacttaaccaaccatatagccccccatgcacgcaatggactgagcctcaaggaagaacaccgcgcctacgacctgctgcgggcagcctcagagaatagccaagatgcactgagggttgtctcaacaagcggtgaacagatgaaggtgtacaaatgcgagcactgtcgggttctgttcctggatcacgtgatgtacaccatccacatgggttgccacgggtttagggaccctttcgaatgcaatatgtgcggataccactcccaggaccgttacgaatttagcagccacatcaccaggggagagcaccgctttcatatgagttag

SEQ ID NO: 110065 - DNA, 681 bp, Artificial Sequence
  derived and/or modified sequence
atggacgccgacgagggccaggacatgagccaggtgagcggcaaggagagccctccagtttcagacacgcccgatgagggagatgagcctatgcctatccctgaagacctctcgaccacatctggagggcagcaaagctcaaaatctgaccgggtcgttgccagtaacgtgaaggtggaaacccaatcagacgaggagaacggcagagcttgtgagatgaatggggaggaatgcgccgaggacttacgcatgctcgacgcaagtggggaaaaaatgaacggcagtcatcgcgaccaggggtcttccgcactatcaggggttggcggcatcaggcttcctaacggcaagttgaaatgtgatatttgcggcattatctgtatcggccccaacgtccttatggttcataagcgatcccacaccggagagcgcccctttcagtgtaatcagtgcggggcatctttcactcaaaagggtaacctcctccgccacatcaaactacactccggcgaaaagccattcaagtgccatctgtgtaattacgcatgtagacgacgcgacgcgctgacagggcacttgaggactcactctgtgatcaaggaagagacaaatcattccgaaatggccgaggacctgtgtaagatcggctccgaaattagccgcgcaggccaaacctccaaatag

SEQ ID NO: 110066 - DNA, 1434 bp, Artificial Sequence
  derived and/or modified sequence
atggatgcagacgaaggccaggatatgagccaggtgtccggcaaagaatcccctcctgtgtcagacacgcccgacgagggagacgaacctatgcccatccctgaggatctgagcactaccagcggcggacagcaatcctctaagagtgaccgggtcgtcgcctcaaacgtgaaggtggagactcagtctgacgaggaaaatgggagggcttgcgaaatgaacggagaggaatgcgccgaagaccttagaatgttggacgcttcaggcgaaaaaatgaacgggagccaccgtgatcaaggctcctccgccttatctggtgtggggggaatccgcctcccaaacggaaaactgaaatgcgacatatgcggtatcatttgtatcgggccaaacgtgctgatggtgcataaaagatcacataccggcgaaaggcctttccagtgtaaccaatgtggggcatcctttacgcaaaagggcaatttactgaggcacatcaagctccatagcggggagaagccattcaagtgccatctgtgtaattatgcatgtaggaggagggacgcactgactggccacctgcggacccactctgtcattaaagaagaaaccaaccactcagaaatggctgaggacctgtgcaagattggtagtgagagatcgctcgtgttggaccgcttggcgtccaacgtggcgaagagaaaatcaagcatgcctcagaaattcctcggagacaagggtctctctgatactccctacgattcatccgcctcctacgaaaaggagaacgagatgatgaagagtcatgttatggaccaggctattaacaatgcgatcaattacctgggagcggagtcactgaggcccttggtccagacaccacctgggggttctgaggtggtgccggtcatcagccccatgtatcaattgcataaaccactggccgaggggacccctcggagtaaccacagcgcccaggactcagcagtggagaatctgctgttgctttctaaggctaagctggtccccagtgaacgtgaggcaagtcctagtaactcctgtcaggactccaccgatacagaatctaataatgaagagcagcgctcaggcctgatttacctcactaatcacattgcgccacacgccagaaacggcctctccttaaaagaggagcacagagcatatgatctcctgcgcgctgcctctgagaactctcaggatgccctgcgggttgtgtccacatccggagaacagatgaaggtttataagtgcgagcattgcagagtcctatttctggaccatgtgatgtacacaatccacatgggatgtcacggattccgtgatccatttgaatgcaatatgtgtggatatcactctcaagaccgctacgaattctcttcacacataacgcggggtgagcacagattccacatgagctag

SEQ ID NO: 110067 - DNA, 1434 bp, Artificial Sequence
  derived and/or modified sequence
atggacgccgacgaggggcaagatatgtcccaggtgtccggtaaagaatccccacccgttagcgacaccccggacgaaggagacgaacccatgccaattccagaggacctgagcaccacctcaggcggtcagcagagttctaaaagcgaccgagtggtggcaagcaatgtaaaggtggagacccagagcgacgaagaaaatggaagagcttgtgaaatgaacggagaggagtgcgcagaggatctaagaatgctcgacgctagtggcgagaagatgaatggtagccatcgcgaccagggaagcagcgcactgagtggagttggtggaatccgtctgccaaatggtaagcttaagtgcgatatctgtggaattatctgcataggaccgaatgtgctgatggtgcataagagatcccacacaggggagaggccattccagtgcaaccagtgcggcgcttccttcacgcagaagggtaatttgctgaggcacatcaagctgcactcgggggaaaaaccatttaagtgtcatttgtgcaactatgcttgccgaagacgcgatgctctcactggacacctgcgcactcatagtgtaattaaggaagagaccaatcacagtgagatggccgaggacctttgcaaaatcggatcagaacggagtctcgtgcttgatcgtttggcatccaatgtagccaagcggaagtctagtatgccacagaagtttttgggagacaaaggactcagcgatacaccatacgactcatctgccagctacgagaaagaaaacgagatgatgaagagccacgtgatggatcaggctatcaataacgccatcaattacctgggagcagagtccctgcgacccctggtccagacacccccaggcggttccgaggtggttcccgtgatttcgcccatgtaccagctgcacaaaccgctcgcagagggaactcctaggtccaaccactctgcccaagatagcgcagtggaaaatctgctcctcctgtcgaaggctaagctggttccctccgagagggaggccagcccctcaaactcctgtcaggattcgacagataccgaatccaacaacgaggagcagagatccggcttgatttacctcaccaaccacatcgcccctcacgccagaaacggactgtcactgaaggaggagcacagagcctacgatctcctgcgagctgcctctgagaacagtcaggacgcgcttcgagtggtgtccacctccggcgagcagatgaaagtttacaagtgcgagcactgtagagtgctcttcttagatcatgtcatgtacacaatccacatgggttgccatgggttcagggatcccttcgaatgcaatatgtgcgggtaccacagtcaggatcgatatgaattttcatcccatatcactagaggggagcatcgtttccatatgtcctag

SEQ ID NO: 110068 - DNA, 681 bp, Artificial Sequence
  derived and/or modified sequence
atggatgccgacgaggggcaggacatgtcacaggtgtctggcaaggaatcccctcctgtcagtgacacgcctgatgagggagacgagccaatgcctatccccgaagatcttagcacaacaagcggtggccagcagtctagtaaatccgatcgagtggtggcgtccaatgttaaagtggagacacagtccgacgaggagaatggacgggcatgcgaaatgaatggggaagagtgtgctgaggatctgagaatgctagacgctagtggcgaaaaaatgaatggctcccatcgggaccaaggaagcagcgctctgagcggggtggggggtatcaggttgcccaatggcaagctcaaatgtgatatttgcgggattatctgtatcgggcctaatgtgctcatggtgcataagcgaagtcacaccggggagaggccttttcaatgtaatcagtgcggcgcttccttcactcaaaaaggaaatcttctacgtcacattaagctccacagcggagagaaaccgttcaaatgccacttgtgcaattacgcttgcagaaggcgcgacgcccttaccggtcacctccgcacgcattctgtgatcaaggaggagacaaatcattccgagatggcagaggacctctgcaagatcggcagcgaaatcagccgggctggccaaacttccaaatag

SEQ ID NO: 110069 - DNA, 1434 bp, Artificial Sequence
  derived and/or modified sequence
atggacgccgacgagggccaggacatgagccaggtgagcggcaaggagagcccccccgtgagcgacacccccgacgagggcgacgagcccatgcccatccccgaggacctgagcaccaccagcggcggccagcagagcagcaagagcgacagagtggtggccagcaacgtgaaggtggagacccagagcgacgaggagaacggcagagcctgcgagatgaacggcgaggagtgcgccgaggacctgagaatgctggacgccagcggcgagaagatgaacggcagccacagagaccagggcagcagcgccctgagcggcgtgggcggcatcagactgcccaacggcaagctgaagtgcgacatctgcggcatcatctgcatcggccccaacgtgctgatggtgcacaagagaagccacaccggcgagagacccttccagtgcaaccagtgcggcgccagcttcacccagaagggcaacctgctgagacacatcaagctgcacagcggcgagaagcccttcaagtgccacctgtgcaactacgcctgcagaagaagagacgccctgaccggccacctgagaacccacagcgtgatcaaggaggagaccaaccacagcgagatggccgaggacctgtgcaagatcggcagcgagagaagcctggtgctggacagactggccagcaacgtggccaagagaaagagcagcatgccccagaagttcctgggcgacaagggcctgagcgacaccccctacgacagcagcgccagctacgagaaggagaacgagatgatgaagagccacgtgatggaccaggccatcaacaacgccatcaactacctgggcgccgagagcctgagacccctggtgcagaccccccccggcggcagcgaggtggtgcccgtgatcagccccatgtaccagctgcacaagcccctggccgagggcacccccagaagcaaccacagcgcccaggacagcgccgtggagaacctgctgctgctgagcaaggccaagctggtgcccagcgagagagaggccagccccagcaacagctgccaggacagcaccgacaccgagagcaacaacgaggagcagagaagcggcctgatctacctgaccaaccacatcgccccccacgccagaaacggcctgagcctgaaggaggagcacagagcctacgacctgctgagagccgccagcgagaacagccaggacgccctgagagtggtgagcaccagcggcgagcagatgaaggtgtacaagtgcgagcactgcagagtgctgttcctggaccacgtgatgtacaccatccacatgggctgccacggcttcagagaccccttcgagtgcaacatgtgcggctaccacagccaggacagatacgagttcagcagccacatcaccagaggcgagcacagattccacatgagctag

SEQ ID NO: 110070 - DNA, 681 bp, Artificial Sequence
  derived and/or modified sequence
atggacgccgacgagggccaggacatgagccaggtgagcggcaaggagagcccccccgtgagcgacacccccgacgagggcgacgagcccatgcccatccccgaggacctgagcaccaccagcggcggccagcagagcagcaagagcgacagagtggtggccagcaacgtgaaggtggagacccagagcgacgaggagaacggcagagcctgcgagatgaacggcgaggagtgcgccgaggacctgagaatgctggacgccagcggcgagaagatgaacggcagccacagagaccagggcagcagcgccctgagcggcgtgggcggcatcagactgcccaacggcaagctgaagtgcgacatctgcggcatcatctgcatcggccccaacgtgctgatggtgcacaagagaagccacaccggcgagagacccttccagtgcaaccagtgcggcgccagcttcacccagaagggcaacctgctgagacacatcaagctgcacagcggcgagaagcccttcaagtgccacctgtgcaactacgcctgcagaagaagagacgccctgaccggccacctgagaacccacagcgtgatcaaggaggagaccaaccacagcgagatggccgaggacctgtgcaagatcggcagcgagatcagcagagccggccagaccagcaagtag

SEQ ID NO: 110071 - DNA, 1299 bp, Artificial Sequence
  derived and/or modified sequence
atggacgcagacgagggacaggacatgagtcaggtgtccggcaaggaaagccccccggtatctgacactccagatgaaggcgatgagccaatgccgatccccgaagatttgtccacaacgtccggcgggcagcagtcgagcaagagcgatcgcgtggtgggggagaggcccttccagtgtaatcagtgtggggctagtttcacacaaaagggcaatctgttgagacacataaaacttcacagcggcgaaaaaccgttcaagtgccacctgtgtaattacgcatgtaggcgacgagatgctctcacaggccacctcagaacccatagcgtggggaaaccccacaaatgtggctactgcggacggagttataaacaaagatccagcctggaggaacacaaggaacggtgtcacaattacctagagtcaatgggcctgcctggcactttgtatccagtcattaaagaggagaccaatcatagcgagatggctgaggatctgtgcaaaataggcagcgaaaggtccttggtgctcgatagattagcttccaatgtggcgaagcggaaatcctccatgccacagaagtttctcggtgacaagggtctcagtgataccccatacgatagctcagccagctatgaaaaggaaaatgagatgatgaaatcccatgttatggatcaagccattaacaacgcaattaattatctgggtgcagagtctttgagaccactggtccagactccccctggggggtccgaagttgtaccggttatcagccctatgtaccagttacacaaaccactggctgaggggacacccaggagtaaccacagcgcacaggacagcgcagtcgagaatttgttactgctcagtaaagctaaactggttccatctgaaagggaggcatccccatctaactcttgccaggatagcaccgataccgaaagcaacaacgaggagcaacgctctggtctcatctacctgactaatcacattgcaccccacgctcgaaacggcctgtctctaaaagaggagcacagggcttacgaccttctgcgcgctgcctctgaaaattctcaagatgccttgcgtgtggtgtctacctctggagaacagatgaaagtttacaagtgtgagcattgccgcgtgctatttctggaccacgtgatgtacacaattcacatgggctgtcatggttttcgggatccatttgagtgtaacatgtgcggataccattcccaggataggtatgagttttcatcacacatcactagaggggagcaccgtttccatatgagttag

SEQ ID NO: 110072 - DNA, 1299 bp, Artificial Sequence
  derived and/or modified sequence
atggacgccgacgaaggacaagacatgtcccaggtatctggtaaggagagccctccagtgagcgacactccggatgagggggatgaaccaatgcctatacctgaggacctttccaccacgtcaggaggacaacagtcgtctaagagcgatcgagtggttggcgaacgcccctttcagtgtaaccagtgtggggcctccttcacacagaagggtaacctgctgagacacattaaactccactccggggaaaagccattcaaatgccatctgtgtaattatgcctgtagacgtcgagacgctctcaccgggcacctgcggacgcattccgtgggcaagcctcacaaatgtggatattgcggacgaagctataaacagcgctcttctctggaagagcacaaagaacgctgtcacaactaccttgagtctatgggtctcccagggacgctgtacccggttatcaaggaagaaaccaaccattcagagatggcggaagacctgtgtaaaatcggatccgagcgaagtcttgtgcttgaccgcctggccagcaacgttgctaagaggaagtcgtccatgccccaaaaattcctcggcgataaggggctgtccgacaccccatatgactctagcgcatcttatgagaaggagaacgagatgatgaaatcacacgtgatggatcaggcaatcaacaatgcgatcaactacttgggagcggaatctctgagacccctagtccagacacctcctgggggaagcgaggtagttcccgtcatttcccctatgtaccaacttcataagccacttgctgaggggacaccccgctccaaccactctgcacaggacagcgccgtggagaacctactacttctgtcaaaggctaagctggtgccctccgagcgggaggctagcccaagtaactcatgtcaggatagcacggataccgagtcaaacaatgaagagcagagatccggcctcatctatctgacgaaccacatagcaccacacgctaggaacggactctccctaaaagaggaacaccgagcttacgatctcctccgagccgcttccgaaaatagccaagatgctctaagggtagtgagcacatctggggaacaaatgaaagtgtataagtgcgaacactgccgagttctgtttcttgaccatgttatgtatactattcacatgggctgtcacggattccgggaccctttcgaatgtaacatgtgcgggtatcactcacaggaccggtacgaattcagttctcacattactaggggcgaacacagattccatatgtcatag

SEQ ID NO: 110073 - DNA, 1299 bp, Artificial Sequence
  derived and/or modified sequence
atggatgctgatgagggccaggacatgagccaggtgtctgggaaggagagcccccctgtgtctgacaccccagatgaaggagatgagcccatgcccatccctgaggacctgagcaccaccagcggcggccagcagagcagcaagagtgacagagtggtgggggagcggcccttccagtgcaaccagtgtggggccagcttcacccagaagggcaacctgctgcggcacatcaagctgcacagcggggagaagcccttcaagtgccacctgtgcaactatgcctgcagaagaagagatgccctgaccggccacctgcggacccacagcgtgggcaagccccacaagtgtggctactgcggccgcagctacaagcagaggagcagcctggaggagcacaaggagcgctgccacaactacctggagagcatgggcctgcccggcaccctgtaccctgtgatcaaggaggagaccaaccacagcgagatggccgaggacctgtgcaagattggcagcgagaggagcctggtgctggaccggctggccagcaatgtggccaagaggaagagctccatgccccagaagttcctgggggacaagggcctgagtgacaccccctatgacagcagcgccagctatgagaaggaaaatgagatgatgaagagccacgtgatggaccaggccatcaacaatgccatcaactacctgggcgctgagagcctgcggcccctggtgcagaccccacctgggggcagcgaggtggtgcctgtgatcagccccatgtaccagctgcacaagcccctggccgagggcacccccaggagcaaccacagcgcccaggacagcgctgtggagaacctgctgctgctgagcaaggccaagctggtgcccagcgagcgggaggccagccccagcaacagctgccaggacagcacagacacagagagcaacaatgaggagcagaggagcggcctcatctacctgaccaaccacatcgccccccacgccagaaatggcctgagcctgaaggaggagcaccgggcctatgacctgctgcgggccgccagcgagaacagccaggatgccctgcgggtggtgtccaccagcggggagcagatgaaggtgtacaagtgtgagcactgccgggtgctcttcctggaccacgtgatgtacaccatccacatgggctgccacggcttccgggacccctttgagtgcaacatgtgtggctaccacagccaggacagatatgagttcagcagccacatcaccagaggagagcaccgcttccacatgtcctag

SEQ ID NO: 110074 - DNA, 1299 bp, Artificial Sequence
  derived and/or modified sequence
atggacgccgacgagggccaggacatgagccaggtgagcggcaaggaatcaccgcctgtgtccgacaccccagatgaaggcgacgagcccatgcctattcctgaagacttgtccacaacctccgggggtcaacagagttcaaagagtgaccgtgtggtgggagaacgcccgttccaatgcaaccagtgtggcgcaagcttcacgcaaaagggaaacctcctgcggcacattaagcttcattcaggcgagaagccattcaagtgtcacctgtgcaactacgcttgtcggcgaagagacgctttgactggccacctcaggacacatagcgtaggaaaaccacataaatgcggatactgtggccgctcgtataaacaaaggagttccctagaagaacacaaagagcgttgccacaactacttagagagtatgggcctgccgggaacactttacccagtgattaaggaagaaacaaaccacagcgagatggcagaggatctttgcaaaatcggtagcgaacgctcacttgtgctagacagactcgcgtccaacgtcgctaagagaaagtcctctatgccacaaaaattcctaggggacaaaggcctttccgataccccgtacgatagttccgcctcctacgaaaaggaaaacgagatgatgaagtcacatgttatggaccaggccatcaacaatgctattaactatctgggggccgagagcttgaggccactcgtgcagacccccccgggtggttcagaggtcgtacccgttatcagtcctatgtaccagctgcacaaaccgctggcagagggcaccccccgttcgaaccattctgcgcaggattccgcagtggagaacttactcttactgtctaaggctaaactggttccatccgagagggaggcttcacctagtaatagctgccaggactccacggacaccgagtctaataacgaagaacagcgctcagggctcatctatctaaccaaccatattgccccgcatgcgcgaaatggcctgagtctgaaagaagagcaccgggcttacgatctcctgcgcgctgccagcgaaaacagccaggacgccctccgagtcgtgagcacttcaggagagcagatgaaggtttacaaatgtgagcactgtagggtcctcttcttagaccatgtgatgtacacaattcacatgggctgtcacggctttcgcgaccccttcgaatgtaacatgtgtgggtaccacagccaggaccggtacgaattcagctctcacattacccgtggggagcaccgcttccacatgtcgtag

SEQ ID NO: 110075 - DNA, 1299 bp, Artificial Sequence
  derived and/or modified sequence
atggacgccgacgagggccaggacatgagccaggtgagcggcaaggaatctcctccagtgagcgacacacctgacgagggagatgagcctatgcctattcccgaagatctgtctacaactagcggaggtcagcaatcttcaaaaagcgacagggtcgtcggtgagcggcccttccaatgtaatcagtgtggggcctcgttcacacagaagggcaaccttttgagacatataaaacttcatagcggtgaaaagccttttaagtgtcatctttgcaattacgcctgtaggcgtagagacgcacttaccggtcacctgcgaacgcattccgtggggaagccacacaagtgtggctactgtggtagaagctacaagcagcgctcctcgttggaagaacataaggagaggtgccataactacttggaatcaatgggtctgccaggaaccctgtaccccgtgatcaaagaagagaccaaccattctgaaatggccgaagatttgtgtaagattgggtcagaacgatctctggtactcgaccggctggcgagtaacgtggccaaaagaaagagcagcatgccgcaaaagtttctgggtgacaagggcctgagcgacacgccatacgactcctccgcttcatacgagaaagaaaatgaaatgatgaaatcccatgtgatggaccaagctattaataacgccatcaattacctcggagccgagagcttgcgcccccttgtgcaaaccccccccggaggaagcgaagtcgtgcctgtgattagtcctatgtaccagctgcataaacccttggcagagggaacccccaggtctaaccatagcgctcaggatagcgctgtggagaacctgctgcttcttagcaaagccaaactcgttcctagcgaacgcgaagcaagcccatctaacagctgccaggattctacagataccgagagtaataatgaagagcaacggtccggcctgatctatttaaccaatcacattgctccccacgctcgcaacggcctgagtctgaaggaggagcaccgggcctacgacctgctgcgggctgcttcagagaatagccaggacgcactgcgggtcgtgagcacgtccggcgagcaaatgaaagtgtacaaatgcgagcattgcagagtcctgttcctggatcacgtgatgtacaccatacacatgggctgccacgggttcagagatccatttgagtgcaacatgtgcggctaccatagccaggaccgatacgagttcagttcacacattacgcgtggagagcacaggttccacatgtcctag

SEQ ID NO: 110076 - DNA, 1299 bp, Artificial Sequence
  derived and/or modified sequence
atggatgccgatgaggggcaagatatgtcccaggtgagcggaaaggagagcccccctgtgagtgatacacccgacgaaggcgacgagccaatgcccattcccgaggacctctcaactactagcggcggacagcagtcttccaagagcgatagagttgtcggcgagcggccattccagtgcaaccaatgcggagcctcattcacgcaaaaggggaacctgctgcgccacattaagttgcacagcggagaaaagccttttaaatgtcacctgtgcaactatgcgtgtcgtagacgggacgcgttaacagggcatctacgtacccattcggtgggaaagccacacaaatgtggctactgcggaagaagctacaagcagaggtcatctctcgaagagcataaggagaggtgtcacaattatctggagagtatgggcttgcctggaactctttatcccgttatcaaggaagagactaaccactccgaaatggcagaagatctgtgcaagattggctccgaacgctctctggttctggataggctggctagtaatgttgccaaacgtaagtctagtatgccccagaagtttctgggagataaaggcctttccgacactccttatgactccagcgcctcatacgagaaggaaaatgagatgatgaagtctcatgtgatggaccaagctatcaacaacgccatcaactaccttggtgccgagtctctccgacctttagtccagactccaccaggcggttctgaagtggtgcctgttatctccccaatgtatcaactccataaaccattagccgagggcacgccaagatccaatcattctgcccaagattccgccgtggaaaacctactgctcctgtccaaagccaaactggtgccctccgagagggaggcctcccccagcaatagttgtcaggattccacagatactgaaagcaacaatgaagaacagcggagcgggttaatctacctcacaaatcacatcgccccacacgctcgaaacggtctctctctgaaggaagagcaccgtgcgtatgatctgctgcgagctgcttctgagaactcccaggacgctttgcgcgtggtgtccacttcgggagagcaaatgaaagtgtacaaatgcgagcattgcagagtgctgtttctcgatcatgttatgtacactattcacatgggctgtcatggttttagggacccatttgaatgcaacatgtgcggctatcactcccaagatagatatgagttttcttcccacatcacccgaggcgagcacagatttcatatgtcatag

SEQ ID NO: 110077 - DNA, 1299 bp, Artificial Sequence
  derived and/or modified sequence
atggacgccgatgagggccaggatatgtcacaggtgagtgggaaggagagcccaccggtgtccgatacgcccgatgaaggagacgagccaatgcctatcccagaggatttgtcaactactagtggcggtcaacagtcatctaaatccgacagggtagtcggcgagaggcctttccagtgcaaccagtgtggcgcttcctttacgcagaagggcaacttgctgagacatattaagttacatagcggcgagaaaccattcaaatgtcacctgtgcaactatgcctgtcgccgaagagacgccttgaccggacacttacgaacccactcagtcggaaaaccacacaaatgcgggtattgtggacggagttacaaacagaggtcaagcctggaggagcacaaggagcgatgtcataattatttggaatctatgggattacccggaaccctgtatcccgtcataaaagaagagacaaaccatagcgaaatggccgaagatctctgtaagatagggagcgagcgaagcctcgtgctcgatcgactggcgtcgaacgtcgcaaagaggaagagctccatgccccaaaaatttttgggtgataagggactgtccgacacaccttacgacagtagcgcctcttatgagaaggaaaacgaaatgatgaaaagccatgtgatggaccaggccataaacaacgccattaactatctgggagcagaaagcctacggccattggttcagacacctccaggcggttctgaggtggttccagtaatctctccaatgtaccagctccacaagccactggctgagggcacccccagaagcaatcacagcgcccaggactctgccgtagagaacctcctgctcctgtcaaaagccaagctggtgccatcagaaagggaggcgagcccaagtaacagctgtcaggatagcacagatacagaatctaacaacgaggagcagagaagtggactgatctacctaacgaatcacattgcaccccacgccaggaatgggctttcactcaaggaggagcatagagcatacgatctcctccgggcagccagtgagaactcccaagacgccctgagggtagtgagcacgtcaggagagcaaatgaaggtatataagtgcgaacattgtcgagtgctgttcttagaccacgtgatgtacacaattcacatgggatgccacggcttccgagacccgttcgagtgtaatatgtgtggctatcattcacaagatcgctatgaattttccagccatatcactcgcggtgaacaccgcttccatatgtcctag

SEQ ID NO: 110078 - DNA, 1299 bp, Artificial Sequence
  derived and/or modified sequence
atggacgccgacgagggccaggacatgagccaggtgagcggcaaggagagcccccccgtgagcgacacccccgacgagggcgacgagcccatgcccatccccgaggacctgagcaccaccagcggcggccagcagagcagcaagagcgacagagtggtgggcgagagacccttccagtgcaaccagtgcggcgccagcttcacccagaagggcaacctgctgagacacatcaagctgcacagcggcgagaagcccttcaagtgccacctgtgcaactacgcctgcagaagaagagacgccctgaccggccacctgagaacccacagcgtgggcaagccccacaagtgcggctactgcggcagaagctacaagcagagaagcagcctggaggagcacaaggagagatgccacaactacctggagagcatgggcctgcccggcaccctgtaccccgtgatcaaggaggagaccaaccacagcgagatggccgaggacctgtgcaagatcggcagcgagagaagcctggtgctggacagactggccagcaacgtggccaagagaaagagcagcatgccccagaagttcctgggcgacaagggcctgagcgacaccccctacgacagcagcgccagctacgagaaggagaacgagatgatgaagagccacgtgatggaccaggccatcaacaacgccatcaactacctgggcgccgagagcctgagacccctggtgcagaccccccccggcggcagcgaggtggtgcccgtgatcagccccatgtaccagctgcacaagcccctggccgagggcacccccagaagcaaccacagcgcccaggacagcgccgtggagaacctgctgctgctgagcaaggccaagctggtgcccagcgagagagaggccagccccagcaacagctgccaggacagcaccgacaccgagagcaacaacgaggagcagagaagcggcctgatctacctgaccaaccacatcgccccccacgccagaaacggcctgagcctgaaggaggagcacagagcctacgacctgctgagagccgccagcgagaacagccaggacgccctgagagtggtgagcaccagcggcgagcagatgaaggtgtacaagtgcgagcactgcagagtgctgttcctggaccacgtgatgtacaccatccacatgggctgccacggcttcagagaccccttcgagtgcaacatgtgcggctaccacagccaggacagatacgagttcagcagccacatcaccagaggcgagcacagattccacatgagctag

SEQ ID NO: 110079 - protein, 289 aa, Artificial Sequence
  derived and/or modified sequence
MDADEGQDMSQVSGKESPPVSDTPDEGDEPMPIPEDLSTTSGGQQSSKSDRVVGDKGLSDTPYDSSASYEKENEMMKSHVMDQAINNAINYLGAESLRPLVQTPPGGSEVVPVISPMYQLHKPLAEGTPRSNHSAQDSAVENLLLLSKAKLVPSEREASPSNSCQDSTDTESNNEEQRSGLIYLTNHIAPHARNGLSLKEEHRAYDLLRAASENSQDALRVVSTSGEQMKVYKCEHCRVLFLDHVMYTIHMGCHGFRDPFECNMCGYHSQDRYEFSSHITRGEHRFHMS

SEQ ID NO: 110080 - DNA, 870 bp, Artificial Sequence
  derived and/or modified sequence
atggatgcagacgagggtcaggacatgtcgcaagtgagcggcaaagaaagcccacccgtctcagacactcccgatgaaggcgacgagcctatgccaatccctgaagatcttagtactacctcaggcggtcaacagagctctaaaagcgaccgcgtggttggagacaaaggcctttctgataccccgtacgatagctcggcttcttacgaaaaggagaacgagatgatgaaatctcacgtcatggaccaagccattaacaacgcaattaactaccttggggcggaaagcttgaggcccctggtacagacgcctccaggcggctccgaggtagtcccggtaatctcgcctatgtaccaactccacaaacctctagccgaaggcactcctagaagcaatcacagtgcccaggattccgcagtggagaaccttcttctgctctctaaggcaaaattagtccccagcgaaagagaagccagcccgagcaatagttgccaagactcaaccgacaccgaatccaataatgaagagcaaagaagtggcctgatctaccttacaaaccacatagcccctcacgcacggaacggactgagcctcaaagaggagcacagggcttatgatttgttaagggccgctagtgaaaactcccaggatgccctgcgggtcgtcagcacaagcggcgagcagatgaaagtctacaagtgtgaacactgccgtgtcttattcctggatcatgttatgtacacaattcacatggggtgccacggctttcgagatcctttcgaatgtaacatgtgtgggtaccattcccaggacagatacgagttttcctcccacattacccgaggggagcatagattccatatgtcttag

SEQ ID NO: 110081 - DNA, 5499 bp, Artificial Sequence
  derived and/or modified sequence
cgcggcgcatcccagcctgggcgggacgctcggccgcggcgaggcgggcaagcctggcagggcagagggagccccggctccgaggttgctcttcgcacccgaggatcagtcttggccccaaagcgcgacgcacaaatccacataacctgaggaccatggatgctgatgagggtcaagacatgtcccaagtttcagggaaggaaagcccccctgtaagcgatactccagatgagggcgatgagcccatgccgatccccgaggacctctccaccacctcgggaggacagcaaagctccaagagtgacagagtcgtgggggacaagggcctgtccgacacgccctacgacagcagcgccagctacgagaaggagaacgaaatgatgaagtcccacgtgatggaccaagccatcaacaacgccatcaactacctgggggccgagtccctgcgcccgctggtgcagacgcccccgggcggttccgaggtggtcccggtcatcagcccgatgtaccagctgcacaagccgctcgcggagggcaccccgcgctccaaccactcggcccaggacagcgccgtggagaacctgctgctgctctccaaggccaagttggtgccctcggagcgcgaggcgtccccgagcaacagctgccaagactccacggacaccgagagcaacaacgaggagcagcgcagcggtctcatctacctgaccaaccacatcgccccgcacgcgcgcaacgggctgtcgctcaaggaggagcaccgcgcctacgacctgctgcgcgccgcctccgagaactcgcaggacgcgctccgcgtggtcagcaccagcggggagcagatgaaggtgtacaagtgcgaacactgccgggtgctcttcctggatcacgtcatgtacaccatccacatgggctgccacggcttccgtgatccttttgagtgcaacatgtgcggctaccacagccaggaccggtacgagttctcgtcgcacataacgcgaggggagcaccgcttccacatgagctaaagccctcccgcgcccccaccccagaccccgagccaccccaggaaaagcacaaggactgccgccttctcgctcccgccagcagcatagactggactggaccagacaatgttgtgtttggatttgtaactgttttttgttttttgtttgagttggttgattggggtttgatttgcttttgaaaagatttttatttttagaggcagggctgcattgggagcatccagaactgctaccttcctagatgtttccccagaccgctggctgagattccctcacctgtcgcttcctagaatccccttctccaaacgattagtctaaattttcagagagaaatagataaaacacgccacagcctgggaaggagcgtgctctaccctgtgctaagcacggggttcgcgcaccaggtgtctttttccagtccccagaagcagagagcacagcccctgctgtgtgggtctgcaggtgagcagacaggacaggtgtgccgccacccaagtgccaagacacagcagggccaacaacctgtgcccaggccagcttcgagctacatgcatctagggcggagaggctgcacttgtgagagaaaatactatttcaagtcatattctgcgtaggaaaatgaattggttggggaaagtcgtgtctgtcagactgccctgggtggagggagacgccgggctagagcctttgggatcgtcctggattcactggctttgcggaggctgctcagatggcctgagcctcccgaggcttgctgccccgtaggaggagactgtcttcccgtgggcatatctggggagccctgttccccgctttttcactcccatacctttaatggcccccaaaatctgtcactacaatttaaacaccagtcccgaaatttggatcttctttctttttgaatctctcaaacggcaacattcctcagaaaccaaagctttatttcaaatctcttccttccctggctggttccatctagtaccagaggcctcttttcctgaagaaatccaatcctagccctcattttaattatgtacatctgtttgtagccacaagcctgaatttctcagtgttggtaagtttctttacctaccctcactatatattattctcgttttaaaacccataaaggagtgatttagaacagtcattaattttcaactcaatgaaatatgtgaagcccagcatctctgttgctaacacacagagctcacctgtttgaaaccaagctttcaaacatgttgaagctctttactgtaaaggcaagccagcatgtgtgtccacacatacataggatggctggctctgcacctgtaggatattggaatgcacagggcaattgagggactgagccagaccttcggagagtaatgccaccagatcccctaggaaagaggaggcaaatggcactgcaggtgagaaccccgcccatccgtgctatgacatggaggcactgaagcccgaggaaggtgtgtggagattctaatcccaacaagcaagggtctccttcaagattaatgctatcaatcattaaggtcattactctcaaccacctaggcaatgaagaatataccatttcaaatatttacagtacttgtcttcaccaacactgtcccaaggtgaaatgaagcaacagagaggaaattgtacataagtacctcagcatttaatccaaacaggggttcttagtctcagcactatgacattttgggctgactacttatttgttaggcgggagctctcctgtgcattgtaggataattagcagtatccctggtggctacccaatagacgccagtagcaccccgaattgacaacccaaactctccagacatcaccaactgtcccctgcgaggagaaatcactcctgggggagaaccactgacccaaatgaattctaaaccaatcaaatgtctgggaagccctccaagaaaaaaaatagaaaagcacttgaagaatattcccaatattcccggtcagcagtatcaaggctgacttgtgttcatgtggagtcattataaattctataaatcaattattccccttcggtcttaaaaatatatttcctcataaacatttgagttttgttgaaaagatggagtttacaaagataccattcttgagtcatggatttctctgctcacagaagggtgtggcatttggaaacgggaataaacaaaattgctgcaccaatgcactgagtgaaggaagagagacagaggatcaagggctttagacagcactccttcaatatgcaatcacagagaaagatgcgccttatccaagttaatatctctaaggtgagagccttcttagagtcagtttgttgcaaatttcacctactctgttcttttccatccatccccctgagtcagttggttgaagggagttattttttcaagtggaattcaaacaaagctcaaaccagaactgtaaatagtgattgcaggaattcttttctaaactgctttgccctttcctctcactgccttttatagccaatataaatgtctctttgcacaccttttgttgtggttttatattgtaacaccatttttctttgaaactattgtatttaaagtaaggtttcatattatgtcagcaagtaattaacttatgtttaaaaggtggccatatcatgtaccaaaagttgctgaagtttctcttctagctggtaaagtaggagtttgcatgacttcacactttttttgcgtagtttcttctgttgtatgatggcgtgagtgtgtgtcttgggtaccgctgtgtactactgtgtgcctagattccatgcactctcgttgtgtttgaagtaaatattggagaccggagggtaacaggttggcctgttgattacagctagtaatcgctgtgtcttgttccgccccctccctgacaccccagcttcccaggatgtggaaagcctggatctcagctccttgccccatatcccttctgtaatttgtacctaaagagtgtgattatcctaattcaagagtcactaaaactcatcacattatcattgcatatcagcaaagggtaaagtcctagcaccaattgcttcacataccagcatgttccatttccaatttagaattagccacataataaaatcttagaatcttccttgagaaagagctgcctgagatgtagttttgttatatggttccccaccgaccatttttgtgcttttttcttgttttgttttgttttgactgcactgtgagttttgtagtgtcctcttcttgccaaaacaaacgcgagatgaactggacttatgtagacaaatcgtgatgccagtgtatccttcctttcttcagttccagcaataatgaatggtcaacttttttaaaatctagatctctctcattcatttcaatgtatttttactttaagatgaaccaaaattattagacttatttaagatgtacaggcatcagaaaaaagaagcacataatgcttttggtgcgatggcactcactgtgaacatgtgtaaccacatattaatatgcaatattgtttccaatactttctaatacagttttttataatgttgtgtgtggtgattgttcaggtcgaatctgttgtatccagtacagctttaggtcttcagctgcccttctggcgagtacatgcacaggattgtaaatgagaaatgcagtcatatttccagtctgcctctatgatgatgttaaattattgctgtttagctgtgaacaagggatgtaccactggaggaatagagtatccttttgtacacattttgaaatgcttcttctgtagtgatagaacaaataaatgcaacgaatactctgtctgccctatcccgtgaagtccacactggcgtaagagaaggcccagcagagcaggaatctgcctagactttctcccaatgagatcccaatatgagagggagaagagatgggcctcaggacagctgcaataccacttgggaacacatgtggtgtcttgatgtggccagcgcagcagttcagcacaacgtacctcccatctacaacagtgctggacgtgggaattctaagtcccagtcttgagggtgggtggagatggagggcaacaagagatacatttccagttctccactgcagcatgcttcagtcattctgtgagtggccgggcccagggccctcacaatttcactaccttgtcttttacatagtcataagaattatcctcaacatagccttttgacgctgtaaatcttgagtattcatttacccttttctgatctcctggaaacagctgcctgcctgcattgcacttctcttcccgaggagtggggtaaatttaaaagtcaagttatagtttggatgttagtatagaattttgaaattgggaattaaaaatcaggactggggactgggagaccaaaaatttctgatcccatttctgatggatgtgtcacaccttttctgtcaaaataaaatgtcttggaggttatgactccttggtgaaa

SEQ ID NO: 110082 - DNA, 870 bp, Artificial Sequence
  derived and/or modified sequence
atggatgctgatgagggccaggacatgagccaggtgtctgggaaggagagcccccctgtgtctgacaccccagatgaaggagatgagcccatgcccatccctgaggacctgagcaccaccagcggcggccagcagagcagcaagagtgacagagtggtgggggacaagggcctgagtgacaccccctatgacagcagcgccagctatgagaaggaaaatgagatgatgaagagccacgtgatggaccaggccatcaacaatgccatcaactacctgggcgctgagagcctgcggcccctggtgcagaccccacctgggggcagcgaggtggtgcctgtgatcagccccatgtaccagctgcacaagcccctggccgagggcacccccaggagcaaccacagcgcccaggacagcgctgtggagaacctgctgctgctgagcaaggccaagctggtgcccagcgagcgggaggccagccccagcaacagctgccaggacagcacagacacagagagcaacaatgaggagcagaggagcggcctcatctacctgaccaaccacatcgcccctcatgccagaaatggcctgagcctgaaggaggagcaccgggcctatgacctgctgcgggccgccagcgagaacagccaggatgccctgcgggtggtgtccaccagcggggagcagatgaaggtgtacaagtgtgagcactgccgggtgctcttcctggaccacgtgatgtacaccatccacatgggctgccacggcttccgggacccctttgagtgcaacatgtgtggctaccacagccaggacagatatgagttcagcagccacatcaccagaggagagcaccgcttccacatgtcctag

SEQ ID NO: 110083 - DNA, 870 bp, Artificial Sequence
  derived and/or modified sequence
atggacgccgacgagggccaggacatgagccaggtgagcggcaaggagtcaccccctgtcagtgacacacctgacgagggcgatgaacctatgccaatcccagaagacctgagtactacttctgggggacagcagtccagtaaatctgatagggtggtgggtgataagggactttctgatacaccttacgattcctcggcaagctatgagaaggaaaatgaaatgatgaagtcccacgtgatggaccaggcaattaataatgccataaactatttgggggcagagtcactgcgccccctcgtgcagaccccccctggaggaagcgaggtggtccctgtgatctccccaatgtatcagcttcacaagccactagccgaaggtactccccggagcaatcacagtgcacaggacagtgccgtggagaatcttttgttgctcagtaaagcgaaactggtgccttccgaacgcgaagcgagtccgtccaattcgtgtcaagactccactgatacggagagcaataatgaggagcaacgctctggtctgatctacctgacaaatcatattgctccacatgctagaaacggcttgtcactcaaggaggagcatcgggcctatgacttgctgcgagcggcatccgagaatagtcaggacgctttgagggtagtgagcacgtccggtgaacagatgaaggtgtataagtgcgagcactgtcgggttctcttcttggatcatgtaatgtacaccatccatatgggatgtcacgggttcagggatccattcgaatgcaatatgtgtgggtaccactcccaagatcgatatgagttttcgagtcatataactcgaggcgaacatagattccacatgagctag

SEQ ID NO: 110084 - DNA, 870 bp, Artificial Sequence
  derived and/or modified sequence
atggatgccgacgaagggcaagatatgagccaggtcagtgggaaagagtcccctcctgtatctgacacccccgatgagggtgatgagcctatgcctattcctgaggacctatcaactacctctgggggtcagcagtcttctaagagcgatcgcgtcgtgggggataagggactcagcgatacaccatacgactcctccgcgtcatatgagaaggagaacgagatgatgaagagccatgtcatggaccaggcaatcaataacgctattaactatctgggggcagaatccctgcggcctcttgtacagacacctccgggaggtagcgaagtcgttccagtcatctcacctatgtatcaacttcacaagcctctagccgaggggactccccgatcaaatcactcagctcaggactcagctgtggagaatctcctactgctgtcaaaagcaaagctcgtaccgtctgagagagaagctagtccgagcaattcttgccaagactcaaccgataccgagtcaaacaacgaagaacagaggtctggcttaatttatctcacgaatcacatcgctccccatgcccgaaacggactgagtctcaaggaggagcaccgagcatacgacctcctgcgggcagcgtctgagaactcccaggacgccttgcgcgtcgtgagcacgagtggcgagcaaatgaaggtttataagtgcgaacactgcagggtgctgttcctggaccatgtaatgtatactatccacatgggatgtcacggctttcgggacccattcgagtgtaacatgtgcggctaccactcacaagaccggtatgaattctcgagccatataacgaggggcgagcacaggtttcacatgtcatag

SEQ ID NO: 110085 - DNA, 870 bp, Artificial Sequence
  derived and/or modified sequence
atggacgccgacgagggccaggacatgagccaggtgagcggcaaggagagcccccccgtgagcgacacccccgacgagggcgacgagcccatgcccatccccgaggacctgagcaccaccagcggcggccagcagagcagcaagagcgacagagtggtgggcgacaagggcctgagcgacaccccctacgacagcagcgccagctacgagaaggagaacgagatgatgaagagccacgtgatggaccaggccatcaacaacgccatcaactacctgggcgccgagagcctgagacccctggtgcagaccccccccggcggcagcgaggtggtgcccgtgatcagccccatgtaccagctgcacaagcccctggccgagggcacccccagaagcaaccacagcgcccaggacagcgccgtggagaacctgctgctgctgagcaaggccaagctggtgcccagcgagagagaggccagccccagcaacagctgccaggacagcaccgacaccgagagcaacaacgaggagcagagaagcggcctgatctacctgaccaaccacatcgccccccacgccagaaacggcctgagcctgaaggaggagcacagagcctacgacctgctgagagccgccagcgagaacagccaggacgccctgagagtggtgagcaccagcggcgagcagatgaaggtgtacaagtgcgagcactgcagagtgctgttcctggaccacgtgatgtacaccatccacatgggctgccacggcttcagagaccccttcgagtgcaacatgtgcggctaccacagccaggacagatacgagttcagcagccacatcaccagaggcgagcacagattccacatgagctag

SEQ ID NO: 110086 - protein, 188 aa, Artificial Sequence
  derived and/or modified sequence
MNAGASVLTFPWAVYGLPRARPAVTDLTGPLPPSSPALPSVLINIRTSVQTVVVGHAVEFECLALGDPKPQVTWSKVGGHLRPGIVQSGGVVRIAHVELADAGQYRCTATNAAGTTQSHVLLLVQALPQISMPQEVRVPAGSAAVFPCIASGYPTPDISWSKLDGSLPPDSRLENNMLMLPSVRPQDA

SEQ ID NO: 110087 - protein, 207 aa, Artificial Sequence
  derived and/or modified sequence
GESREGRGYRQVAQRVAERSPVPSLLSHSGCVVHTRLSPVPSVSPPIRIESSSPTVVEGQTLDLNCVVARQPQAIITWYKRGGSLPSRHQTHGSHLRLHQMSVADSGEYVCRANNNIDALEASIVISVSPSAGSPSAPGSSMPIRIESSSSHVAEGETLDLNCVVPGQAHAQVTWHKRGGSLPSHHQTRGSRLRLHHVSPADSGEYV

SEQ ID NO: 110088 - DNA, 543 bp, Artificial Sequence
  derived and/or modified sequence
atgggcatccccatgggcaagagcatgctggtgctgctgaccttcctggccttcgccagctgctgcatcgccgcctacagacccagcgagaccctgtgcggcggcgagctggtggacaccctgcagttcgtgtgcggcgacagaggcttctacttcagcagacccgccagcagagtgagcagaagaagcagaggcatcgtggaggagtgctgcttcagaagctgcgacctggccctgctggagacctactgcgccacccccgccaagagcgagagagacgtgagcaccccccccaccgtgctgcccgacaacttccccagataccccgtgggcaagttcttccagtacgacacctggaagcagagcacccagagactgagaagaggcctgcccgccctgctgagagccagaagaggccacgtgctggccaaggagctggaggccttcagagaggccaagagacacagacccctgatcgccctgcccacccaggaccccgcccacggcggcgccccccccgagatggccagcaacagaaagtag

SEQ ID NO: 110089 - DNA, 552 bp, Artificial Sequence
  derived and/or modified sequence
atgggcatccccatgggcaagagcatgctggtgctgctgaccttcctggccttcgccagctgctgcatcgccgcctacagacccagcgagaccctgtgcggcggcgagctggtggacaccctgcagttcgtgtgcggcgacagaggcttctacttcagactgcccggcagacccgccagcagagtgagcagaagaagcagaggcatcgtggaggagtgctgcttcagaagctgcgacctggccctgctggagacctactgcgccacccccgccaagagcgagagagacgtgagcaccccccccaccgtgctgcccgacaacttccccagataccccgtgggcaagttcttccagtacgacacctggaagcagagcacccagagactgagaagaggcctgcccgccctgctgagagccagaagaggccacgtgctggccaaggagctggaggccttcagagaggccaagagacacagacccctgatcgccctgcccacccaggaccccgcccacggcggcgccccccccgagatggccagcaacagaaagtag

SEQ ID NO: 110090 - DNA, 543 bp, Artificial Sequence
  derived and/or modified sequence
atggggattcccatgggaaaaagcatgcttgtgcttcttacctttttggcctttgcatcttgttgcattgccgcataccggccaagcgaaactctctgtggcggcgagctggttgatactctccagttcgtgtgtggtgacagagggttctattttagtaggccagcctccagggtgtctaggagatccagaggcattgtcgaagagtgttgcttccggtcgtgcgacctcgcgttgctggagacctattgcgccactccagctaagagcgagcgcgacgtgagtactccccctacagttctcccagacaactttccccgctatcctgttggcaaattctttcagtacgacacatggaaacaatctacacagaggctcagaaggggattgcctgcactgctgagagcacggcgtggacacgtattggccaaggagctggaggccttcagggaagctaagcgacaccggccactgatcgccctgcccacccaggacccagcccatggcggagcgcccccagagatggcgtcgaataggaagtag

SEQ ID NO: 110091 - DNA, 543 bp, Artificial Sequence
  derived and/or modified sequence
atggggattccgatgggcaagtccatgctcgtattgcttaccttcctggcatttgcaagctgctgcatagcagcttacagaccctccgaaaccctctgtggtggggagttggtggacactttgcagttcgtgtgtggcgaccgagggttctattttagtcgaccggctagccgggtttccaggcggagcagaggcatcgtggaggagtgctgctttcggtcctgtgatctcgccctgctcgagacatactgtgcgactcctgcaaaatctgaaagagacgttagtacccctcccaccgtactgccagataatttcccccgataccccgtgggaaaattctttcagtatgatacctggaagcaatccacccagcgcctgcgcaggggcctgcctgccctgctacgcgcaagaagagggcacgtactggccaaagagctggaggcattccgtgaggcaaaacggcaccggcccctcatagccctgcccacacaggaccctgcccacggtggcgccccccccgaaatggcctccaataggaagtag

SEQ ID NO: 110092 - DNA, 552 bp, Artificial Sequence
  derived and/or modified sequence
atgggcataccaatgggcaaatctatgcttgtgctgctgacttttctcgcctttgcatcttgctgtatcgcggcgtacaggccctctgagactctctgtggtggcgaattagtcgacacgctgcagtttgtgtgtggcgacagaggattctacttcagattgccagggaggcccgcttcccgggtgtcacggcgcagcagaggcatcgtcgaggagtgctgcttccgctcctgcgacctcgccttgcttgagacttactgcgccactcccgccaagagcgagagggacgtgtccactccaccgacagttttaccagacaattttcctcgctatcccgtcggaaaatttttccagtacgacacctggaagcagagtacccaaaggctccgcagaggtctccccgcccttctccgtgcgcggcggggccacgtcctggctaaagagttggaggcattcagagaggctaagcgccaccgacccctgatcgccctccccacccaggatcctgcacatggaggggcaccgcctgagatggcttctaacaggaaatag

SEQ ID NO: 110093 - DNA, 552 bp, Artificial Sequence
  derived and/or modified sequence
atggggattccaatgggcaagagtatgctggttctgctgaccttcttagctttcgcttcatgctgtatcgccgcgtatcgcccctctgagacactctgtggcggagagctggtagacacactgcagttcgtgtgcggagatagaggcttctatttccggctccctggccggcccgcttctagggtcagtcgacggtcccggggaattgtagaggaatgctgctttcgcagttgcgacctcgcgctgctggagacctattgcgctacaccagccaaatccgagagagacgttagtactccacccacagtgttgccagataacttcccacggtatcctgtcgggaagtttttccagtatgacacctggaagcagagcacccagcgtttgagaaggggtctgccagctctcctgcgtgcccgacgggggcatgtgcttgctaaagagctagaagccttcagggaggccaagcgccacaggcccctaatagccctccccacacaggatccggcgcatggaggagccccccctgaaatggcttcaaacagaaaatag

SEQ ID NO: 110094 - DNA, 543 bp, Artificial Sequence
  derived and/or modified sequence
atgggcattcctatgggaaaatcgatgctggtgctgctgacattccttgcgtttgcttcttgttgtatcgctgcgtaccggccttcggaaactctgtgcggtggtgagctggttgacactttacagttcgtatgcggcgatcgcgggttttattttagcaggccggcctccagggtgtctagacgctccagaggcatagtggaggagtgttgcttccgctcttgcgatctggcactcttggagacctactgtgcaaccccggctaaatcggagagagacgtgagcacaccccctacagtattgcccgacaatttcccaaggtatccagtcggaaaattcttccagtacgacacctggaagcagagcacgcagaggctgagacgcggccttcctgccctactaagagcacgccgcgggcacgtgttagccaaagagttggaagcattcagagaggccaagcggcacagaccactgattgccctgccaacccaggaccccgcacatggtggcgcaccacctgagatggcctccaatcgaaagtag

SEQ ID NO: 110095 - DNA, 552 bp, Artificial Sequence
  derived and/or modified sequence
atgggcatcccgatgggcaaaagcatgctggtgttactgacattcctggcgttcgcaagctgctgtatagcagcgtaccggcctagcgaaacactgtgcggtggagagcttgtagatacattgcagtttgtgtgcggagataggggcttttacttcagattgccggggagaccagcatccagggtatctcgtaggtcacgtgggatcgttgaggaatgctgctttaggagctgtgatcttgcactgctagagacctattgcgccaccccagctaaatccgagcgtgacgtaagcactcccccgacagttttgccagacaatttccctagataccccgttggaaagtttttccagtatgatacatggaagcaatccacccaacgcctgaggagaggattgcccgctctgctcagggcaagacggggccacgtcttagcgaaagaactggaggccttccgcgaggcaaagcggcatagacctctgattgcactgcccacacaagatcctgcccatgggggcgccccccccgagatggcgtctaatcggaagtag

SEQ ID NO: 110096 - DNA, 543 bp, Artificial Sequence
  derived and/or modified sequence
atgggaatcccaatggggaagtctatgctagttctgttgacattcctggcatttgcctcttgctgtatcgccgcctacagaccttccgaaacactctgtgggggagagctggtggacaccctgcagtttgtgtgtggggatcgaggcttttatttctcccgcccggcatctcgggtttcccgtagaagccgcggaatcgttgaggagtgctgttttcgctcctgtgaccttgcacttctggagacctactgtgctactcctgccaagtcagagagggacgttagtaccccacctactgttctgcccgacaactttccacggtacccagtgggaaagttttttcagtacgatacctggaaacagagtacccagcgcttacggcgcggactgcccgctctcctgcgggcacggagggggcacgtgctggccaaggagctggaggcattcagggaggccaaaaggcaccgacccttgatcgcactgcctactcaagacccagcacatggcggagctccaccagagatggcctcaaatagaaagtag

SEQ ID NO: 110097 - DNA, 552 bp, Artificial Sequence
  derived and/or modified sequence
atgggcattcccatggggaaatccatgctagtcctgttgaccttcttagcattcgcttcttgctgtatcgccgcctatcgtccgagcgagaccctgtgtgggggagagctggttgacactcttcagttcgtttgtggggatcgcggtttttatttccgcctgccggggcggcccgcctccagagtgtcgcgcaggtcacgggggatcgtggaggagtgctgcttccgaagctgtgatctcgctcttttagaaacctattgtgcaacccctgcaaagagcgagcgcgacgttagcactcccccaacagtcctccccgacaattttcctagatatcctgtgggcaaattctttcagtatgatacctggaagcagtcgactcagcgcctgcgccgcggcctgcccgccctgttacgtgctaggagagggcacgtgctggcgaaagagttggaagccttcagggaagcaaagcgccacaggcctctcatcgcccttccaactcaggaccctgcccacggaggcgccccacctgaaatggcctccaatcgtaagtag

SEQ ID NO: 110098 - DNA, 543 bp, Artificial Sequence
  derived and/or modified sequence
atggggatccctatgggcaaaagcatgttagtgctgcttaccttcttggcatttgcaagctgctgcatcgcggcgtatcgcccctcagagacgttatgcggaggtgaactggttgatacgcttcagttcgtttgcggagataggggcttctattttagccggcccgcctcccgggtctcacgacgatctagaggcatagtcgaggagtgctgttttcgctcatgtgacctcgcactcctcgaaacgtattgtgccactccagccaagagtgagagggacgtgagcacccctccgaccgttctgccagacaattttccacgatacccagtggggaagttctttcagtacgatacatggaaacaatcaacacagcgtctgagacgcgggctgccagctctcctgagagccaggagagggcatgtgctcgctaaagaactcgaggcatttagagaggctaagaggcatcgtcctcttatcgcactgcccacacaagaccctgcacatgggggggcaccacccgaaatggctagtaatcgcaaatag

SEQ ID NO: 110099 - DNA, 543 bp, Artificial Sequence
  derived and/or modified sequence
atggggatccctatggggaaatctatgttggtgttgctaaccttcctagccttcgccagctgctgcatagctgcctatcgaccgtctgaaacactgtgcgggggcgaactagtggatacccttcagttcgtgtgtggggataggggattttatttttctcgacccgctagtagagtcagccggaggtcacgtggcatagtcgaggaatgttgctttcgttcctgtgacctcgccctgctcgaaacatattgcgccacgccagccaaatccgagcgcgatgtgtctacacctcccacagttcttcctgataatttccctcgataccccgtgggcaaattcttccagtatgacacttggaaacagagcacacagcgcctacggagaggcctcccggccttactgagagcccgcagggggcacgtgctcgctaaagaattggaggcgttccgggaggcgaagcgccatcggcctctgattgcgctgcccacacaggatccagcccatgggggtgcaccaccagaaatggcctctaatagaaagtag

SEQ ID NO: 110100 - DNA, 543 bp, Artificial Sequence
  derived and/or modified sequence
atgggcatccccatgggcaagtccatgctggtgctgctgaccttcctggcctttgccagctgctgcatcgccgcctaccggcccagcgagaccctgtgtggcggggagctggtggacaccctgcagtttgtgtgtggggaccggggcttctacttcagcaggcctgccagccgggtgtccagaagaagccggggcatcgtggaggagtgctgcttccgcagctgtgacctggccctgctggagacctactgtgccaccccagccaagtcagaaagagatgtgtccaccccacccaccgtgctgcctgacaacttcccccgctaccctgtgggcaagttcttccagtatgacacctggaagcagagcacccagaggctgcggcggggcctgcctgccctgctgcgggcccggcggggccacgtgctggccaaggagctggaggccttccgggaggccaagaggcaccggcccctgattgccctgcccacccaggaccctgcccacggcggggcccctcctgagatggccagcaacaggaagtag

SEQ ID NO: 110101 - DNA, 552 bp, Artificial Sequence
  derived and/or modified sequence
atgggcatccccatgggcaagtccatgctggtgctgctgaccttcctggcctttgccagctgctgcatcgccgcctaccggcccagcgagaccctgtgtggcggggagctggtggacaccctgcagtttgtgtgtggggaccggggcttctacttccggctgcccggccggcctgccagccgggtgagccgccgcagccggggcatcgtggaggagtgctgcttccgcagctgtgacctggccctgctggagacctactgtgccaccccagccaagtcagaaagagatgtgtccaccccacccaccgtgctgcctgacaacttcccccgctaccctgtgggcaagttcttccagtatgacacctggaagcagagcacccagaggctgcggcggggcctgcctgccctgctgcgggcccggcggggccacgtgctggccaaggagctggaggccttccgggaggccaagaggcaccggcccctcatcgccctgcccacccaggaccctgcccatggaggagcccctcctgagatggccagcaacaggaagtag

SEQ ID NO: 110102 - DNA, 1023 bp, Artificial Sequence
  derived and/or modified sequence
tccccgggtcttccaacggactgggcgttgctcccggacactgaggactggccccggggtctcgctcaccttcagcagcgtccaccgcctgccacagagcgttcgatcgctcgctgcctgagctcctggtgcgcccgcggacgcagcctccagcttcgcgacaccaatgggaatcccaatggggaagtcgatgctggtgcttctcaccttcttggccttcgcctcgtgctgcattgctgcttaccgccccagtgagaccctgtgcggcggggagctggtggacaccctccagttcgtctgtggggaccgcggcttctacttcagcaggcccgcaagccgtgtgagccgtcgcagccgtggcatcgttgaggagtgctgtttccgcagctgtgacctggccctcctggagacgtactgtgctacccccgccaagtccgagagggacgtgtcgacccctccgaccgtgcttccggacaacttccccagataccccgtgggcaagttcttccaatatgacacctggaagcagtccacccagcgcctgcgcaggggcctgcctgccctcctgcgtgcccgccggggtcacgtgctcgccaaggagctcgaggcgttcagggaggccaaacgtcaccgtcccctgattgctctacccacccaagaccccgcccacgggggcgcccccccagagatggccagcaatcggaagtgagcaaaactgccgcaagtctgcagcccggcgccaccatcctgcagcctcctcctgaccacggacgtttccatcaggttccatcccgaaaatctctcggttccacgtccccctggggcttctcctgacccagtccccgtgccccgcctccccgaaacaggctactctcctcggccccctccatcgggctgaggaagcacagcagcatcttcaaacatgtacaaaatcgattggctttaaacacccttcacataccctccccccaaattatccccaattatccccacacataaaaaatcaaaacattaaactaaccc

SEQ ID NO: 110103 - DNA, 543 bp, Artificial Sequence
  derived and/or modified sequence
atgggcatccccatgggcaagagcatgctggtgctgctgaccttccttgcgttcgcctcttgttgcattgccgcataccggccatctgagacactgtgcggcggtgagctggtggatactcttcagttcgtgtgcggggaccggggcttttatttctcaagaccagcctctagagtctcacggagatctaggggcatcgtggaggaatgttgctttagaagttgcgacctggcgcttctagagacgtattgcgctacccccgcaaagagtgagagggacgtgagtacacctccaaccgtgctgcctgataacttcccaaggtaccccgtggggaaattttttcagtacgacacatggaagcagtctacgcagcgccttcgccggggactgcctgcactgctgcgcgcgaggcgggggcatgtcctcgccaaggagttggaagcatttcgcgaggctaaacggcatcgtcccctaatcgcactgcccacgcaagacccagctcacggtggcgctcctcccgaaatggccagtaaccggaagtag

SEQ ID NO: 110104 - DNA, 543 bp, Artificial Sequence
  derived and/or modified sequence
atgggcatccccatgggcaagagcatgctggtgctgctgaccttcctcgccttcgcaagctgttgcattgcggcttacagacctagtgagaccctctgtggcggagagctcgtcgatactctgcagtttgtgtgtggcgaccgtggcttctacttcagtaggcctgcctctagggtaagccgcaggagtagggggatcgtcgaggaatgctgtttcagaagttgtgatctggcacttctggaaacttactgcgctactcccgccaaatcagaaagggacgtttccacacctccaactgtcttgcccgacaatttccctcggtacccggtaggcaagtttttccaatacgacacttggaagcaatccacccagcggctacgaagggggctgccagcactacttcgcgcgcggaggggccacgtgctggctaaagagttggaggctttccgagaggccaaaagacaccggccactcatcgctctgcccacgcaagatcctgcacatggaggtgccccccccgagatggccagtaaccgcaaatag

SEQ ID NO: 110105 - DNA, 552 bp, Artificial Sequence
  derived and/or modified sequence
atgggcatccccatgggcaagagcatgctggtgctgctgaccttcctggcgtttgcttcatgctgtattgcagcttaccgcccttcggagactctctgcggaggcgagttggtggataccctgcagttcgtgtgcggggacagagggttctactttaggctgccaggccgtccagcctcccgggtgtctcggaggtccagagggatcgtagaggaatgctgtttccggtcatgcgacttagctctcctagaaacttactgtgccaccccggcaaagtccgagcgggacgtgagcactcctccaacagtcttaccagacaattttccacggtacccagtgggtaagtttttccagtatgacacgtggaagcagagcacacaacgtcttcggagaggtctgccggctttattgagggctagacgcggacacgtgctcgccaaggagctcgaggcattcagagaggcaaagcgacaccgaccgctgatcgcactacctactcaggaccctgcacacgggggcgccccccccgaaatggcgtcaaacagaaagtag

SEQ ID NO: 110106 - DNA, 552 bp, Artificial Sequence
  derived and/or modified sequence
atgggcatccccatgggcaagagcatgctggtgctgctgaccttccttgccttcgcctcctgctgtatcgcggcctatagacccagtgaaacactttgtggcggagagttggtggatacactccagtttgtctgtggcgatcgcggattttacttccgactgccaggtagaccggcctcaagagtgagcaggcgctcacgaggaatcgtggaagagtgttgcttcagaagctgtgatctggccctgctcgaaacctactgcgccactccggctaaaagcgagagagatgtgtctacacccccaaccgtgctgcctgacaattttccacgatatccagtgggaaaattttttcagtacgatacatggaagcagtcaacccaaaggctgaggcggggtcttccagcactattacgagcgcggaggggacatgtcctggctaaagagctggaagccttcagggaggctaagagacacaggccattgattgcattacctacccaggaccccgctcacggcggcgctcctccagaaatggctagcaacaggaagtag

SEQ ID NO: 110107 - DNA, 543 bp, Artificial Sequence
  derived and/or modified sequence
atgggcatccccatgggcaagagcatgctggtgctgctgaccttccttgccttcgctagctgctgcattgcagcttaccgcccttcggaaacgttgtgtgggggcgagctcgtcgacacactgcagtttgtttgtggagacagagggttttacttcagcaggccagcatcaagagtctccaggcgcagccgtggaatcgtggaggagtgttgctttcgctcttgcgaccttgcacttttggaaacctactgcgcaacgccagcgaagagcgaaagggatgtttcaacgcccccaacagttcttccagataatttcccgagatacccagtagggaaattctttcaatatgacacctggaaacagagcacccaaaggctgagacgtggactccctgcacttctgagggcccgcagaggccacgttctcgccaaagagcttgaagccttccgggaagccaagaggcatagacccttgatagccctgcccacacaggaccccgcgcatgggggcgccccaccggaaatggcctcaaaccgcaagtag

SEQ ID NO: 110108 - DNA, 552 bp, Artificial Sequence
  derived and/or modified sequence
atgggcatccccatgggcaagagcatgctggtgctgctgaccttcttggcatttgctagctgttgcatagcagcctatcgtcccagcgagaccctctgtggtggagagttggttgacacacttcagtttgtgtgcggcgatcggggcttctatttccgccttcccggcaggcccgcctcccgggtttctcgcaggtctcgcgggatcgttgaagagtgttgtttccgctcgtgcgatttggccctcttggagacttactgcgcaacacccgcaaaatctgagcgagatgtttcaaccccccctacggtgctaccagacaactttcctcgctatccagtcggcaagttctttcagtacgacacttggaagcagtccactcagcggctgcggcgggggttacccgcattactaagagcgagacgaggtcacgtgctggcaaaagaactcgaggcattccgagaggctaagcgccaccggccactgatcgcccttcctactcaggacccggctcacgggggtgccccacccgagatggcttcaaatcggaagtag

SEQ ID NO: 110109 - DNA, 543 bp, Artificial Sequence
  derived and/or modified sequence
atgggcatccccatgggcaagagcatgctggtgctgctgaccttcctcgctttcgcttcctgctgcatcgctgcttaccggccatccgagacgctctgcggtggcgaattagtggacacccttcagtttgtatgcggcgaccgtgggttctacttctctaggcctgccagcagggtctccaggaggtcccgaggaattgttgaagaatgctgtttccgcagttgcgacctggctcttctcgagacatactgtgctacacccgcaaaaagtgaacgggacgttagcacacctcctaccgtcttgcctgacaattttcccagatacccagtgggtaagttctttcagtatgatacttggaaacaaagtacacagaggctgagacggggactccccgccctgctgagagcccgcagaggccacgtattggcgaaggagttagaggccttccgcgaagcaaagcgtcacaggcccctgatcgctctgccaacacaagatccggcccacggcggcgcaccccctgagatggctagtaataggaaatag

SEQ ID NO: 110110 - DNA, 552 bp, Artificial Sequence
  derived and/or modified sequence
atgggcatccccatgggcaagagcatgctggtgctgctgaccttcctggcctttgcgagctgttgcatcgccgcatacagaccgagcgaaaccttgtgcgggggggagctcgtcgataccctgcagttcgtgtgtggagatagaggcttctactttagactccccggccgcccagcttctagggtgtctagaaggtcccggggtattgttgaagagtgctgcttccggtcatgtgaccttgcactgttggagacgtactgcgccaccccagcaaaaagcgagagggacgtgtctacgcctcccactgtactcccagacaatttcccacgttatcctgttggcaagttcttccagtatgatacctggaaacaatctacacagagactccgcagagggcttccagccctgttgagggctcgccgggggcatgtgctggcgaaggagttagaagccttcagagaggccaaacggcaccgccctcttatcgccctgccaacccaagatcccgcacatggcggtgcgcccccggaaatggcctctaataggaaatag

SEQ ID NO: 110111 - DNA, 543 bp, Artificial Sequence
  derived and/or modified sequence
atgggcatccccatgggcaagagcatgctggtgctgctgaccttcctggcctttgcgagctgctgcatagctgcctatagaccatctgagacgctctgtggtggcgagttagtcgacacattgcagttcgtgtgcggtgaccgtgggttctactttagtcgtcctgcgtcccgggtgtcgcgtcgatctagaggtattgtggaagaatgttgcttcaggtcctgcgatcttgcactgttggaaacgtattgtgcaacacctgctaagtctgagcgtgatgtatcaactccccctaccgtgctgcctgacaactttccaagataccccgtaggaaagttcttccagtacgatacctggaaacagtcaacacaacggctacggcgcggcctgcctgctctgttacgagctaggaggggccacgtccttgcgaaggagttggaagcgttcagggaggctaaacgacacaggcccctcattgcactccccacacaagaccctgcccacgggggagcacctcctgaaatggcctctaatcgtaaatag

SEQ ID NO: 110112 - DNA, 543 bp, Artificial Sequence
  derived and/or modified sequence
atgggcatccccatgggcaagagcatgctggtgctgctgaccttcttggcgttcgctagttgttgtatcgccgcatatagacctagcgagacactgtgcggaggcgagttggtcgacaccctccagtttgtctgcggagaccgcggcttctatttctcacggcctgcctcccgggtatccaggcggagtcgaggtattgtggaggaatgctgttttcgaagttgcgatcttgctttgctcgaaacttactgcgccacacccgccaagagcgaaagggacgtgtctaccccgccaaccgtacttcctgataacttcccgcggtatccagtcgggaagttcttccagtatgacacctggaaacagtccacgcagaggctgaggcgcggcctgcctgcactgttacgcgccagaaggggccatgtcttagccaaagagctagaagcatttagggaggctaagcggcaccgaccactgattgcattaccgacccaagaccctgcacatggtggggctccccctgaaatggcatctaaccggaagtag

SEQ ID NO: 110113 - DNA, 543 bp, Artificial Sequence
  derived and/or modified sequence
atggggatcccaatgggcaagagtatgttagtactgctgaccttcctggcttttgcctcctgctgtatagcggcttacagaccaagtgagaccctttgtggcggtgagctcgtggacaccttacagttcgtgtgtggcgaccggggtttttacttctcgaggccagcaagcagagtatctcgacgctccaggggtatcgttgaggagtgctgcttcagatcctgcgatctggctctgctggagacctattgcgccactccagcaaagtccgaacgagacgtgtctacgccacctactgttttgcctgacaactttccacgctacccagttgggaaattttttcaatatgatacatggaagcagtccacacaacgactgcgtcgaggcctgcctgcactgctcagagccaggcggggacacgtgctggcaaaggagctggaagcatttcgcgaggcaaagaggcaccgcccattgattgccctgcccacacaggacccggcacacgggggtgctccgccagaaatggcgagcaaccggaaatag

SEQ ID NO: 110114 - DNA, 543 bp, Artificial Sequence
  derived and/or modified sequence
atgggcattccaatggggaagtccatgctggtcttactcacgttcctggcttttgcctcttgctgcattgcagcttacagacccagtgagaccctatgcggcggtgaactggtcgacaccttgcagtttgtgtgcggggacagaggcttttattttagtaggccagcctctcgggtcagccgccgtagtagaggaatcgtcgaagaatgctgcttcaggagttgcgacctggctttgttggaaacctactgtgctacccccgcaaaaagcgaaagagatgtgagcaccccccctacggttttgcccgataacttccctcgctatccggttggcaagtttttccagtacgacacttggaaacagtccacacagcgtctgcgacggggactgccggctctgctgagggctaggcggggacacgttcttgccaaagagctggaggcattccgggaagccaagcggcacaggccccttattgccctgcctacacaggatccagctcacgggggtgcgccaccagagatggccagcaaccgtaagtag

SEQ ID NO: 110115 - DNA, 552 bp, Artificial Sequence
  derived and/or modified sequence
atgggcattccaatggggaagagtatgcttgtcttactcacctttctggccttcgccagttgctgtattgctgcgtacagaccaagcgaaaccctgtgcggaggggaactagtcgatacgctgcagtttgtatgcggcgatcggggattctacttccggctccccggacgcccagcatcgcgagttagccgcaggagtagggggatcgttgaggaatgttgcttccgctcttgtgacttagcactgctagaaacctactgcgccactcctgccaagtccgaacgggatgtgtccacaccccctacagtactgccagataacttcccacgctaccctgtagggaaattttttcagtacgacacctggaagcagtctacccagcgtctccgaagggggctacctgctctgttaagagcacgacgcggacatgtgctggctaaggagctggaggccttcagggaggcaaagcggcatcgccctctcattgctctcccgacccaggatccagctcacgggggagcccctcccgaaatggctagcaatcgcaagtag

SEQ ID NO: 110116 - DNA, 552 bp, Artificial Sequence
  derived and/or modified sequence
atgggtatccccatggggaaaagtatgctggtgttgctaaccttccttgcattcgcgtcttgctgcatcgccgcataccgccctagcgagactctttgtggtggtgagttggtcgacactctgcaatttgtgtgtggggatagagggttttactttcggctcccgggacggccagcttccagagtttcacggagaagtagaggtatcgtcgaagagtgctgcttccggtcttgtgacctggctttgttagagacgtattgtgccacccccgcaaagagcgagagggacgtcagcacgccaccaacagtgctccctgataattttccgaggtaccccgttggcaaattcttccagtatgatacttggaagcaatcaactcagagactccgccgtggactgccagccctactccgagcacggcgtggtcacgtgctcgccaaggagctggaggcctttagggaggcaaagcgacataggccgctgatcgccctccctacacaggatcccgcacacgggggagcccctcccgaaatggcctcgaatcgaaagtag

SEQ ID NO: 110117 - DNA, 543 bp, Artificial Sequence
  derived and/or modified sequence
atgggcatcccaatgggcaaatccatgctggtgttgcttacatttctagcattcgcttcttgctgtatcgctgcctacaggccgtctgaaactttatgtggcggtgagctggtggacaccctgcagtttgtctgcggggataggggcttctactttagtaggcccgcttcacgcgtgagtagaagaagtcgcggtatcgtcgaggagtgctgctttagaagctgcgacttagccttgctggagacttactgcgctacaccagccaaatctgaaagagacgtctccaccccacctaccgttctccctgacaatttcccacgctatcccgtggggaagtttttccagtatgatacttggaaacagtctacccaaaggttgagacgtggacttcccgcacttctccgcgctcgcaggggccacgttctggcaaaagaacttgaagcatttcgtgaggctaagcggcaccgaccactcattgcccttccgacacaggatccagcccatggcggagctcctccggagatggcgagtaatcgcaagtag

SEQ ID NO: 110118 - DNA, 552 bp, Artificial Sequence
  derived and/or modified sequence
atgggcatccctatgggtaaaagtatgttagtgctgcttacttttctggcgtttgccagctgctgcattgccgcttaccgaccaagcgagacactgtgtggaggggaactcgtcgatacactacaattcgtgtgcggggaccgagggttttactttaggttacctggacgaccagcttcacgagtgtccaggaggtcccggggtatagtcgaggagtgctgttttaggtcttgcgacttggcactcctggagacatattgcgcaacccccgcaaagtcagaacgggatgtgtccacacccccaacagtgttgcctgataacttcccccgatatcccgtcggaaagttcttccagtatgatacgtggaagcagtctacacagcgactgcgcagggggctgcctgcactgctgagggcccgtcgcggtcatgtactcgccaaggaacttgaagccttcagagaggctaaaagacatagacctctgatcgccctgccaactcaggaccccgcacatggcggtgctccccctgagatggcctctaatcgaaagtag

SEQ ID NO: 110119 - DNA, 543 bp, Artificial Sequence
  derived and/or modified sequence
atgggtatccctatgggaaagtcaatgctggtcttgctgactttcctggcctttgcctcttgttgcatcgccgcataccgaccatcggaaacgctctgtgggggagaactggtggatacactgcaatttgtgtgcggggacaggggattttacttttcaagacccgcttcaagagtcagcaggcgcagcaggggcatcgtcgaggaatgttgtttccgttcttgcgacctggcattattggaaacttattgcgcaacaccagctaagtccgaaagagatgtaagcacacccccaacagttctccccgacaactttccgcgttatcccgtaggcaaattttttcaatatgacacttggaagcagtccacacagcgactgcgacggggacttccggctctcttacgggctagacggggtcacgtgcttgccaaagaactggaagctttccgagaggctaagcggcaccgtccacttatcgcactgccaacccaggaccctgctcatggtggagcaccacctgagatggcatccaatagaaaatag

SEQ ID NO: 110120 - DNA, 552 bp, Artificial Sequence
  derived and/or modified sequence
atggggatcccgatgggaaaaagcatgctcgtgttacttacattcctcgcctttgcttcttgttgtatagccgcatacaggcccagtgagacactttgtggcggtgagcttgtggacacattgcagttcgtatgcggggaccgagggttttacttccggttacctgggaggcctgcctctcgcgtgtcccggagatctcggggaattgttgaggaatgttgctttaggtcttgcgatctcgccctcttggaaacctattgcgccacgcccgctaaatcagagagagacgtgagtactcctccaacagtactgcctgacaatttccctaggtatccagtcgggaagtttttccaatacgacacctggaaacaatctactcagagactgagaagaggccttcccgcacttttgagggcgaggcgcggacacgtgctagcaaaagaactagaagccttccgtgaagctaagcgccatagacccttgattgctctccccacacaagatcctgctcatggcggagcccctcctgagatggcttctaaccgaaaatag

SEQ ID NO: 110121 - DNA, 543 bp, Artificial Sequence
  derived and/or modified sequence
atgggcatacctatgggaaagtccatgctggtactcctcacctttctggcatttgcgagctgttgcatcgcggcatatcggccatcggagacattgtgtggcggagagctggtggacacactccagttcgtgtgtggagatcgcggattttatttcagccgtcccgctagccgagtgtcaagaaggagccggggaatcgtggaggagtgttgttttaggtcgtgcgatctggccctgctggaaacatactgtgccacccctgccaagagtgagagggacgtgtctacccctccaacggttttgccagacaatttcccccgatatccagttgggaagtttttccaatatgacacctggaagcaaagtactcaacgcttacgacgaggactgccagccctccttcgggcaagacgcggtcatgtcctcgcgaaagagttggaggcctttagggaggcaaagcgacacagacccttaatagccctgccgacacaggatcccgcacacgggggagcaccccctgaaatggcctctaacagaaagtag

SEQ ID NO: 110122 - DNA, 543 bp, Artificial Sequence
  derived and/or modified sequence
atgggcattcccatgggcaagagtatgctggtactcctgacttttctggctttcgctagttgctgtattgctgcataccgacccagtgagaccctctgtggtggggaactcgtagataccctgcagtttgtgtgtggtgatagaggattttattttagccgacccgcttcccgggtctcgcgtaggtcccgtgggatcgtggaagaatgctgcttccgctcttgtgacctggccctgctcgagacctattgtgcgacaccagcgaaatctgagcgggatgtgagcactccccctacagtgttgcccgataatttccctcgctacccagtcggtaagttctttcagtacgatacctggaaacagtcaacccagcgcctgagacgcggtcttccagccttgttaagggccaggaggggccacgttttagcaaaggagctcgaagctttcagagaggccaaacgccataggcctctgattgctctgccaacccaggatcccgctcacggtggagcgccacctgaaatggcatctaacagaaaatag

SEQ ID NO: 110123 - protein, 361 aa, Artificial Sequence
  derived and/or modified sequence
MRRRSRMLLCFAFLWVLGIAYYMYSGGGSALAGGAGGGAGRKEDWNEIDPIKKKDLHHSNGAEDGALLGKIEKVRVLRNDRREGLMRSRVRGADAAQAKVLTFLDSHCECNEHWLEPLLERVAEDRTRVVSPIIDVINMDNFQYVGASADLKGGFDWNLVFKWDYMTPEQRRSRQGNPVAPIKTPMIAGGLFVMDKFYFEELGKYDMMMDVWGGENLEISFRVWQCGGSLEIIPCSRVGHVFRKQHPYTFPGGSGTVFARNTRRAAEVWMDEYKNFYYAAVPSARNVPYGNIQSRLELRKKLSCKPFKWYLENVYPELRVPDHQDIAFGALQQGTNCLDTLGHFADGVVGVYECHVAGLRQ

SEQ ID NO: 110124 - protein, 533 aa, Artificial Sequence
  derived and/or modified sequence
MADREDWNEIDPIKKKDLHHSNGEEKAQSMETLPPGKVRWPDFNQEAYVGGTMVRSGQDPYARNKFNQVESDKLRMDRAIPDTRHDQCQRKQWRVDLPATSVVITFHNEARSALLRTVVSVLKKSPPHLIKEIILVDDYSNDPEDGALLGKIEKVRVLRNDRREGLMRSRVRGADAAQAKVLTFLDSHCECNEHWLEPLLERVAEDRTRVVSPIIDVINMDNFQYVGASADLKGGFDWNLVFKWDYMTPEQRRSRQGNPVAPIKTPMIAGGLFVMDKFYFEELGKYDMMMDVWGGENLEISFRVWQCGGSLEIIPCSRVGHVFRKQHPYTFPGGSGTVFARNTRRAAEVWMDEYKNFYYAAVPSARNVPYGNIQSRLELRKKLSCKPFKWYLENVYPELRVPDHQDIAFGALQQGTNCLDTLGHFADGVVGVYECHNAGGNQEWALTKEKSVKHMDLCLTVVDRAPGSLIKLQGCRENDSRQKWEQIEGNSKLRHVGSNLCLDSRTAKSGGLSVEVCGPALSQQWKFTLNLQQ

SEQ ID NO: 110125 - DNA, 1602 bp, Artificial Sequence
  derived and/or modified sequence
atggccgacagagaggactggaacgagatcgaccccatcaagaagaaggacctgcaccacagcaacggcgaggagaaggcccagagcatggagaccctgccccccggcaaggtgagatggcccgacttcaaccaggaggcctacgtgggcggcaccatggtgagaagcggccaggacccctacgccagaaacaagttcaaccaggtggagagcgacaagctgagaatggacagagccatccccgacaccagacacgaccagtgccagagaaagcagtggagagtggacctgcccgccaccagcgtggtgatcaccttccacaacgaggccagaagcgccctgctgagaaccgtggtgagcgtgctgaagaagagccccccccacctgatcaaggagatcatcctggtggacgactacagcaacgaccccgaggacggcgccctgctgggcaagatcgagaaggtgagagtgctgagaaacgacagaagagagggcctgatgagaagcagagtgagaggcgccgacgccgcccaggccaaggtgctgaccttcctggacagccactgcgagtgcaacgagcactggctggagcccctgctggagagagtggccgaggacagaaccagagtggtgagccccatcatcgacgtgatcaacatggacaacttccagtacgtgggcgccagcgccgacctgaagggcggcttcgactggaacctggtgttcaagtgggactacatgacccccgagcagagaagaagcagacagggcaaccccgtggcccccatcaagacccccatgatcgccggcggcctgttcgtgatggacaagttctacttcgaggagctgggcaagtacgacatgatgatggacgtgtggggcggcgagaacctggagatcagcttcagagtgtggcagtgcggcggcagcctggagatcatcccctgcagcagagtgggccacgtgttcagaaagcagcacccctacaccttccccggcggcagcggcaccgtgttcgccagaaacaccagaagagccgccgaggtgtggatggacgagtacaagaacttctactacgccgccgtgcccagcgccagaaacgtgccctacggcaacatccagagcagactggagctgagaaagaagctgagctgcaagcccttcaagtggtacctggagaacgtgtaccccgagctgagagtgcccgaccaccaggacatcgccttcggcgccctgcagcagggcaccaactgcctggacaccctgggccacttcgccgacggcgtggtgggcgtgtacgagtgccacaacgccggcggcaaccaggagtgggccctgaccaaggagaagagcgtgaagcacatggacctgtgcctgaccgtggtggacagagcccccggcagcctgatcaagctgcagggctgcagagagaacgacagcagacagaagtgggagcagatcgagggcaacagcaagctgagacacgtgggcagcaacctgtgcctggacagcagaaccgccaagagcggcggcctgagcgtggaggtgtgcggccccgccctgagccagcagtggaagttcaccctgaacctgcagcagtag

SEQ ID NO: 110126 - DNA, 1602 bp, Artificial Sequence
  derived and/or modified sequence
atggccgacagagaggattggaacgaaatcgaccccattaaaaaaaaggatctgcatcacagcaatggcgaagagaaagcccaaagcatggagactctgccacctggaaaggtcaggtggccagactttaatcaagaggcatacgttggtgggactatggttcgatcaggccaggacccttatgcccgaaataagtttaaccaagtcgagtccgataaactgcgtatggaccgcgccattccagacactagacatgatcagtgccagcggaagcagtggagagtagacctgcccgccacgagcgtggttatcaccttccataacgaggcccggagcgcgctcctcaggacggtggtgtcagtgttaaagaaaagccctccgcatttgataaaggagattatccttgttgacgactactctaacgatccagaggacggcgcactgttaggcaaaattgaaaaagtgcgtgtactgaggaatgacaggagggagggtttgatgcggtccagggtgcgaggcgccgatgcagcccaggcaaaagtcttaacctttttggactcccactgtgagtgcaatgaacactggctagaacccttactcgagcgagtggctgaagatcgaacacgggtagtctctcccataatagatgtgattaacatggataacttccagtatgtgggcgcctccgccgatcttaagggggggtttgactggaacctcgtctttaagtgggactatatgactccagagcagcgacggagcaggcagggaaacccagtggcccccatcaagacccctatgatcgcaggcgggctgttcgtgatggacaagttctacttcgaagagctgggaaaatatgacatgatgatggacgtgtggggaggagagaacctggagatcagttttagggtctggcagtgtgggggcagcctagaaatcatcccatgctctagggtcggacacgtctttcgaaagcagcacccttacacatttccagggggcagcggaacagtgttcgcacggaatacacgaagggcagcggaagtctggatggatgaatataaaaacttctattatgcggcagtgccatcagctcgaaatgtaccatacggaaacatccaaagccgtttggaactgaggaagaagctgtcttgtaagccatttaaatggtacctggaaaacgtttacccggagcttagggtcccagaccaccaggacatcgcatttggcgctctccagcaaggaacaaactgcctggacacactgggtcatttcgccgatggcgtggtgggcgtatacgagtgtcacaacgccggaggtaaccaggaatgggccttaactaaggagaagtctgttaaacacatggatctgtgcttaactgttgtggatcgcgcccccggaagcttaatcaagttgcaaggctgcagggagaacgattctaggcagaaatgggaacagattgagggaaacagcaagctgcgccacgtgggatccaatctctgcctagattcccggactgctaagtctggcgggctgagtgtggaagtgtgcggtccagctttgtcccaacagtggaagtttaccctgaatctgcaacagtag

SEQ ID NO: 110127 - DNA, 1602 bp, Artificial Sequence
  derived and/or modified sequence
atggctgaccgggaggactggaatgaaattgaccccatcaagaagaaggacctgcaccacagcaatggagaggagaaggcccagagcatggagaccctgcccccaggcaaggtgcgctggccagacttcaaccaggaggcctacgtgggcggcaccatggtgcgcagcggccaggacccctatgccaggaacaagttcaaccaggtggagagtgacaagctgaggatggaccgggccatcccagacaccaggcatgaccagtgccagaggaagcagtggagggtggacctgcctgccacctctgtggtgatcaccttccacaatgaggcccggagcgccctgctgaggacagtggtgtctgtgctgaagaagagccccccccacctgatcaaggagatcatcctggtggatgactacagcaatgaccctgaagatggagccctgctgggcaagattgagaaggtgcgggtgctgagaaatgaccggcgggagggcctgatgaggagccgggtgagaggagcagatgctgcccaggccaaggtgctgaccttcctggacagccactgtgagtgcaatgagcactggctggagcccctgctggagcgggtggccgaggacaggaccagggtggtgagccccatcattgatgtgatcaacatggacaacttccagtatgtgggcgccagcgctgacctgaagggcggctttgactggaacctggtgttcaagtgggactacatgaccccagagcagaggaggagccggcagggcaaccctgtggcccccatcaagacccccatgattgctgggggcctgtttgtgatggacaagttctactttgaggagctgggcaagtatgacatgatgatggatgtgtggggcggggagaacctggagatctccttccgggtgtggcagtgtggcggcagcctggagatcatcccctgcagccgggtgggccacgtgttcaggaagcagcacccctacaccttccctgggggcagcggcaccgtgtttgccaggaacacccggcgggctgctgaggtgtggatggatgagtacaagaacttctactatgctgctgtgcccagcgccagaaatgtgccctacggcaacatccagagccggctggagctgaggaagaagctgagctgcaagcccttcaagtggtacctggagaatgtgtacccagagctgcgggtgcctgaccaccaggacatcgcctttggagccctgcagcagggcaccaactgcctggacaccctgggccactttgctgatggagtggtgggcgtgtatgagtgccacaatgctgggggcaaccaggagtgggccctgaccaaggagaagtctgtgaagcacatggacctgtgcctgactgtggtggaccgggcccctggcagcctcatcaagctgcagggctgcagagaaaatgacagccggcagaagtgggagcagatcgagggcaacagcaagctgcggcacgtgggcagcaacctgtgcctggacagcaggacagccaagagcggcggcctgtctgtggaggtgtgtggccctgccctgagccagcagtggaagttcaccctgaacctgcagcagtag

SEQ ID NO: 110128 - DNA, 1602 bp, Artificial Sequence
  derived and/or modified sequence
atggccgaccgggaggactggaacgagatcgaccccatcaagaagaaagatctgcatcatagcaatggagaagagaaagcgcagtcaatggagactttgcctcctggaaaagtgcggtggcctgacttcaaccaagaggcttacgtgggcggaaccatggtacgctctggtcaggatccctatgccagaaataagtttaatcaggtggagagtgataagctgagaatggaccgcgccatacccgacacgaggcatgatcagtgccagagaaaacagtggcgtgtcgatctgccggccacaagcgtggtgatcaccttccataacgaagctcggtccgcactgctcagaacagtggtgtcggtcctgaagaagtccccccctcatctcataaaggagatcatcctcgtggacgactattctaacgaccccgaagatggcgcgcttctcggtaaaatcgagaaggttagggtattgcgcaatgaccgccgcgagggactaatgcgctctcgcgtgcgtggcgctgacgctgcccaggccaaggtacttacctttcttgacagtcactgtgaatgcaatgagcactggcttgaacccctcctggaacgtgtggcggaagatcggaccagggtggtgagcccaatcatagacgtgataaacatggacaatttccagtatgtgggcgcctcagcagacctcaaaggcggcttcgactggaatctggtgttcaaatgggattacatgacaccagagcaaagacgtagcagacaagggaatccagtagccccaattaaaacacccatgattgccgggggtctctttgtaatggacaagttctatttcgaggaactaggcaagtacgatatgatgatggatgtgtggggcggcgagaatttagaaatttcatttagggtctggcagtgtggtggcagtctggaaatcattccatgctcacgtgtgggccacgtattccggaagcagcacccttatacatttccaggaggatctgggacagtgttcgcccgcaacacccggcgcgctgcggaggtctggatggatgaatacaaaaacttttattatgcagcggtcccgagcgctcgtaacgtgccatatgggaacatccaaagcaggctcgaattacggaagaaattgagctgcaaacctttcaagtggtatcttgaaaacgtgtaccctgaactgcgcgttcctgaccatcaggatatagccttcggcgcactgcagcaggggaccaattgtctggacacactgggtcatttcgcagacggcgtggttggggtctacgagtgccacaacgctggggggaaccaggagtgggccctcaccaaggagaaaagcgttaagcacatggacctatgcctcacggttgtcgatagagcacccggatctctgataaagctgcaggggtgccgcgagaacgactctagacagaaatgggagcaaatcgaaggcaactccaagttgcgacacgttggctccaatctgtgcctggatagccggacagccaagtctggcgggttgagcgttgaagtttgtgggccggctctgtcccaacagtggaaatttactctcaacctccagcagtag

SEQ ID NO: 110129 - DNA, 1602 bp, Artificial Sequence
  derived and/or modified sequence
atggcggatcgcgaggactggaacgagattgatcctattaagaagaaagacctacatcacagcaacggagaagagaaagcccagtccatggaaacattgcctcctggaaaggttagatggcctgattttaaccaggaggcatacgtgggtgggaccatggtgagatctggacaagacccttacgcccgaaacaagtttaaccaggtcgaaagtgacaagctgaggatggatcgggctatcccggataccagacacgaccagtgccagcggaagcaatggagggttgacctaccagctacatctgtggtcattacattccacaatgaggctcggtccgccctgttgaggacagtggtgtccgtcctgaagaagagcccccctcatcttataaaggagatcattctggtagacgactacagcaacgaccctgaagatggcgctctgctcggaaagatcgagaaggtgcgagtgctgagaaatgacaggcgggaagggttgatgcgatctagagtgagaggagctgacgctgctcaagccaaggtcctgacctttctggattcccattgcgaatgcaatgagcattggcttgaacctctgttagaacgtgtggccgaagatcgcacacgggttgtaagtccaataatcgatgtgattaatatggacaacttccagtatgtcggcgcatctgccgaccttaagggtggctttgattggaatttggttttcaagtgggactacatgacccccgaacagcgcaggagccgccagggcaatccagtggccccaattaagactccgatgattgctggcggactgtttgtcatggacaaattctacttcgaggagcttggtaaatatgacatgatgatggacgtgtggggcggagaaaatctggaaatatcttttagagtctggcaatgcggcggatcgttggagattatcccgtgttctcgcgttggccacgttttccgtaagcagcacccatatacatttccaggtggcagcggcacagttttcgctaggaataccagacgcgctgccgaggtatggatggacgagtataagaatttctactacgccgctgtgccatccgccagaaatgtcccatacggcaatatccagagcaggctcgagttacgcaagaagttatcatgtaaaccgttcaaatggtacctggagaacgtatacccagagttgagggttcccgaccatcaggacatcgctttcggcgcacttcagcagggcaccaactgcctggacactctaggccactttgccgacggcgtggtcggggtttatgagtgccataacgccggaggcaaccaggagtgggcactgacaaaagagaagtcagtgaaacatatggacctctgtttaacagttgttgaccgggcacctggatctctgatcaagctgcaagggtgtagggaaaacgattcacggcagaaatgggagcagatcgaaggcaactctaaattaagacacgtgggttccaatttgtgcctcgatagtcggacggcaaagtccggcggactgtcagtcgaagtctgtggacccgctctttcacagcagtggaagtttactctgaatctgcaacagtag

SEQ ID NO: 110130 - DNA, 2239 bp, Artificial Sequence
  derived and/or modified sequence
aggcacacaaggaactggctaccggaggagctgcggggcgtcttgagaagaagcttaccctaaaggaaggtagcaaccacaggcaggaggggtaggaaatgggaaggggcattgctggggttaggtaagtgtcgtccggggctaggaggattccgctggctcctttccccaggacgaagggaggaaagggctctgatacaagagtgtacacgaacgaaaagcactggctggagatcatctatgtggaatgtggacagggcaaggtgcccgtagcccctatggctgacagagaggactggaatgaaattgaccccattaaaaagaaagaccttcatcacagcaatggagaagagaaagcacaaagcatggagaccctccctccagggaaagtacggtggccagactttaaccaggaagcttatgttggagggacgatggtccgctccgggcaggacccttacgcccgcaacaagttcaaccaggtggagagtgataagcttcgaatggacagagccatccctgacacccggcatgaccagtgtcagcggaagcagtggcgggtggatctgccggccaccagcgtggtgatcacgtttcacaatgaagccaggtcggccctactcaggaccgtggtcagcgtgcttaagaaaagcccgccccatctcataaaagaaatcatcttggtggatgactacagcaatgatcctgaggacggggctctcttggggaaaattgagaaagtgcgagttcttagaaatgatcgacgagaaggcctcatgcgctcacgggttcggggggccgatgctgcccaagccaaggtcctgaccttcctggacagtcactgcgagtgtaatgagcactggctggagcccctcctggaaagggtggcggaggacaggactcgggttgtgtcacccatcatcgatgtcattaatatggacaactttcagtatgtgggggcatctgctgacttgaagggcggttttgattggaacttggtattcaagtgggattacatgacgcctgagcagagaaggtcccggcaggggaacccagtcgcccctataaaaacccccatgattgctggtgggctgtttgtgatggataagttctattttgaagaactggggaagtacgacatgatgatggatgtgtggggaggagagaacctagagatctcgttccgcgtgtggcagtgtggtggcagcctggagatcatcccgtgcagccgtgtgggacacgtgttccggaagcagcacccctacacgttcccgggtggcagtggcactgtctttgcccgaaacacccgccgggcagcagaggtctggatggatgaatacaaaaatttctattatgcagcagtgccttctgctagaaacgttccttatggaaatattcagagcagattggagcttaggaagaaactcagctgcaagcctttcaaatggtaccttgaaaatgtctatccagagttaagggttccagaccatcaggatatagcttttggggccttgcagcagggaactaactgcctcgacactttgggacactttgctgatggtgtggttggagtttatgaatgtcacaatgctgggggaaaccaggaatgggccttgacgaaggagaagtcggtgaagcacatggatttgtgccttactgtggtggaccgggcaccgggctctcttataaagctgcagggctgccgagaaaatgacagcagacagaaatgggaacagatcgagggcaactccaagctgaggcacgtgggcagcaacctgtgcctggacagtcgcacggccaagagcgggggcctaagcgtggaggtgtgtggcccggccctttcgcagcagtggaagttcacgctcaacctgcagcagtaggagggtccgggaggccctgccgtcctgtctcctgcaccattgggtggagtctggtgatcacattattgattatgtttcttaaactttccgcgaaactaatatacctcagtattccatcatggtctgaaagtcaaacttcggcaaggcacggacgactgtgcagacacagcagcggcaagaagcgagaactgccctccccctcctctcggtgcagcccagccgggcccccttccccaggccggagcgcccctcttccttccagctttcacttctgccggctccgcaactgagtgacacccagcgacaaccgactggggagtggtagaagcaactgaacggatgcgtgcgagctgaggaca

SEQ ID NO: 110131 - DNA, 762 bp, Artificial Sequence
  derived and/or modified sequence
gcagactccaagggttttatagcgtccggtagcgacacggagccggctcccccttttccagccttcctccccatctcccattctccatcccccacgacctataccagaggtccttaggcctccacgtctctccttttgccgagtagcccaaggtttccacccatctgccagggggatggcgtccactccgatggggaatgagggggagaagaagagcagctggccatctcaagctgcaccctccttgagaggaggtccggcttcgttatctcgttctgaggaatacctgtcccagatcagtgcagaactcatggaggaggctttgtgcactgcttgctgccacttgaaccctgtgcccatcaaaaaaaagcagtcacaagaccaagcgactcagatatccaaacgcgcattcttcaccaagacctgaggcacagacacctggtgagtgaggcttcaagggagatgctctttgtcctgggagagagccctctcccctctcttccaccatctcctgctcggacagaaaccgtacctgcagcaaggcatacctcctgccaactcctggtgaaaagaacatgcctcaaaactactcttttgccactcgttaaccacttccgtttgtggggacctcctggtcatgagcagcatcatcccgaagccttcaaagtgttctggattcatcacaggaccctccagcctcagccagcaaggataccaccaggaatgaaagtgctttaataaagagacagggtgtgcattgct

SEQ ID NO: 110132 - protein, 542 aa, Artificial Sequence
  derived and/or modified sequence
MFSCPGHYHVDGFLNPGSRKIQIRNIPPHLQWEVLDGLLAQYGTVENVEQVFAFSLVNTDTETAVVNVTYATREEAKIAMEKLSGHQFENYSFKISYIPDEEVSSPSPPQRAQRGDHSSREQGHAPGGTSQARQIDFPLRILVPTQFVGAIIGKEGLTIKNITKQTQSRVDIHRKENSGAAEKPVTIHATPEGTSEACRMILEIMQKEADETKLAEEIPLKILAHNGLVGRLIGKEGRNLKKIEHETGTKITISSLQDLSIYNPERTITVKGTVEACASAEIEIMKKLREAFENDMLAVNQQANLIPGLNLSALGIFSTGLSVLSPPAGPRGAPPAAPYHPFTTHSGYFSSLYPHHQFGPFPHHHSYPEQEIVNLFIPTQAVGAIIGKKGAHIKQLARFAGASIKIAPAEGPDVSERMVIITGPPEAQFKAQGRIFGKLKEENFFNPKEEVKLEAHIRVPSSTAGRVIGKGGKTVNELQNLTSAEVIVPRDQTPDENEEVIVRIIGHFFASQTAQRKIREIVQQVKQQEQKYPQGVASQRSK

SEQ ID NO: 110133 - DNA, 3358 bp, Artificial Sequence
  derived and/or modified sequence
atgttctcatgtcctggacactaccacgttgatggctttctaaatccagggagcaggaaaattcagattcgaaacatccctcctcacctgcagtgggaggtgttggatggacttttggctcaatatgggacagtggagaatgtggaacaagtttttgccttttccctagtcaacacagacacagaaaccgccgttgtcaacgtcacatatgcaacaagagaagaagcaaaaatagccatggagaagctaagcgggcatcagtttgagaactactccttcaagatttcctacatcccggatgaagaggtgagctccccttcgccccctcagcgagcccagcgtggggaccactcttcccgggagcaaggccacgcccctgggggcacttctcaggccagacagattgatttcccgctgcggatcctggtccccacccagtttgttggtgccatcatcggaaaggagggcttgaccataaagaacatcactaagcagacccagtcccgggtagatatccatagaaaagagaactctggagctgcagagaagcctgtcaccatccatgccaccccagaggggacttctgaagcatgccgcatgattcttgaaatcatgcagaaagaggcagatgagaccaaactagccgaagagattcctctgaaaatcttggcacacaatggcttggttggaagactgattggaaaagaaggcagaaatttgaagaaaattgaacatgaaacagggaccaagataacaatctcatctttgcaggatttgagcatatacaacccggaaagaaccatcactgtgaagggcacagttgaggcctgtgccagtgctgagatagagattatgaagaagctgcgtgaggcctttgaaaatgatatgctggctgttaaccaacaagccaatctgatcccagggttgaacctcagcgcacttggcatcttttcaacaggactgtccgtgctatctccaccagcagggccccgcggagctccccccgctgccccctaccaccccttcactacccactccggatacttctccagcctgtacccccatcaccagtttggcccgttcccgcatcatcactcttatccagagcaggagattgtgaatctcttcatcccaacccaggctgtgggcgccatcatcgggaagaagggggcacacatcaaacagctggcgagattcgccggagcctctatcaagattgcccctgcggaaggcccagacgtcagcgaaaggatggtcatcatcaccgggccaccggaagcccagttcaaggcccagggacggatctttgggaaactgaaagaggaaaacttctttaaccccaaagaagaagtgaagctggaagcgcatatcagagtgccctcttccacagctggccgggtgattggcaaaggtggcaagaccgtgaacgaactgcagaacttaaccagtgcagaagtcatcgtgcctcgtgaccaaacgccagatgaaaatgaggaagtgatcgtcagaattatcgggcacttctttgctagccagactgcacagcgcaagatcagggaaattgtacaacaggtgaagcagcaggagcagaaataccctcagggagtcgcctcacagcgcagcaagtgaggctcccacaggcaccagcaaaacaacggatgaatgtagcccttccaacacctgacagaatgagaccaaacgcagccagccagatcgggagcaaaccaaagaccatctgaggaatgagaagtctgcggaggcggccagggactctgccgaggccctgagaaccccaggggccgaggaggggcggggaaggtcagccaggtttgccagaaccaccgagccccgcctcccgccccccagggcttctgcaggcttcagccatccacttcaccatccactcggatctctcctgaactcccacgacgctatcccttttagttgaactaacataggtgaacgtgttcaaagccaagcaaaatgcacaccctttttctgtggcaaatcgtctctgtacatgtgtgtacatattagaaagggaagatgttaagatatgtggcctgtgggttacacagggtgcctgcagcggtaatatattttagaaataatatatcaaataactcaactaactccaatttttaatcaattattaatttttttttctttttaaagagaaagcaggcttttctagactttaaagaataaagtctttgggaggtctcacggtgtagagaggagctttgaggccacccgcacaaaattcacccagagggaaatctcgtcggaaggacactcacggcagttctggatcacctgtgtatgtcaacagaagggataccgtctccttgaagaggaaactctgtcactcctcatgcctgtctagctcatacacccatttctctttgcttcacaggttttaaactggttttttgcatactgctatataattctctgtctctctctgtttatctctcccctccctcccctccccttcttctccatctccattcttttgaatttcctcatccctccatctcaatcccgtatctacgcacccccccccccccaggcaaagcagtgctctgagtatcacatcacacaaaaggaacaaaagcgaaacacacaaaccagcctcaacttacacttggttactcaaaagaacaagagtcaatggtacttgtcctagcgttttggaagaggaaaacaggaacccaccaaaccaaccaatcaaccaaacaaagaaaaaattccacaatgaaagaatgtattttgtctttttgcattttggtgtataagccatcaatattcagcaaaatgattcctttctttaaaaaaaaaaaatgtggaggaaagtagaaatttaccaaggttgttggcccagggcgttaaattcacagatttttttaacgagaaaaacacacagaagaagctacctcaggtgtttttacctcagcaccttgctcttgtgtttcccttagagattttgtaaagctgatagttggagcatttttttatttttttaataaaaatgagttggaaaaaaaataagatatcaactgccagcctggagaaggtgacagtccaagtgtgcaacagctgttctgaattgtcttccgctagccaagaacctatatggccttcttttggacaaaccttgaaaatgtttatttaaaaaaaaaaaagatgacaaagaaaaacagagagagagaatattggagatgtcctgaattttaatagggtacgcgccattagggctttttgcgctaaaggatgaacatgtactggtttatgtggacaagccattataccaccagactgcaatgccagtttcctctactgcaaacagtgttctgtg

SEQ ID NO: 110134 - DNA, 1629 bp, Artificial Sequence
  derived and/or modified sequence
atgtttagttgccccggacactaccacgtggacggcttcctcaacccaggctcacgcaagatccagattcgaaatatccctccacaccttcagtgggaagtgctggatggtctattggcccagtatggtaccgtcgaaaatgttgaacaggtgtttgccttcagtctggtgaacaccgacacagaaactgcggttgtgaatgtgacctacgccacacgcgaagaagcgaagatcgcgatggagaagcttagtgggcatcagtttgaaaattacagttttaagattagctacattccagatgaggaagtgtccagcccctcccccccgcagcgcgcccagagaggagaccactccagcagggagcagggacatgctcctggagggacgtcccaggcccgccagatcgactttccgctgcgaatattggttccaactcagtttgtcggtgctattatcggcaaagaagggctgactattaagaacattacaaagcagacccagtcacgcgtcgatatccaccgtaaagagaatagcggcgctgccgagaagcctgtcacaatccatgctacaccagaaggcacaagtgaggcatgcagaatgatactcgagatcatgcagaaagaagccgacgagacaaagctcgccgaggaaattcccctcaagattctggctcacaacggactcgtgggaaggctgatcggtaaggagggtcggaacctgaaaaagatcgaacacgagacaggcaccaagattacaatcagttccctccaggacttgtcaatctataatcctgagcgaacgatcacagttaagggcactgtggaagcttgtgcctccgccgaaattgagattatgaagaaacttagggaagcatttgaaaacgacatgcttgccgtgaatcagcaggctaacctcatcccgggccttaatcttagtgcgctgggaatcttctcaactggcctgtcagtcttatctcctcctgctggcccgcgcggagctccccccgcggctccctatcatcccttcactacacattccggctacttcagtagcctgtacccccaccaccagttcggccctttccctcatcaccattcataccctgaacaagagattgttaacctgtttataccaacccaggccgtgggggccatcatcggcaaaaaaggagcacacattaagcaattagcaagatttgccggcgcaagtattaagatcgctccagccgaaggtcctgatgtctcagaacgcatggtgataatcactgggccacctgaagcccagttcaaagcacaggggaggattttcgggaaacttaaagaggaaaacttcttcaaccccaaagaggaagtcaaacttgaggcccatattagggtacccagttctactgccgggagggttatagggaaaggcggcaagaccgttaacgagcttcagaacctgacttctgctgaggtgattgtgccccgtgaccagacacctgacgagaatgaggaggttatcgtccggattatcggacattttttcgcgtcccaaaccgctcagcgtaagattagggagattgttcagcaggtgaagcagcaggaacagaagtatccacagggcgtggcgtcacagcggagcaagtag

SEQ ID NO: 110135 - DNA, 1629 bp, Artificial Sequence
  derived and/or modified sequence
atgttcagctgccccggccactaccacgtggatggcttcctgaaccctggcagcaggaagatccagatccggaacatccccccccacctgcagtgggaggtgctggatggcctgctggcccagtatggcaccgtggagaatgtggagcaggtgtttgccttcagcctggtgaacacagacacagaaacagctgtggtgaatgtgacctacgccacccgggaggaggccaagatcgccatggagaagctgagcggccaccagtttgagaactacagcttcaagatctcctacatcccagatgaggaggtgagcagccccagccccccccagagggcccagagaggagaccacagcagccgggagcagggccacgcccctgggggcaccagccaggcccggcagattgacttccccctgcgcatcctggtgcccacccagtttgtgggcgccatcatcggcaaggagggcctgaccatcaagaacatcaccaagcagacccagagccgggtggacatccacaggaaggagaacagcggggctgctgagaagcctgtgaccatccacgccaccccagagggcaccagcgaggcctgcaggatgatcctggagatcatgcagaaggaggctgatgagaccaagctggccgaggagatccccctgaagatcctggcccacaacggcctggtgggccgcctgattggcaaggagggcaggaacctgaagaagattgaacatgaaacaggcaccaagatcaccatcagcagcctgcaggacctgagcatctacaaccctgagaggaccatcaccgtgaagggcaccgtggaggcctgtgccagcgctgagattgagatcatgaagaagctgcgggaggcctttgaaaatgacatgctggccgtgaaccagcaggccaacctgatccctggcctgaacctgagcgccctgggcatcttcagcacaggcctgtctgtgctgagccccccagctggccccaggggggcccccccagctgccccctaccaccccttcaccacccacagcggctacttcagcagcctgtacccccaccaccagtttggccccttcccccaccaccacagctacccagagcaggagatcgtgaacctcttcatccccacccaggccgtgggcgccatcatcggcaagaagggggcccacatcaagcagctggccaggtttgctggggccagcatcaagatcgccccagctgagggcccagatgtgtctgagaggatggtgatcatcaccggccccccagaggcccagttcaaggcccagggccgcatctttgggaagctgaaggaggagaacttcttcaaccccaaggaggaggtgaagctggaggcccacatccgggtgcccagcagcacagctggccgggtcatcggcaagggcggcaagacagtgaatgagctgcagaacctgaccagcgctgaggtgattgtgccccgggaccagaccccagatgaaaatgaggaggtgattgtgcgcatcatcggccacttctttgccagccagacagcccagaggaagatccgggagatcgtgcagcaggtgaagcagcaggagcagaagtacccccagggcgtggccagccagaggagcaagtag

SEQ ID NO: 110136 - DNA, 1629 bp, Artificial Sequence
  derived and/or modified sequence
atgttcagctgccccggccactaccacgtggacggcttcctgaaccccgggtccaggaagatccagatcagaaatattcccccacacctgcaatgggaggtgctggacgggctgctggctcagtatggcactgttgaaaacgttgagcaggtcttcgccttctctcttgtgaacacagatacggagacagccgtcgtgaatgttacctatgccacccgggaagaggctaagatcgccatggagaagctgagcgggcatcaatttgaaaactactccttcaagattagctatatccctgacgaggaagtttcctcaccgagccccccacagcgcgcccagagaggcgaccactcatcacgtgaacagggacatgcaccgggcggcacttctcaagcgcggcaaatagacttcccccttaggatacttgtgccaactcagtttgtgggcgctataatcggcaaagagggactcacaatcaaaaatatcaccaaacagacccagagtcgcgtcgacatccaccggaaggagaattctggggccgcagagaagcccgtgaccattcatgccacacccgagggcactagcgaggcctgcaggatgatcctcgaaatcatgcagaaagaagcagacgaaacaaagctggcggaagaaattcctctgaagatcctggctcataacgggctagtgggaagactaatcggcaaggaaggaaggaacctgaagaagatcgaacatgaaactgggaccaaaattactatctcttcgctgcaggacttgagcatttacaacccggaaaggactataaccgtaaaagggacagttgaggcttgcgccagcgcagagattgagataatgaaaaaactcagggaggcttttgagaacgacatgctggccgtcaatcagcaagccaacttgataccgggacttaacttgagcgctctgggtattttctctacaggcctatctgtactgtccccacccgctggcccacgaggagctccacccgccgccccataccatcccttcacaacacacagcggttatttttccagcctgtaccctcaccaccagtttggccccttccctcatcaccacagttaccccgaacaagaaatcgtgaacctttttatcccaacccaggctgtgggggccatcattggtaagaagggggcacacattaaacaactagctcggtttgccggggcttccataaagatagctccagcggaggggccggacgtgtccgagcgcatggtgattataacgggtcccccggaggctcagtttaaggcccaaggcaggatatttgggaaactgaaggaggagaacttctttaacccgaaagaggaagtcaagctggaggctcacattagggtcccttccagcaccgcagggcgggtcattggaaaaggtggaaaaaccgtcaatgagctgcaaaacttaaccagtgctgaagtaatcgtgcccagagatcagaccccggacgagaatgaagaggttatcgtgcgcatcattgggcacttctttgcctcacagaccgcacagaggaaaattcgggaaattgttcagcaagtgaagcaacaggagcagaagtatccacagggcgtcgcaagccagcgttccaaatag

SEQ ID NO: 110137 - DNA, 1629 bp, Artificial Sequence
  derived and/or modified sequence
atgtttagttgtcctggacactatcatgtggatgggttcctgaatcctggcagtcggaagatccagattcgcaacattcctccccacctgcaatgggaggtgctcgatggcctcctggcccagtacggcacagtggagaatgttgaacaggttttcgcctttagcctggtgaataccgataccgaaacagctgtcgtgaatgtcacctatgctacccgggaggaagctaaaattgccatggagaaactgtcggggcatcagtttgaaaactacagctttaagatctcatatatcccagatgaggaggtgtcgagcccaagccctccacagcgtgctcagagaggcgaccactcatcccgtgaacaggggcatgcccctgggggtacgagccaggcacgccagattgacttccccttgaggatcttggttcccactcaattcgtgggcgcaatcatcggcaaggaggggcttacgatcaaaaacattacaaaacaaacacaatccagagtagacattcaccggaaggaaaatagtggagcagccgagaagcccgttactattcacgccaccccagaaggcacgtctgaggcttgccgtatgatcctcgagattatgcaaaaggaggccgatgagactaagctggccgaggagatccccctgaaaattctggcgcataacggcttggttggtcggctgatcggcaaggaagggagaaacctgaagaaaatcgagcatgaaacaggcactaagattactatttcctctcttcaggatctcagtatttacaatccagaaagaactatcactgtgaaagggaccgtggaggcctgtgcatccgccgagattgagatcatgaaaaaactcagggaggccttcgagaacgacatgcttgctgtcaatcagcaagctaacctcattcctggcctgaatctgagcgcgctggggatattctctacaggcctttctgtcttgagcccacctgcaggcccaagaggcgcacccccagccgcaccctatcaccctttcacaacacattcaggctacttctcatctctgtacccccaccatcagtttggaccgttcccgcaccatcattcttacccagaacaggaaatcgtgaatctcttcattcccacccaggctgtcggagctataattggcaagaagggcgctcacattaagcagctggcacgctttgcgggtgccagtattaagatcgctcctgcagagggaccagacgtctccgaaaggatggtgatcatcaccgggccaccagaggctcagtttaaggctcagggcaggatcttcgggaaactgaaggaagagaacttttttaatcctaaagaggaggtgaagctggaagcacatatcagagttccatcttccaccgccggacgtgtgattggcaagggtggtaagaccgtgaacgaacttcagaatttgactagtgctgaggtgatcgtccccagagaccagacaccagatgagaatgaggaggtgatcgttaggattataggtcatttttttgcctcccaaactgcccaacgtaaaattagggaaatcgtgcagcaggttaagcagcaagagcagaaatacccgcagggtgtggccagccaaaggagcaagtag

SEQ ID NO: 110138 - DNA, 1629 bp, Artificial Sequence
  derived and/or modified sequence
atgttcagctgccccggccactaccacgtggacggcttcctgaaccccggcagcagaaagatccagatcagaaacatccccccccacctgcagtgggaggtgctggacggcctgctggcccagtacggcaccgtggagaacgtggagcaggtgttcgccttcagcctggtgaacaccgacaccgagaccgccgtggtgaacgtgacctacgccaccagagaggaggccaagatcgccatggagaagctgagcggccaccagttcgagaactacagcttcaagatcagctacatccccgacgaggaggtgagcagccccagccccccccagagagcccagagaggcgaccacagcagcagagagcagggccacgcccccggcggcaccagccaggccagacagatcgacttccccctgagaatcctggtgcccacccagttcgtgggcgccatcatcggcaaggagggcctgaccatcaagaacatcaccaagcagacccagagcagagtggacatccacagaaaggagaacagcggcgccgccgagaagcccgtgaccatccacgccacccccgagggcaccagcgaggcctgcagaatgatcctggagatcatgcagaaggaggccgacgagaccaagctggccgaggagatccccctgaagatcctggcccacaacggcctggtgggcagactgatcggcaaggagggcagaaacctgaagaagatcgagcacgagaccggcaccaagatcaccatcagcagcctgcaggacctgagcatctacaaccccgagagaaccatcaccgtgaagggcaccgtggaggcctgcgccagcgccgagatcgagatcatgaagaagctgagagaggccttcgagaacgacatgctggccgtgaaccagcaggccaacctgatccccggcctgaacctgagcgccctgggcatcttcagcaccggcctgagcgtgctgagcccccccgccggccccagaggcgccccccccgccgccccctaccaccccttcaccacccacagcggctacttcagcagcctgtacccccaccaccagttcggccccttcccccaccaccacagctaccccgagcaggagatcgtgaacctgttcatccccacccaggccgtgggcgccatcatcggcaagaagggcgcccacatcaagcagctggccagattcgccggcgccagcatcaagatcgcccccgccgagggccccgacgtgagcgagagaatggtgatcatcaccggcccccccgaggcccagttcaaggcccagggcagaatcttcggcaagctgaaggaggagaacttcttcaaccccaaggaggaggtgaagctggaggcccacatcagagtgcccagcagcaccgccggcagagtgatcggcaagggcggcaagaccgtgaacgagctgcagaacctgaccagcgccgaggtgatcgtgcccagagaccagacccccgacgagaacgaggaggtgatcgtgagaatcatcggccacttcttcgccagccagaccgcccagagaaagatcagagagatcgtgcagcaggtgaagcagcaggagcagaagtacccccagggcgtggccagccagagaagcaagtag

SEQ ID NO: 110139 - DNA, 3813 bp, Artificial Sequence
  derived and/or modified sequence
ggaaagccctttgcacacatcggcctattgaagcactttgcttgattcagctattctcctctcaggacctgcctggatcatcccagcctgtagaatcctgggtttctgtggcagtttgttcttctggtatcacctgctatgctctgaatgtttgtatccctctcagccccgaaattcctgtgttgaaatcctaacccctaaggtgatggtatgaggaggtggggccttcgggaggtgattaggccataagggtggagcctttgtgaatgggattagtgcccttataaaaagaggccccacagcactgccttgcctcttctgccacgtgaagatgcagtgagaaggagctgtctgtgaactaggaaggggtcctcatgagacactgaacctgctggtgccttgatcttggacttcccagcctccagaactttcacctgtggcagatgatatcatccagcccgctgcccccgcagacctggaaagcccaaccttagctgcctcttcctaccacggtgatgttgttggccaggtctctacggatctgatagcccagaggagttccgattctgaagaggcatttgagaccccggagtcaacgacccctgtcaaagctccgccagctccacccccaccaccccccgaagtcatcccagaacccgaggtcagcacacagccacccccggaagaaccaggatgtggttctgagacagtccctgtccctgatggcccacggagcgactcggtggaaggaagtcccttccgtcccccgtcacactccttctctgccgtcttcgatgaagacaagccgatagccagcagtgggacttacaacttggactttgacaacattgagcttgtggatacctttcagaccttggagcctcgtgcctcagacgctaagaatcaggagggcaaagtgaacacacggaggaagtccacggattccgtccccatctctaagtctacactgtcccggtcgctcagcctgcaagccagtgactttgatggtgcttcttcctcaggcaatcccgaggccgtggcccttgccccagatgcatatagcacgggttccagcagtgcttctagtacccttaagcgaactaaaaaaccgaggccgccttccttaaaaaagaaacagaccaccaagaaacccacagagacccccccagtgaaggagacgcaacaggagccagatgaagagagccttgtccccagtggggagaatctagcatctgagacgaaaacggaatctgccaagacggaaggtcctagcccagccttattggaggagacgccccttgagcccgctgtggggcccaaagctgcctgccctctggactcagagagtgcagaaggggttgtccccccggcttctggaggtggcagagtgcagaactcaccccctgtcgggaggaaaacgctgcctcttaccacggccccggaggcaggggaggtaaccccatcggatagcggggggcaagaggactctccagccaaagggctctccgtaaggctggagtttgactattctgaggacaagagtagttgggacaaccagcaggaaaacccccctcctaccaaaaagataggcaaaaagccagttgccaaaatgcccctgaggaggccaaagatgaaaaagacacccgagaaacttgacaacactcctgcctcacctcccagatcccctgctgaacccaatgacatccccattgctaaaggtacttacacctttgatattgacaagtgggatgaccccaattttaaccctttttcttccacctcaaaaatgcaggagtctcccaaactgccccaacaatcatacaactttgacccagacacctgtgatgagtccgttgacccctttaagacatcctctaagacccccagctcaccttctaaatccccagcctcctttgagatcccagccagtgctatggaagccaatggagtggacggggatgggctaaacaagcccgccaagaagaagaagacgcccctaaagacggtgaaaaagtcgccaaaacggtctcctctctctgatccaccttcccaggaccccaccccagctgctacaccagaaacaccaccagtgatctctgcggtggtccacgccacagatgaggaaaagctggcggtcaccaaccagaagtggacgtgcatgacagtggacctagaggctgacaaacaggactacccgcagccctcggacctgtccacctttgtaaacgagaccaaattcagttcacccactgaggagttggattacagaaactcctatgaaattgaatatatggagaaaattggctcctccttacctcaggacgacgatgccccgaagaagcaggccttgtaccttatgtttgacacttctcaggagagccctgtcaagtcatctcccgtccgcatgtcagagtccccgacgccgtgttcagggtcaagttttgaagagactgaagcccttgtgaacactgctgcgaaaaaccagcatcctgtcccacgaggactggcccctaaccaagagtcacacttgcaggtgccagagaaatcctcccagaaggagctggaggccatgggcttgggcaccccttcagaagcgattgaaattagagaggctgctcacccaacagacgtctccatctccaaaacagccttgtactcccgcatcgggaccgctgaggtggagaaacctgcaggccttctgttccagcagcccgacctggactctgccctccagatcgccagagcagagatcataaccaaggagagagaggtctcagaatggaaagataaatatgaagaaagcaggcgggaagtgatggaaatgaggaaaatagtggccgagtatgagaagaccatcgctcagatgatagaggacgaacagagagagaagtcagtctcccaccagacggtgcagcagctggttctggagaaggagcaagccctggccgacctgaactccgtggagaagtctctggccgacctcttcagaagatatgagaagatgaaggaggtcctagaaggcttccgcaagaatgaagaggtgttgaagagatgtgcgcaggagtacctgtcccgggtgaagaaggaggagcagaggtaccaggccctgaaggtgcacgcggaggagaaactggacagggccaatgctgagattgctcaggttcgaggcaaggcccagcaggagcaagccgcccaccaggccagcctgcggaaggagcagctgcgagtggacgccctggaaaggacgctggagcagaagaataaagaaatagaagaactcaccaagatttgtgacgaactgattgccaaaatggggaaaagctaactctgaaccgaatgttttggacttaactgttgcgtgcaatatgaccgtcggcacactgctgttcctccagttccatggacaggttctgttttcactttttcgtatgcactactgtatttcctttctaaataaaattgatttgattgtatgcagtactaaggagactatcagaatttcttgctattggtttgcattttcctagtataattcatagcaagttgacctcagagttcctgtatcagggagattgtctgattctctaataaaagacacattgctgaccttggccttgccctttgtacacaagttcccagggtgagcagcttttggatttaatatgaacatgtacagcgtgcatagggactcttgccttaaggagtgtaaacttgatctgcatttgctgatttgtttttaaaaaaacaagaaatgcatgtttcaaataaaattctctattgtaaataaaattttttctttggatcttggcaata

SEQ ID NO: 110140 - protein, 2875 aa, Artificial Sequence
  derived and/or modified sequence
MGNENSTSDNQRTLSAQTPRSAQPPGNSQNIKRKQQDTPGSPDHRDASSIGSVGLGGFCTASESSASLDPCLVSPEVTEPRKDPQGARGPEGSLLPSPPPSQEREHPSSSMPFAECPPEGCLASPAAAPEDGPQTQSPRREPAPNAPGDIAAAFPAERDSSTPYQEIAAVPSAGRERQPKEEGQKSSFSFSSGIDQSPGMSPVPLREPMKAPLCGEGDQPGGFESQEKEAAGGFPPAESRQGVASVQVTPEAPAAAQQGTESSAVLEKSPLKPMAPIPQDPAPRASDRERGQGEAPPQYLTDDLEFLRACHLPRSNSGAAPEAEVNAASQESCQQPVGAYLPHAELPWGLPSPALVPEAGGSGKEALDTIDVQGHPQTGMRGTKPNQVVCVAAGGQPEGGLPVSPEPSLLTPTEEAHPASSLASFPAAQIPIAVEEPGSSSRESVSKAGMPVSADAAKEVVDAGLVGLERQVSDLGSKGEHPEGDPGEVPAPSPQERGEHLNTEQSHEVQPGVPPPPLPKEQSHEVQPGAPPPPLPKAPSESARGPPGPTDGAKVHEDSTSPAVAKEGSRSPGDSPGGKEEAPEPPDGGDPGNLQGEDSQAFSSKRDPEVGKDELSKPSSDAESRDHPSSHSAQPPRKGGAGHTDGPHSQTAEADASGLPHKLGEEDPVLPPVPDGAGEPTVPEGAIWEGSGLQPKCPDTLQSREGLGRMESFLTLESEKSDFPPTPVAEVAPKAQEGESTLEIRKMGSCDGEGLLTSPDQPRGPACDASRQEFHAGVPHPPQGENLAADLGLTALILDQDQQGIPSCPGEGWIRGAASEWPLLSSEKHLQPSQAQPETSIFDVLKEQAQPPENGKETSPSHPGFKDQGADSSQIHVPVEPQEDNNLPTHGGQEQALGSELQSQLPKGTLSDTPTSSPTDMVWESSLTEESELSAPTRQKLPALGEKRPEGACGDGQSSRVSPPAADVLKDFSLAGNFSRKETCCTGQGPNKSQQALADALEEGSQHEEACQRHPGASEAADGCSPLWGLSKREMASGNTGEAPPCQPDSVALLDAVPCLPALAPASPGVTPTQDAPETEACDETQEGRQQPVPAPQQKMECWATSDAESPKLLASFPSAGEQGGEAGAAETGGSAGAGDPGKQQAPEKPGEATLSCGLLQTEHCLTSGEEASTSALRESCQAEHPMASCQDALLPARELGGIPRSTMDFSTHQAVPDPKELLLSGPPEVAAPDTPYLHVDSAAQRGAEDSGVKAVSSADPRAPGESPCPVGEPPLALENAASLKLFAGSLAPLLQPGAAGGEIPAVQASSGSPKARTTEGPVDSMPCLDRMPLLAKGKQATGEEKAATAPGAGAKASGEGMAGDAAGETEGSMERMGEPSQDPKQGTSGGVDTSSEQIATLTGFPDFREHIAKIFEKPVLGALATPGEKAGAGRSAVGKDLTRPLGPEKLLDGPPGVDVTLLPAPPARLQVEKKQQLAGEAEISHLALQDPASDKLLGPAGLTWERNLPGAGVGKEMAGVPPTLREDERPEGPGAAWPGLEGQAYSQLERSRQELASGLPSPAATQELPVERAAAFQVAPHSHGEEAVAQDRIPSGKQHQETSACDSPHGEDGPGDFAHTGVPGHVPRSTCAPSPQREVLTVPEANSEPWTLDTLGGERRPGVTAGILEMRNALGNQSTPAPPTGEVADTPLEPGKVAGAAGEAEGDITLSTAETQACASGDLPEAGTTRTFSVVAGDLVLPGSCQDPACSDKAPGMEGTAALHGDSPARPQQAKEQPGPERPIPAGDGKVCVSSPPEPDETHDPKLQHLAPEELHTDRESPRPGPSMLPSVPKKDAPRVMDKVTSDETRGAEGTERSAKDIGLWKAMMPSLDTDTLDVLERRVVLIQHEFLHKKEANGHSRFMYSSPVADDIIQPAAPADLESPTLAASSYHGDVVGQVSTDLIAQRSSDSEEAFETPESTTPVKAPPAPPPPPPEVIPEPEVSTQPPPEEPGCGSETVPVPDGPRSDSVEGSPFRPPSHSFSAVFDEDKPIASSGTYNLDFDNIELVDTFQTLEPRASDAKNQEGKVNTRRKSTDSVPISKSTLSRSLSLQASDFDGASSSGNPEAVALAPDAYSTGSSSASSTLKRTKKPRPPSLKKKQTTKKPTETPPVKETQQEPDEESLVPSGENLASETKTESAKTEGPSPALLEETPLEPAVGPKAACPLDSESAEGVVPPASGGGRVQNSPPVGRKTLPLTTAPEAGEVTPSDSGGQEDSPAKGLSVRLEFDYSEDKSSWDNQQENPPPTKKIGKKPVAKMPLRRPKMKKTPEKLDNTPASPPRSPAEPNDIPIAKGTYTFDIDKWDDPNFNPFSSTSKMQESPKLPQQSYNFDPDTCDESVDPFKTSSKTPSSPSKSPASFEIPASAMEANGVDGDGLNKPAKKKKTPLKTDTFRVKKSPKRSPLSDPPSQDPTPAATPETPPVISAVVHATDEEKLAVTNQKWTCMTVDLEADKQDYPQPSDLSTFVNETKFSSPTEELDYRNSYEIEYMEKIGSSLPQDDDAPKKQALYLMFDTSQESPVKSSPVRMSESPTPCSGSSFEETEALVNTAAKNQHPVPRGLAPNQESHLQVPEKSSQKELEAMGLGTPSEAIEIREAAHPTDVSISKTALYSRIGTAEVEKPAGLLFQQPDLDSALQIARAEIITKEREVSEWKDKYEESRREVMEMRKIVAEYEKTIAQMIEDEQREKSVSHQTVQQLVLEKEQALADLNSVEKSLADLFRRYEKMKEVLEGFRKNEEVLKRCAQEYLSRVKKEEQRYQALKVHAEEKLDRANAEIAQVRGKAQQEQAAHQASLRKEQLRVDALERTLEQKNKEIEELTKICDELIAKMGKS

SEQ ID NO: 110141 - DNA, 8628 bp, Artificial Sequence
  derived and/or modified sequence
atgggcaacgagaacagcaccagcgacaaccagagaaccctgagcgcccagacccccagaagcgcccagccccccggcaacagccagaacatcaagagaaagcagcaggacacccccggcagccccgaccacagagacgccagcagcatcggcagcgtgggcctgggcggcttctgcaccgccagcgagagcagcgccagcctggacccctgcctggtgagccccgaggtgaccgagcccagaaaggacccccagggcgccagaggccccgagggcagcctgctgcccagccccccccccagccaggagagagagcaccccagcagcagcatgcccttcgccgagtgcccccccgagggctgcctggccagccccgccgccgcccccgaggacggcccccagacccagagccccagaagagagcccgcccccaacgcccccggcgacatcgccgccgccttccccgccgagagagacagcagcaccccctaccaggagatcgccgccgtgcccagcgccggcagagagagacagcccaaggaggagggccagaagagcagcttcagcttcagcagcggcatcgaccagagccccggcatgagccccgtgcccctgagagagcccatgaaggcccccctgtgcggcgagggcgaccagcccggcggcttcgagagccaggagaaggaggccgccggcggcttcccccccgccgagagcagacagggcgtggccagcgtgcaggtgacccccgaggcccccgccgccgcccagcagggcaccgagagcagcgccgtgctggagaagagccccctgaagcccatggcccccatcccccaggaccccgcccccagagccagcgacagagagagaggccagggcgaggcccccccccagtacctgaccgacgacctggagttcctgagagcctgccacctgcccagaagcaacagcggcgccgcccccgaggccgaggtgaacgccgccagccaggagagctgccagcagcccgtgggcgcctacctgccccacgccgagctgccctggggcctgcccagccccgccctggtgcccgaggccggcggcagcggcaaggaggccctggacaccatcgacgtgcagggccacccccagaccggcatgagaggcaccaagcccaaccaggtggtgtgcgtggccgccggcggccagcccgagggcggcctgcccgtgagccccgagcccagcctgctgacccccaccgaggaggcccaccccgccagcagcctggccagcttccccgccgcccagatccccatcgccgtggaggagcccggcagcagcagcagagagagcgtgagcaaggccggcatgcccgtgagcgccgacgccgccaaggaggtggtggacgccggcctggtgggcctggagagacaggtgagcgacctgggcagcaagggcgagcaccccgagggcgaccccggcgaggtgcccgcccccagcccccaggagagaggcgagcacctgaacaccgagcagagccacgaggtgcagcccggcgtgccccccccccccctgcccaaggagcagagccacgaggtgcagcccggcgccccccccccccccctgcccaaggcccccagcgagagcgccagaggcccccccggccccaccgacggcgccaaggtgcacgaggacagcaccagccccgccgtggccaaggagggcagcagaagccccggcgacagccccggcggcaaggaggaggcccccgagccccccgacggcggcgaccccggcaacctgcagggcgaggacagccaggccttcagcagcaagagagaccccgaggtgggcaaggacgagctgagcaagcccagcagcgacgccgagagcagagaccaccccagcagccacagcgcccagccccccagaaagggcggcgccggccacaccgacggcccccacagccagaccgccgaggccgacgccagcggcctgccccacaagctgggcgaggaggaccccgtgctgccccccgtgcccgacggcgccggcgagcccaccgtgcccgagggcgccatctgggagggcagcggcctgcagcccaagtgccccgacaccctgcagagcagagagggcctgggcagaatggagagcttcctgaccctggagagcgagaagagcgacttcccccccacccccgtggccgaggtggcccccaaggcccaggagggcgagagcaccctggagatcagaaagatgggcagctgcgacggcgagggcctgctgaccagccccgaccagcccagaggccccgcctgcgacgccagcagacaggagttccacgccggcgtgccccaccccccccagggcgagaacctggccgccgacctgggcctgaccgccctgatcctggaccaggaccagcagggcatccccagctgccccggcgagggctggatcagaggcgccgccagcgagtggcccctgctgagcagcgagaagcacctgcagcccagccaggcccagcccgagaccagcatcttcgacgtgctgaaggagcaggcccagccccccgagaacggcaaggagaccagccccagccaccccggcttcaaggaccagggcgccgacagcagccagatccacgtgcccgtggagccccaggaggacaacaacctgcccacccacggcggccaggagcaggccctgggcagcgagctgcagagccagctgcccaagggcaccctgagcgacacccccaccagcagccccaccgacatggtgtgggagagcagcctgaccgaggagagcgagctgagcgcccccaccagacagaagctgcccgccctgggcgagaagagacccgagggcgcctgcggcgacggccagagcagcagagtgagcccccccgccgccgacgtgctgaaggacttcagcctggccggcaacttcagcagaaaggagacctgctgcaccggccagggccccaacaagagccagcaggccctggccgacgccctggaggagggcagccagcacgaggaggcctgccagagacaccccggcgccagcgaggccgccgacggctgcagccccctgtggggcctgagcaagagagagatggccagcggcaacaccggcgaggcccccccctgccagcccgacagcgtggccctgctggacgccgtgccctgcctgcccgccctggcccccgccagccccggcgtgacccccacccaggacgcccccgagaccgaggcctgcgacgagacccaggagggcagacagcagcccgtgcccgccccccagcagaagatggagtgctgggccaccagcgacgccgagagccccaagctgctggccagcttccccagcgccggcgagcagggcggcgaggccggcgccgccgagaccggcggcagcgccggcgccggcgaccccggcaagcagcaggcccccgagaagcccggcgaggccaccctgagctgcggcctgctgcagaccgagcactgcctgaccagcggcgaggaggccagcaccagcgccctgagagagagctgccaggccgagcaccccatggccagctgccaggacgccctgctgcccgccagagagctgggcggcatccccagaagcaccatggacttcagcacccaccaggccgtgcccgaccccaaggagctgctgctgagcggcccccccgaggtggccgcccccgacaccccctacctgcacgtggacagcgccgcccagagaggcgccgaggacagcggcgtgaaggccgtgagcagcgccgaccccagagcccccggcgagagcccctgccccgtgggcgagccccccctggccctggagaacgccgccagcctgaagctgttcgccggcagcctggcccccctgctgcagcccggcgccgccggcggcgagatccccgccgtgcaggccagcagcggcagccccaaggccagaaccaccgagggccccgtggacagcatgccctgcctggacagaatgcccctgctggccaagggcaagcaggccaccggcgaggagaaggccgccaccgcccccggcgccggcgccaaggccagcggcgagggcatggccggcgacgccgccggcgagaccgagggcagcatggagagaatgggcgagcccagccaggaccccaagcagggcaccagcggcggcgtggacaccagcagcgagcagatcgccaccctgaccggcttccccgacttcagagagcacatcgccaagatcttcgagaagcccgtgctgggcgccctggccacccccggcgagaaggccggcgccggcagaagcgccgtgggcaaggacctgaccagacccctgggccccgagaagctgctggacggcccccccggcgtggacgtgaccctgctgcccgccccccccgccagactgcaggtggagaagaagcagcagctggccggcgaggccgagatcagccacctggccctgcaggaccccgccagcgacaagctgctgggccccgccggcctgacctgggagagaaacctgcccggcgccggcgtgggcaaggagatggccggcgtgccccccaccctgagagaggacgagagacccgagggccccggcgccgcctggcccggcctggagggccaggcctacagccagctggagagaagcagacaggagctggccagcggcctgcccagccccgccgccacccaggagctgcccgtggagagagccgccgccttccaggtggccccccacagccacggcgaggaggccgtggcccaggacagaatccccagcggcaagcagcaccaggagaccagcgcctgcgacagcccccacggcgaggacggccccggcgacttcgcccacaccggcgtgcccggccacgtgcccagaagcacctgcgcccccagcccccagagagaggtgctgaccgtgcccgaggccaacagcgagccctggaccctggacaccctgggcggcgagagaagacccggcgtgaccgccggcatcctggagatgagaaacgccctgggcaaccagagcacccccgccccccccaccggcgaggtggccgacacccccctggagcccggcaaggtggccggcgccgccggcgaggccgagggcgacatcaccctgagcaccgccgagacccaggcctgcgccagcggcgacctgcccgaggccggcaccaccagaaccttcagcgtggtggccggcgacctggtgctgcccggcagctgccaggaccccgcctgcagcgacaaggcccccggcatggagggcaccgccgccctgcacggcgacagccccgccagaccccagcaggccaaggagcagcccggccccgagagacccatccccgccggcgacggcaaggtgtgcgtgagcagcccccccgagcccgacgagacccacgaccccaagctgcagcacctggcccccgaggagctgcacaccgacagagagagccccagacccggccccagcatgctgcccagcgtgcccaagaaggacgcccccagagtgatggacaaggtgaccagcgacgagaccagaggcgccgagggcaccgagagaagcgccaaggacatcggcctgtggaaggccatgatgcccagcctggacaccgacaccctggacgtgctggagagaagagtggtgctgatccagcacgagttcctgcacaagaaggaggccaacggccacagcagattcatgtacagcagccccgtggccgacgacatcatccagcccgccgcccccgccgacctggagagccccaccctggccgccagcagctaccacggcgacgtggtgggccaggtgagcaccgacctgatcgcccagagaagcagcgacagcgaggaggccttcgagacccccgagagcaccacccccgtgaaggccccccccgccccccccccccccccccccgaggtgatccccgagcccgaggtgagcacccagcccccccccgaggagcccggctgcggcagcgagaccgtgcccgtgcccgacggccccagaagcgacagcgtggagggcagccccttcagaccccccagccacagcttcagcgccgtgttcgacgaggacaagcccatcgccagcagcggcacctacaacctggacttcgacaacatcgagctggtggacaccttccagaccctggagcccagagccagcgacgccaagaaccaggagggcaaggtgaacaccagaagaaagagcaccgacagcgtgcccatcagcaagagcaccctgagcagaagcctgagcctgcaggccagcgacttcgacggcgccagcagcagcggcaaccccgaggccgtggccctggcccccgacgcctacagcaccggcagcagcagcgccagcagcaccctgaagagaaccaagaagcccagaccccccagcctgaagaagaagcagaccaccaagaagcccaccgagaccccccccgtgaaggagacccagcaggagcccgacgaggagagcctggtgcccagcggcgagaacctggccagcgagaccaagaccgagagcgccaagaccgagggccccagccccgccctgctggaggagacccccctggagcccgccgtgggccccaaggccgcctgccccctggacagcgagagcgccgagggcgtggtgccccccgccagcggcggcggcagagtgcagaacagcccccccgtgggcagaaagaccctgcccctgaccaccgcccccgaggccggcgaggtgacccccagcgacagcggcggccaggaggacagccccgccaagggcctgagcgtgagactggagttcgactacagcgaggacaagagcagctgggacaaccagcaggagaaccccccccccaccaagaagatcggcaagaagcccgtggccaagatgcccctgagaagacccaagatgaagaagacccccgagaagctggacaacacccccgccagcccccccagaagccccgccgagcccaacgacatccccatcgccaagggcacctacaccttcgacatcgacaagtgggacgaccccaacttcaaccccttcagcagcaccagcaagatgcaggagagccccaagctgccccagcagagctacaacttcgaccccgacacctgcgacgagagcgtggaccccttcaagaccagcagcaagacccccagcagccccagcaagagccccgccagcttcgagatccccgccagcgccatggaggccaacggcgtggacggcgacggcctgaacaagcccgccaagaagaagaagacccccctgaagaccgacaccttcagagtgaagaagagccccaagagaagccccctgagcgacccccccagccaggaccccacccccgccgccacccccgagaccccccccgtgatcagcgccgtggtgcacgccaccgacgaggagaagctggccgtgaccaaccagaagtggacctgcatgaccgtggacctggaggccgacaagcaggactacccccagcccagcgacctgagcaccttcgtgaacgagaccaagttcagcagccccaccgaggagctggactacagaaacagctacgagatcgagtacatggagaagatcggcagcagcctgccccaggacgacgacgcccccaagaagcaggccctgtacctgatgttcgacaccagccaggagagccccgtgaagagcagccccgtgagaatgagcgagagccccaccccctgcagcggcagcagcttcgaggagaccgaggccctggtgaacaccgccgccaagaaccagcaccccgtgcccagaggcctggcccccaaccaggagagccacctgcaggtgcccgagaagagcagccagaaggagctggaggccatgggcctgggcacccccagcgaggccatcgagatcagagaggccgcccaccccaccgacgtgagcatcagcaagaccgccctgtacagcagaatcggcaccgccgaggtggagaagcccgccggcctgctgttccagcagcccgacctggacagcgccctgcagatcgccagagccgagatcatcaccaaggagagagaggtgagcgagtggaaggacaagtacgaggagagcagaagagaggtgatggagatgagaaagatcgtggccgagtacgagaagaccatcgcccagatgatcgaggacgagcagagagagaagagcgtgagccaccagaccgtgcagcagctggtgctggagaaggagcaggccctggccgacctgaacagcgtggagaagagcctggccgacctgttcagaagatacgagaagatgaaggaggtgctggagggcttcagaaagaacgaggaggtgctgaagagatgcgcccaggagtacctgagcagagtgaagaaggaggagcagagataccaggccctgaaggtgcacgccgaggagaagctggacagagccaacgccgagatcgcccaggtgagaggcaaggcccagcaggagcaggccgcccaccaggccagcctgagaaaggagcagctgagagtggacgccctggagagaaccctggagcagaagaacaaggagatcgaggagctgaccaagatctgcgacgagctgatcgccaagatgggcaagagctag

SEQ ID NO: 110142 - DNA, 8628 bp, Artificial Sequence
  derived and/or modified sequence
atggggaacgagaattcaaccagtgacaatcagcgcaccctgagtgcgcaaactccaaggtctgcccagccccccggcaattcacagaacattaaacgcaaacagcaagacactccgggaagccccgaccaccgggatgcctcttccattggctcagtggggctgggtggcttctgtacagcctctgagagctctgcttcattggacccttgcctggtgtctcctgaggtcaccgaacctcgcaaggaccctcagggcgcaagaggcccagagggtagtttactgcccagcccccccccgtcccaagaaagagagcatcctagcagctcaatgccattcgcagaatgtcctcccgagggttgtctcgccagtcccgccgccgctcccgaggatgggccacagacccagtcaccccgtcgcgagcccgcaccaaatgcaccaggggacatcgccgcagctttccctgcggaaagggactcaagcacgccatatcaggagattgccgctgtaccgagtgccggacgcgaaaggcagccaaaagaggagggccagaaatctagcttttctttctcatctggcatagatcagtcccctgggatgtcacctgtccctctaagggagccaatgaaggcacctctatgtggagagggggaccagcctggcggctttgagagtcaggagaaggaagccgccggcggcttcccaccagccgagagccggcaaggcgtagccagcgtgcaggtgacacctgaagcacccgctgctgctcagcagggaactgaatcatctgccgtgctagagaagtcacctctcaagcccatggcacccatcccacaagaccctgcccctagggcttcagacagggaacgcggacagggcgaagctcctcctcagtatctgacagacgaccttgagttccttcgagcatgtcatctacccaggtccaatagcggtgccgcccccgaggctgaagttaacgccgcatcgcaagaatcttgtcaacagccggtgggggcttacctcccccatgccgagttgccctggggcctgccctcccccgccctggtgcctgaggcaggagggagcggcaaggaggcactggacactatcgatgtgcagggacacccacagactggaatgcgtggcactaagcctaaccaggtcgtttgtgtggccgctggcggccagcctgagggcgggcttccagtttcaccagagcccagtctgttaacccccactgaggaggcgcaccctgcctcttctttggccagttttcctgcagctcagatacccatcgccgtggaggaacccgggtcgtcgagccgcgaatctgtaagcaaggccgggatgcctgtgtcggccgacgccgccaaggaggtcgtagatgccggcttagtaggcctagagaggcaagtgagtgacctgggctccaagggcgaacatccagagggggacccgggtgaagtccctgccccatcaccacaagaacggggtgaacacctgaacacagagcagtctcacgaggtccaacccggcgttccccctcctccactgcctaaagagcagtcacacgaggtgcagccgggcgcccccccacccccactgccaaaggctccgagcgagtcagctcggggccctccaggtcctacggacggagccaaagttcatgaggattccacaagccctgcagtagcaaaagagggttcaaggtcaccgggcgattctccaggcggtaaggaagaggcccccgaaccccctgatggtggggaccctgggaatctccagggcgaagacagccaggcattctcgagtaagcgggacccagaagtgggaaaggatgagctgtcaaagccatcttcagacgctgaatcaagggaccaccctagcagtcacagcgcccagccaccaaggaaggggggcgctggccatactgacgggccacacagtcagacagccgaagccgatgcctcgggtctgccgcacaagctgggcgaggaagatccagtgttaccacccgtccccgatggcgccggtgagccaaccgtgcctgagggagccatctgggaagggagcggactacaacctaaatgcccagacacactgcaaagccgcgagggactagggagaatggagtctttccttacattggaaagcgagaagagcgacttccctcccacaccagtggccgaagtggccccaaaggcccaggaaggcgaatcaacactggagatacgaaagatggggtcgtgtgatggggaggggctactcacatcccctgatcagccacggggacctgcctgcgacgcgtccagacaagaattccacgccggggtacctcaccctcctcagggagaaaacttggctgccgacctaggactgacagctctaattctggatcaggaccagcagggtatcccaagttgtcccggtgagggctggatcaggggcgcagccagcgagtggccacttctcagctctgaaaagcatctccagccatcccaggcccaacccgaaacttccatatttgacgtcttgaaggaacaagcccagcctcctgagaacgggaaggaaacatcacctagccatcccggcttcaaggaccaaggcgccgacagctctcagatccatgtccctgtggaaccacaagaggataacaacctgcctacccacggcggccaagaacaggcacttgggtccgaactccaaagccagctgcccaagggaaccttatcagacacacctaccagctccccaacagatatggtctgggagtcctccttgactgaagagagtgagctgagtgcccccaccaggcagaagctccccgccctgggcgaaaaacggccagagggtgcttgcggagatggccagtccagtcgggtgtcccctcctgccgcagatgttcttaaagactttagcctggccgggaactttagcaggaaggaaacgtgttgtaccggccaggggcccaacaagagtcaacaagcactcgccgatgccctcgaagaggggtcgcagcacgaggaagcctgtcagaggcaccctggagctagcgaggctgccgacggttgctctccactgtgggggctttcaaaaagagagatggccagcggaaataccggggaggcacctccctgtcagcctgactcagtggcactgcttgacgccgttccctgcctcccggcactggcccctgctagtccaggcgtcactcctactcaggacgccccagagacagaagcgtgtgatgagacccaggagggacggcagcaacccgtgcccgcgccccaacaaaagatggagtgttgggccacatcagatgcagagtcgcctaaacttttagcctcttttccttcagctggggagcagggcggagaagcgggagcagcagagaccggaggaagcgctggcgccggagaccccggaaagcagcaagcacctgaaaagcctggcgaggccactctgagctgcggattactccagaccgagcactgtttgacctctggcgaggaagcctctacttctgctctcagggagagctgtcaagcggagcatcccatggcttcttgccaggacgctctgctgccggctcgcgagctgggaggcatcccccggagtaccatggattttagcacccatcaggccgtgcctgacccaaaggaattactcctttctggacctcccgaagtggctgctcccgacaccccatatttgcacgttgactccgccgcccaacggggtgctgaagatagcggggtgaaggcagtgtccagtgctgacccccgcgccccgggcgagagtccatgtccagtcggcgaaccgccccttgccctcgagaacgctgcctccttaaaactgttcgcaggttcccttgcaccattactgcagccgggggctgctgggggcgagattcctgcagtgcaagcctctagtgggagcccgaaagcacggaccacggaggggccagtggattccatgccttgcctggaccggatgcctttactggctaagggcaaacaggctaccggagaagaaaaagccgccacggctcccggagctggcgccaaagcgtcaggagaagggatggccggcgacgccgctggggagaccgagggctcaatggagcgaatgggagaacccagtcaggacccaaagcaaggaaccagtggcggggtggatacctcttctgagcagatcgcaacactcacgggctttcccgatttcagagaacacattgctaaaattttcgaaaagcccgttttgggggccctggcaacccctggagaaaaagctggtgccggcaggagcgccgtcggcaaggacctcactaggccgctgggcccagagaagctgttagacggtccaccaggcgtggatgttacattgctccctgccccacccgcacgcctgcaagtggaaaaaaaacaacagttagctggggaggccgagatctcacacctggccctccaagatccagctagtgataaactactgggacctgccggcctgacatgggagagaaatttgcccggcgcaggagtgggaaaggagatggccggcgtgccacctactctgcgagaagacgagcggccggagggaccaggcgctgcctggccgggtctggaggggcaggcctacagtcagctagaaagatcacgtcaggaattggccagtggcctgccatctcctgccgccactcaggagttgccagttgaaagggctgccgcgtttcaggtggcacctcattcccacggggaggaagctgttgcccaggatcggataccctctgggaaacagcatcaggaaacgtctgcctgcgatagtccgcatggagaggatgggcctggggattttgctcatactggggtgccgggccacgtgccacggtctacttgcgccccaagccctcagcgtgaagtgctcactgtgcctgaggcaaatagtgagccctggactcttgatacactgggaggggagcggagacctggcgtcactgccggaatcctggaaatgaggaacgctttgggcaatcagtctactcccgcccctccaaccggggaggtcgcggataccccattggaaccagggaaagtggcaggtgcggccggagaagctgaaggcgatattactctgtcaacggctgagacgcaggcttgcgcctcaggtgacctcccagaggcagggacaacacgcactttctcagtggtggcaggcgatctggttctgcctgggtcatgccaggatcctgcatgtagtgataaggctccaggcatggagggcaccgccgccctgcatggagattcacccgctagaccgcagcaggcaaaggaacagccaggacctgaaagacccatccctgctggtgatggtaaagtctgtgtgtcctccccgccagagccagacgagactcacgatcccaagctacaacacctcgccccggaagaactgcatacggacagagaatctccccgtccagggccttccatgctgccctccgtgccaaaaaaggacgcgccccgtgtaatggacaaggtgactagcgatgaaacacgaggcgctgaggggacagaaaggagtgctaaggatatcggcctttggaaagctatgatgccttctctcgacaccgacaccttggacgtcctggagcgcagagtggtgctgattcagcacgagtttctgcataagaaggaagctaacggccactccaggttcatgtattccagcccagtcgctgacgatattatccaacccgccgccccggctgatctagagagtcctaccctggccgcgagttcatatcacggcgatgtggtgggccaggtctccacagacctgatcgcacagcgaagctcagattcagaggaggcgtttgagacccccgagtctaccacccccgtgaaagcccctcctgcccctcctccacctcctcctgaggtcatacccgagcctgaggtgagtactcagcctccaccggaagaaccaggctgcggaagtgaaacagtccctgttcctgacggacctcgctccgattctgtcgaaggctctccctttagaccgccctcacactccttttctgcagttttcgacgaagacaagccgatcgcatccagtggtacatataacctggacttcgacaacatagaactagtagatacatttcagacactcgagccccgggcctctgacgcgaagaatcaggagggaaaggttaacacccgtcgtaaatcgacggacagcgtacccatcagcaagtctacactcagtagaagcctgtcgctgcaggccagtgattttgatggtgccagtagcagcggcaaccctgaagcagtcgcactagccccggacgcttattccacgggaagctcttccgcttcaagcacacttaagcgtaccaagaaaccccgacccccgagcctgaaaaaaaagcaaaccaccaaaaagccgactgaaacacccccagtgaaagagacgcaacaggagccggacgaggagtcactggttccttcaggtgaaaatctcgcctctgaaacaaagactgagagcgcaaaaactgaagggccaagcccagccctccttgaggagacacctttagaacccgccgtgggacctaaggccgcctgtccactcgatagcgagtccgctgagggagtagtgccccccgcaagtggcggagggcgggtgcagaactctccaccagttggccggaaaacattaccactgaccacagcccctgaagcaggcgaagtgaccccgtcagacagtggaggccaggaggacagtcctgccaagggactgagcgtgcgccttgagtttgactacagcgaagacaaaagctcatgggataatcagcaggaaaacccccccccaaccaagaagatcgggaagaagcctgtggccaaaatgcctttgcggaggcctaagatgaaaaaaactcccgagaagcttgacaatactcctgcatcccccccacggtcccctgctgaaccgaatgacatacccatcgccaaagggacatacacgtttgacatagataagtgggacgaccccaacttcaaccctttttcatccacttctaagatgcaggagtccccaaagctgcctcagcaatcatacaactttgatcccgacacgtgtgatgaatcagtggacccttttaagacatcaagtaagacccctagctccccttctaagtcccctgcttcctttgaaattcctgcctccgccatggaggccaacggggtcgacggcgacggcctgaacaaaccagctaagaaaaagaagacacccctcaaaaccgatactttcagggtgaagaaatccccgaaacgatcaccgttgtctgatcctccatctcaggaccccacccccgctgcaaccccggagacccctccagttatttccgctgttgtgcacgctaccgacgaagaaaaactcgccgtgaccaatcagaagtggacctgtatgacggttgacctcgaagccgacaagcaggattatccgcagccatcagacctgagcactttcgtgaatgaaaccaagttctctagtcctacggaggagctagattatagaaactcctacgagattgaatacatggagaagataggatctagtttgcctcaggatgatgatgcaccaaagaagcaggcgttgtatcttatgttcgacacctctcaggagtcacccgtgaagtcaagccctgttcgaatgtctgagagccccacgccctgctccggaagctctttcgaggagacggaagcactggtcaataccgccgccaagaaccagcatcccgtcccccggggactggcccctaaccaagagtcacatctccaggttcctgagaaaagttcacaaaaggagctggaagccatgggcttggggactccatccgaggctattgagattcgcgaggcagcgcatccaaccgacgtgagcatatcaaagaccgccctctacagtcgaatcggcactgcagaagttgaaaagcctgcggggctgctttttcaacagccagaccttgactccgcactacagatcgctagggcagagattatcaccaaggagcgcgaggtgtccgagtggaaggataaatatgaggaatcacgaagagaggtgatggagatgagaaaaatcgtggctgagtatgaaaagaccatcgcccagatgatcgaggatgaacagagagagaagtccgtgtcccaccagaccgtacagcagctcgtgctggaaaaagagcaggccctggccgaccttaactccgttgagaaatcgctggctgacttgttccgcagatatgaaaagatgaaggaagtcctggaaggtttcaggaaaaatgaggaagtcctgaaaaggtgcgctcaagagtacctgagccgtgtcaaaaaggaggagcagcgttatcaggccctgaaagtgcacgccgaggagaagctcgatcgagctaacgcggagatagcgcaagtacgcggaaaggcacagcaagaacaggctgctcaccaggcctccctgcgaaaagagcagctccgcgtagacgccttggaaaggaccctcgagcagaagaataaggaaattgaagagcttacaaagatctgcgacgagctgattgctaaaatgggcaagtcttag

SEQ ID NO: 110143 - DNA, 8628 bp, Artificial Sequence
  derived and/or modified sequence
atgggaaatgaaaacagcaccagtgacaaccagaggaccctgagcgcccagacccccaggtctgcccagcccccaggcaacagccagaacatcaagaggaagcagcaggacaccccaggcagcccagaccacagagatgccagcagcatcggctctgtgggcctgggcggcttctgcacagccagcgagagcagcgccagcctggacccctgcctggtgtccccagaggtgacagagcccaggaaggacccccagggcgcccggggccctgagggcagcctgctgcccagccccccacccagccaggagcgggagcaccccagcagctccatgccctttgctgaatgtcctcctgagggctgcctggccagccctgctgctgccccagaagatggcccccagacccagagcccccggcgggagcccgccccaaatgcccctggggacattgctgctgccttccctgctgagcgggacagcagcaccccctaccaggagattgctgctgtgcccagcgctggccgggagcggcagcccaaggaggagggccagaagagcagcttctccttcagcagcggcatcgaccagagccctggcatgagccctgtgcccctgcgggagcccatgaaggcccccctgtgtggggagggggaccagcccggcggctttgagagccaggagaaggaggccgccggcggcttccccccagctgagagccggcagggcgtggcctctgtgcaggtgaccccagaggccccagctgctgcccagcagggcacagagagcagcgctgtgctggagaagagccccctgaagcccatggcccccatcccccaggaccctgccccccgggccagtgaccgggagcggggccagggcgaggccccaccccagtacctgacagatgacctggagttcctgcgggcctgccacctgcccaggagcaacagcggggccgcccctgaggccgaggtgaatgctgccagccaggagagctgccagcagcctgtgggcgcctacctgccccacgccgagctgccctggggcctgcccagccctgccctggtgcctgaggccggcggcagcggcaaggaggccctggacaccattgatgtgcagggccacccccagacaggcatgaggggcaccaagcccaaccaggtggtgtgtgtggccgccggcggccagcctgagggcggcctgcctgtgtccccagagcccagcctgctgacccccacagaggaggcccacccagccagcagcctggccagcttccctgctgcccagatccccatcgctgtggaggagcccggcagcagcagccgggagagcgtgtccaaggccggcatgcctgtgtctgcagatgctgccaaggaggtggtggatgctggcctggtgggcctggagcggcaggtgtctgacctgggcagcaagggggagcaccctgagggggaccccggggaggtgcctgcccccagcccccaggagcggggggagcacctgaacacagagcagagccatgaggtgcagcccggggtgcccccaccacccctgcccaaggagcagagccatgaggtgcagcccggggcccctcctccacccctgcccaaggcccccagcgagagcgcccggggccccccaggccccacagatggagccaaggtgcatgaggacagcaccagccctgctgtggccaaggagggcagccgcagccctggggacagccctgggggcaaggaggaggcccctgagcccccagatggaggagaccccggcaacctgcagggcgaggacagccaggccttcagcagcaagagggaccctgaggtgggcaaggatgagctgagcaagcccagcagtgatgctgagagccgggaccaccccagcagccacagcgcccagccccccaggaagggcggggccggccacacagatggcccccacagccagacagctgaggctgatgccagcggcctgccccacaagctgggggaggaggaccctgtgctgccccctgtgcctgatggagctggggagcccaccgtgcctgagggcgccatctgggagggcagcggcctgcagcccaagtgcccagacaccctgcagagccgggagggcctgggccgcatggagagcttcctgaccctggagagcgagaagagtgacttcccccccacccctgtggccgaggtggcccccaaggcccaggagggggagagcaccctggagatcaggaagatgggcagctgtgatggagagggcctgctgaccagcccagaccagccccggggccctgcctgtgatgccagccggcaggagttccacgccggcgtgccccaccccccccagggcgagaacctggccgctgacctgggcctgacagccctgatcctggaccaggaccagcagggcatccccagctgccctggagagggctggatcagaggagctgccagcgagtggcccctgctgagcagcgagaagcacctgcagcccagccaggcccagcctgagaccagcatctttgatgtgctgaaggagcaggcccagcccccagaaaatggcaaggagaccagccccagccaccctggcttcaaggaccagggcgctgacagcagccagatccacgtgcctgtggagccccaggaggacaacaacctgcccacccacggcggccaggagcaggccctgggcagcgagctgcagagccagctgcccaagggcaccctgagtgacacccccaccagcagccccacagacatggtgtgggagagcagcctgacagaggagagcgagctgagcgcccccacccggcagaagctgcctgccctgggggagaagaggcctgagggcgcctgtggagatggccagagcagccgggtgtccccacctgctgctgatgtgctgaaggacttcagcctggccggcaacttcagcaggaaggagacctgctgcaccggccagggccccaacaagagccagcaggccctggctgatgccctggaggagggcagccagcacgaggaggcctgccagaggcaccctggggccagcgaggccgcagatggctgcagccccctgtggggcctgagcaagcgggagatggccagcggcaacacaggagaggccccaccctgccagcctgacagcgtggccctgctggatgctgtgccctgcctgcctgccctggccccagccagccctggggtgacccccacccaggatgcccctgagacagaggcctgtgatgagacccaggagggccggcagcagcctgtgcctgccccccagcagaagatggagtgctgggccaccagtgatgctgagagccccaagctgctggccagcttccccagcgctggggagcagggcggggaggccggggctgctgagaccggcggcagcgctggggccggggaccccgggaagcagcaggcccctgagaagccaggagaggccaccctgagctgtggcctgctgcagacagagcactgcctgaccagcggggaggaggccagcaccagcgccctgcgggagagctgccaggccgagcaccccatggccagctgccaggatgccctgctgcctgcccgggagctgggcggcatccccaggagcaccatggacttcagcacccaccaggccgtgcctgaccccaaggagctgctgctgagcggccccccagaggtggccgccccagacaccccctacctgcacgtggacagcgctgcccagagaggagcagaagattctggagtgaaggctgtgagcagcgctgacccccgggcccctggagagagcccctgccctgtgggggagccccccctggccctggagaatgctgccagcctgaagctgtttgctggcagcctggcccccctgctgcagcctggagctgctggaggagagatcccagctgtgcaggccagcagcggcagccccaaggcccggaccacagagggccctgtggacagcatgccctgcctggacaggatgcccctgctggccaagggcaagcaggccaccggggaggagaaggccgccacagcccctggagctggggccaaggccagcggggagggcatggctggagatgctgctggggagacagagggctccatggagaggatgggagagcccagccaggaccccaagcagggcaccagcggaggagtggacaccagcagcgagcagatcgccaccctgaccggcttcccagacttccgggagcacatcgccaagatctttgagaagcctgtgctgggcgccctggccaccccaggagagaaggccggggccggccgctctgctgtgggcaaggacctgacccggcccctgggccctgagaagctgctggatggccccccaggagtggatgtgaccctgctgcctgcccccccagcccggctgcaggtggagaagaagcagcagctggccggggaggccgagatcagccacctggccctgcaggaccctgccagtgacaagctgctgggccctgctggcctgacctgggagaggaacctgcccggggccggcgtgggcaaggagatggccggcgtgccccccaccctgagagaagatgagaggcctgagggccctggggccgcctggccaggcctggagggccaggcctacagccagctggagaggagccggcaggagctggccagcggcctgcccagccctgctgccacccaggagctgcctgtggagagagctgctgccttccaggtggccccccacagccacggggaggaggccgtggcccaggaccgcatccccagcggcaagcagcaccaggagaccagcgcctgtgacagcccccacggggaggatggccctggggactttgcccacactggagtgcccggccacgtgcccaggagcacctgtgcccccagcccccagcgggaggtgctgactgtgcctgaggccaacagcgagccctggaccctggacaccctgggcggggagcggcggcctggggtgacagctggcatcctggagatgagaaatgccctgggcaaccagagcaccccagcccccccaactggagaggtggccgacacccccctggagcccgggaaggtggccggggccgccggggaggccgagggggacatcaccctgagcacagctgagacccaggcctgtgccagcggggacctgcctgaggccggcaccaccaggaccttctctgtggtggccggggacctggtgctgcccggcagctgccaggaccctgcctgcagcgacaaggcccctggcatggagggcacagctgccctgcatggagacagccctgcccggccccagcaggccaaggagcagcccggccctgagcggcccatcccagctggagatggcaaggtgtgtgtgagcagccccccagagccagatgagacccatgaccccaagctgcagcacctggcccctgaggagctgcacacagaccgggagagccccaggcctggccccagcatgctgcccagcgtgcccaagaaggatgccccccgggtgatggacaaggtgaccagtgatgagaccagaggagctgagggcacagagaggtctgccaaggacatcggcctgtggaaggccatgatgcccagcctggacacagacaccctggatgtgctggagaggagagtggtgctgatccagcacgagttcctgcacaagaaggaggccaacggccacagccgcttcatgtacagcagccctgtggctgatgacatcatccagcctgctgccccagctgacctggagagccccaccctggccgccagcagctaccatggagatgtggtgggccaggtgtccacagacctgattgcccagaggagcagtgacagcgaggaggcctttgagaccccagagagcaccacccctgtgaaggcccccccagcccctcctcctcctcctcctgaggtgattcctgagcctgaggtgtccacccagcccccacctgaggagcccggctgcggcagcgagaccgtgcctgtgcctgatggccccaggagtgacagcgtggagggcagccccttccggccccccagccacagcttctctgctgtgtttgatgaggacaagcccatcgccagcagcggcacctacaacctggactttgacaacatcgagctggtggacaccttccagaccctggagccccgggccagtgatgccaagaaccaggagggcaaggtgaacaccaggaggaagagcacagattctgtgcccatcagcaagagcaccctgagccgcagcctgagcctgcaggccagtgactttgatggagccagcagcagcggcaaccctgaggccgtggccctggccccagatgcctacagcacaggcagcagcagcgccagcagcaccctgaagaggaccaagaagccccggccccccagcctgaagaagaagcagaccaccaagaagcccacagagaccccacctgtgaaggagacccagcaggagccagatgaggagagcctggtgcccagcggggagaacctggccagcgagaccaagacagaaagtgccaagacagagggccccagccctgccctgctggaggagacccccctggagcctgctgtgggccccaaggccgcctgccccctggacagcgagagcgctgagggcgtggtgcccccagccagcggcggcggccgggtgcagaacagcccccctgtgggcaggaagaccctgcccctgaccacagcccctgaggccggggaggtgacccccagcgacagcggcggccaggaggacagccctgccaagggcctgtctgtgcggctggagtttgactacagcgaggacaagagctcctgggacaaccagcaggagaaccccccacccaccaagaagattggcaagaagcctgtggccaagatgcccctgcggcggcccaagatgaagaagaccccagagaagctggacaacaccccagccagcccccccaggagccctgctgagcccaatgacatccccatcgccaagggcacctacacctttgatattgacaagtgggatgaccccaacttcaaccccttcagcagcaccagcaagatgcaggagagccccaagctgccccagcagagctacaactttgatcctgacacctgtgatgaatctgtggaccccttcaagaccagcagcaagacccccagcagccccagcaagagccctgccagctttgagatcccagccagcgccatggaggccaacggggtggatggagatggcctgaacaagccagccaagaagaagaagacccccctgaagacagacaccttccgggtgaagaagagccccaagaggagccccctgagtgacccccccagccaggaccccaccccagctgccaccccagagaccccacctgtgatctctgctgtggtgcacgccacagatgaggagaagctggccgtgaccaaccagaagtggacctgcatgacagtggacctggaggccgacaagcaggactacccccagcccagcgacctgagcacctttgtgaatgagaccaagttcagcagccccacagaggagctggactacagaaacagctatgaaattgagtacatggagaagattggcagcagcctgccccaggatgatgatgcccccaagaagcaggccctgtacctgatgtttgacaccagccaggagagccctgtgaagagcagccctgtgaggatgtctgagagccccaccccctgcagcggcagcagctttgaggagacagaggccctggtgaacacagctgccaagaaccagcaccctgtgccccggggcctggcccccaaccaggagagccacctgcaggtgcctgagaagagcagccagaaggagctggaggccatgggcctgggcaccccatctgaggccatcgagatccgggaggccgcccaccccacagatgtgtccatcagcaagacagccctgtacagccgcatcggcacagctgaggtggagaagccagctggcctgctcttccagcagcctgacctggacagcgccctgcagatcgcccgggcagagatcatcaccaaggagcgggaggtgtctgagtggaaggacaagtatgaggagagcagaagagaggtgatggagatgaggaagatcgtggccgagtatgagaagaccatcgcccagatgattgaagatgagcagcgggagaagtctgtgagccaccagacagtgcagcagctggtgctggagaaggagcaggccctggccgacctgaacagcgtggagaagagcctggccgacctcttccgccgctatgagaagatgaaggaggtgctggagggcttcaggaagaatgaggaggtgctgaagagatgtgcccaggagtacctgagccgggtgaagaaggaggagcagcgctaccaggccctgaaggtgcacgccgaggagaagctggaccgggccaatgctgagatcgcccaggtgcggggcaaggcccagcaggagcaggccgcccaccaggccagcctgaggaaggagcagctgcgggtggatgccctggagaggaccctggagcagaagaacaaggagattgaggagctgaccaagatctgtgatgagctgattgccaagatgggcaagagctag

SEQ ID NO: 110144 - DNA, 8628 bp, Artificial Sequence
  derived and/or modified sequence
atgggcaacgagaacagcaccagcgacaaccagcggaccctgagcgctcagacccccagatcagctcagccgcctggaaattcccagaatatcaagaggaaacagcaggacacgccagggtctcccgaccaccgtgacgcctctagtattggaagcgtgggactcggaggattctgcactgccagtgaatccagcgcctctctggatccctgcctcgtgtcacccgaggtcaccgagccccgtaaggatccacagggcgcccgtgggcccgagggctccctgctgccttcacccccccctagccaggagcgcgagcacccttcatctagcatgccattcgccgaatgcccgcccgaagggtgccttgcctcgcctgctgccgctcctgaagatggtcctcaaacccaatcaccccgcagggaacccgcccccaatgcacctggggacatcgctgcggccttccccgctgagcgcgactccagcaccccttatcaggaaatcgctgccgtccccagcgcggggagagagcggcaacctaaggaggaaggccagaagagctcattttccttctcctccgggatcgatcaaagccccgggatgtcacccgtccccctgcgtgagccaatgaaagccccattgtgtggcgaaggggatcagccaggcggctttgagagccaagagaaggaggcggctggaggctttccccctgcggaaagcagacagggagtcgcttctgtgcaagtcaccccggaggctcctgccgctgctcagcaggggactgagtcatccgcggtcttggaaaaatcgcccctgaagcccatggcccctatcccacaggacccagctccaagggcctccgacagagagcgggggcaaggagaagcccctcctcagtacttaaccgatgacctcgaattcctacgggcttgccacctgcctaggtctaacagcggtgccgcccccgaggccgaggtaaatgctgcaagccaggagtcatgtcagcagcctgttggtgcatacctcccacatgcagaattaccctggggcctcccttccccggcactggtgccggaagctgggggatccggaaaggaggcccttgatacaatagatgttcagggacacccacagactgggatgcgaggaactaagcctaatcaggtcgtgtgcgtcgccgccggtggtcaaccagaagggggtttgcctgtgagccctgagccctcactgctgacaccaacagaggaggctcatccggcgagttccctggcaagcttcccagccgctcagatccccatcgcagtcgaagaacctggctcctcatcccgagagagcgttagtaaagctgggatgcccgtcagcgcagatgcagctaaagaggtggttgatgctggcctggtggggttagagcgccaagtaagcgatctgggctccaaaggggagcaccccgagggcgacccgggagaagtgcccgctccatccccacaggagcgtggcgagcacctgaataccgagcaaagccacgaggtgcagcctggggtgccccccccccctttacctaaggagcaaagtcacgaggtgcagcctggggcacccccaccacccctcccaaaggctcccagtgaatccgcaagaggaccacctgggccaaccgacggcgccaaagtacacgaggatagtacaagcccggcggtcgccaaagaaggatccaggagccctggagacagtcctggtggcaaagaggaggccccggaacctccagacgggggcgatccagggaacctccaaggagaggactctcaagctttttctagtaagcgcgatcccgaagtagggaaggatgagcttagcaagccctcttcagatgccgaatccagagatcaccccagtagtcacagtgcccaacctccccgcaaaggcggagccggccataccgatgggcctcactctcaaaccgctgaggccgacgcaagtggcctaccacacaagctcggcgaggaagaccctgtgctgccacctgtgccagacggtgcaggggaacccactgttcccgagggagccatctgggagggctctggactccagccaaaatgtcccgatacactgcagtccagggagggcctgggccggatggaatcgttccttacgttagagtccgagaaatctgactttcctcccaccccagttgccgaggtcgctccaaaagcccaggaaggcgaaagcacactggaaattagaaaaatgggttcttgcgatggcgaaggattgctcaccagtcccgaccagcctagaggccccgcctgtgacgcatcaaggcaggagttccacgccggggtaccccaccccccgcagggcgaaaatcttgccgcggacctgggccttactgctttgatattagaccaggatcaacagggaatccctagctgtcctggagaaggctggatccggggagccgcctccgaatggccactgctttcttccgaaaagcacttgcaaccatctcaggctcagcccgaaacaagtatattcgatgtgctgaaggaacaagcccaacctccagaaaacggcaaggagacatcaccatcccatcccggattcaaggatcagggcgcagactcttcgcagatccatgtgccggtggagccgcaggaagataataatctccccacacatggcgggcaggaacaagcactcggaagcgaactccaatcccagctccccaagggcactctctcagacactccgaccagcagccccaccgacatggtctgggaaagctccctgacagaggagtcggaactctccgcaccgacacgacagaagctccccgcactgggcgaaaagagaccagagggagcatgtggtgatggccagtcttccagagtttcccccccggcagccgacgtgctgaaagacttcagtcttgctggaaatttcagcaggaaggaaacctgctgtacgggtcagggtccaaacaaatcacagcaggccctggccgacgcgttggaagaagggagtcagcacgaggaagcttgccaaaggcaccccggcgcctccgaagcagccgacggttgcagcccgttatggggcctctctaaacgtgaaatggcgtccgggaataccggcgaggctcccccatgtcagcccgattccgtggcactgctggacgccgtcccctgtctacccgccctcgcaccagcgtcacccggcgtcacccccactcaggatgctccagaaacagaagcctgtgacgagacccaggagggaaggcagcagcccgtgcccgcaccccagcaaaagatggaatgttgggccacaagtgatgccgagtcccccaagctgctggcttccttcccatcggccggggagcaggggggggaagccggcgcggctgagaccggcggctcagccggggcaggggatcccggcaagcagcaggctccagagaaacctggtgaggcaacactgtcctgcggactgcttcagaccgaacattgcctcacttcaggagaggaggcctctacgtccgcactgagggagagctgtcaagcggagcaccctatggcctcttgccaagacgccctactacctgccagggagctgggcggaatccccaggtcgactatggatttttccacgcaccaagctgtgcccgaccctaaggagttgcttctgagcggcccgccggaggtagccgccccagacactccctacctacacgtggattcagcagcccagcgtggcgccgaagactcaggagtcaaagccgtctcatcagctgatcctcgagccccgggggagtccccatgccccgttggcgaacctccccttgctcttgaaaatgccgcctccctaaagctgtttgctggctccctcgctccactcttgcagcccggcgcagccggcggggagatcccagctgtgcaggcttcttccgggtcgccgaaggctcgcaccaccgaaggacccgtggatagcatgccttgcctggaccggatgcccttattagcgaaaggaaagcaggccacaggagaggagaaagccgctactgcccctggcgcgggagcgaaggcatctggggagggtatggctggcgatgccgcaggcgaaacagagggctccatggaacgcatgggtgagccaagccaggatcccaagcagggcaccagtggcggtgttgacacgagcagcgaacagattgccacgttgacgggctttccagatttcagggaacatatagctaaaatttttgaaaaacccgttctcggcgctctagctacaccgggcgagaaggctggagcagggaggtctgcggtcgggaaagatctgacacgccctctgggaccggagaagctgcttgacggccctcctggagtggacgtcactttgttgcctgcgccacccgcccgcttacaggtggagaaaaagcagcagttggcgggtgaagcagaaatttcacatttggcccttcaagaccccgcctccgacaagctgttagggcctgccgggttaacatgggagcgcaatctgcccggggctggcgttggaaaggaaatggcaggggttccaccaacactgagggaggacgaacggcctgaggggccaggcgccgcttggcccggcttagaggggcaggcatattcacaattagaacgctctcgacaagaactagcaagtggcctgcccagccccgcagccacccaggagttgccggtggaaagagccgcggcattccaagtggccccacactcccatggcgaggaagccgtcgctcaggaccgtatcccctccggcaaacagcatcaggagacaagcgcttgtgatagtcctcatggggaagacggcccaggcgatttcgcccacacaggggtgcctgggcatgtgccgcgtagcacttgtgccccaagcccccagcgggaggtgctgaccgtcccggaggcaaattcagaaccttggaccctggatacgttagggggagagcgtcgaccaggggtgaccgccggtatcctggagatgcggaacgcactgggaaatcagagcacacctgcccctccaacaggggaggtggccgatactcctctagagcctggtaaggttgcaggggccgcgggagaagctgaaggcgatatcactctgtccacagccgaaacccaggcttgcgcatcaggcgatctgcctgaagccggtactactcggacattttccgtggtggcaggggatttagtcctccctggctcatgccaggatcctgcctgctccgataaagcaccgggaatggagggtacagccgcactccatggtgactcaccagctcggcctcaacaggccaaagaacagccagggcctgagaggcctataccagctggtgatgggaaagtatgtgtcagttctcctcctgaacccgatgagacccatgaccctaagctgcaacatctcgcacccgaggagctccacaccgacagggaaagcccacgccccggtccctctatgctgccaagtgtgcccaaaaaggatgccccacgcgtcatggataaggtcacaagtgacgaaacgcggggcgccgaggggacagaaaggagtgctaaagacataggattgtggaaggcaatgatgccgtccctggacacagacacgcttgatgtcctcgaacgcagggtcgtcctgatacaacacgagtttctgcacaaaaaagaagcgaatggacattcccgctttatgtactcctcacctgtagcggacgacataattcagcccgctgcccccgccgatttggagagccccacactggcagcttcttcctaccatggggatgtggtcggccaggtgagtacggatttgatagcccagcggagttcagactctgaggaggcgttcgagacgcccgaatccaccacgcccgtgaaagctccgcccgcaccacctcccccacctcctgaggttataccagaacccgaggtatcaactcagcccccaccagaggaacccggctgcgggagtgaaactgtgcctgtgcctgacggtccccggagcgattcagttgagggttcacctttccggcctccttcgcactcattctcagcggtctttgacgaagataagcctatagcgtcctcaggtacttataatctggattttgataatattgaactcgtagataccttccagacattagaaccgagggcatctgacgccaagaaccaagaagggaaagtgaatacacgccgaaagtccactgattcagtccctatttctaaatccaccctgtctcggtcgttgtctttgcaagcgagcgatttcgacggcgcaagcagttctggcaatccagaggctgtggctctagcaccagacgcctactcaacaggaagctcctcggcgtcctcaacactgaagaggaccaagaaaccaagaccaccgtccctaaagaagaaacagacaactaagaaaccgacggagactccacccgtgaaggagacccagcaggaacccgacgaagagtccctggtcccgtctggagagaacctggctagtgagactaaaacagagtccgctaagaccgaggggccatcacccgcactgctcgaggagacaccgctcgagcctgccgtcgggccaaaggccgcctgccccctggactcagagagtgccgagggagtggtgccgcccgcctctggcggcgggagagtgcagaattctcctccagtcggacgcaagacactccccctaactaccgcgcctgaggcaggggaagtcactccatctgattctggcggacaggaagattcacccgccaaggggctctccgtcaggctggaattcgattactcagaagacaagagctcctgggacaatcagcaggaaaacccccctccaactaagaaaattggtaagaaacccgtagcaaagatgcctctgcgcagacccaagatgaaaaaaactccagaaaagttggacaacacgcctgcctctcctccccgaagcccagccgaaccaaatgatattcccatcgccaagggaacctatacttttgatatcgacaagtgggacgacccaaacttcaacccttttagcagcacatctaagatgcaggagtcccccaagctgccacagcagagttacaatttcgatcccgacacctgtgacgagtccgtcgatccttttaaaacctcaagtaagacaccgagcagtccctccaagagccccgcgagcttcgagatccccgcttcagccatggaagccaacggagtagatggtgatggtttaaacaagcctgcgaaaaaaaagaagactccactaaagaccgatacattccgggtgaaaaaaagtccaaaacgaagcccactgtctgacccgccgtcccaggatcctacgcctgccgcaacgcccgaaacgcctccagtcatctcggctgttgtgcacgctactgacgaagaaaaacttgcagtgaccaaccagaaatggacttgcatgactgtcgatcttgaagccgacaagcaggattatccccagccatctgatcttagcaccttcgtgaatgagactaagttttcctcgccaactgaggagctggattacaggaattcctatgagatcgaatacatggaaaagatcggaagctcattgccgcaggatgacgatgcccctaagaaacaagcactctatctaatgtttgacacaagtcaggagtcccctgtgaagagctctccggtgaggatgtctgagtcccctaccccgtgtagtggctcaagctttgaagagacagaggcgctcgtcaacacagccgccaagaaccagcaccctgtgccaagaggactggcgcctaatcaggagtcccatttgcaagtcccagagaagagctcccagaaggaactggaagcaatgggtctcggaacaccctccgaagcgatcgaaatccgcgaagcagcccaccccacggacgtgtcaattagcaagaccgctctttacagtcggatcggcaccgcagaggtcgagaagccggcaggccttctttttcaacagccagacctggacagcgcccttcagatcgcccgcgcagagatcatcactaaggaaagggaggtctctgagtggaaggacaagtacgaagagtctaggcgtgaagtgatggagatgcgaaagatcgttgctgaatatgaaaaaaccattgcacagatgattgaggacgagcagcgggagaagagtgtctcccaccagaccgtccagcaactggtcctggaaaaagagcaggccttggccgacctgaacagcgtagaaaaatcattggctgacctattcagacggtacgagaaaatgaaagaggttctagagggcttcaggaagaatgaggaagttctgaaaagatgcgcccaggaatacttgagccgcgtgaagaaggaggagcagcgctaccaggccctgaaggtgcacgctgaagagaaattggatagagccaacgccgaaattgcccaggtgaggggaaaggcacaacaggagcaggccgcacaccaagcttccttaaggaaagagcagctccgcgtcgacgcactcgaaaggacgcttgaacagaagaataaggagatcgaggagttgaccaaaatttgcgatgaattgattgcaaagatggggaaatcctag

SEQ ID NO: 110145 - DNA, 8627 bp, Artificial Sequence
  derived and/or modified sequence
atggggaacgagaactcgacgtcagataatcaaagaaccctcagcgcacagactcctcgctcagcccagccgccagggaattcccagaacatcaagcgtaaacaacaagacaccccaggtagtccggaccaccgagacgcctccagtattggatcagtggggctgggagggttctgcacggcgagtgaatcctcagcatcgttagacccctgtttagtgtcccccgaggtgacagagcctcgcaaggaccctcaaggcgctcgcggacctgagggatctctgctgccttcccctccgccatcccaagaacgcgaacacccttcctcttcaatgccatttgctgagtgcccacccgagggatgcttggcctctcctgcagccgctccagaagatggcccacagacccagtcacccaggcgcgagcccgcaccgaatgcacccggagatatagcagccgcatttcctgctgaacgcgattcatccactccataccaggaaattgcagccgtgccatcagccggacgcgagcgccagcctaaggaggagggacagaaatcaagctttagttttagttcaggtatagatcagagccctggaatgagccccgtgcctttgcgcgaacccatgaaggccccactgtgtggggagggagaccagcccggagggttcgagagtcaggagaaggaggctgccggagggttcccacctgctgagtcaaggcagggcgtggcttccgtgcaggtgactcccgaggcccctgcagccgcacagcagggaaccgagtccagtgctgtcctggaaaagagtcctctgaagcctatggcacctattcctcaggacccagcaccaagggcctcagatagggaaagaggacagggcgaggcaccacctcaatacctgaccgatgatcttgagtttctccgggcttgtcacctgccaaggagcaatagcggggcagctcctgaggcagaagtgaacgccgcatcgcaggagtcctgccagcaaccggtgggtgcctatctgccccatgccgagctcccttgggggctcccatcaccggctctggtaccggaggctggtggcagtggtaaagaagctttagacactattgatgtgcagggacacccgcagaccggtatgcgcggaactaaaccaaaccaggttgtctgcgtggccgcagggggacagcctgaagggggattgcccgtctcaccagaacctagcctactgacgcctacagaagaggctcatccagcgagctcactggcctcattccccgcagcccagatcccaattgccgtagaggaacccggatcaagttcacgtgaatccgtcagcaaagctgggatgcccgtgtccgccgatgcagccaaagaggtcgtggatgcaggactcgtaggccttgaacggcaggtaagtgacctgggaagtaaaggagaacatcctgaaggagatcccggagaagtcccagccccttctccccaagaacgaggggaacacctgaacacagagcagagccacgaggtgcaacccggtgtgccaccgccaccactgcccaaggaacaatcgcacgaagtccagccgggtgctcccccaccacctttaccaaaggcaccttcagagagtgcccgtgggccacctggccctactgacggggctaaggttcatgaggacagcacaagccccgctgtagccaaggaggggtcgcgtagtcctggcgactctcctggcggtaaagaggaagcgcctgaacccccagacggcggagatcctgggaatctacagggcgaggactcacaagccttttcatcgaagagggaccccgaggtaggtaaggatgagctttcaaaaccatcctccgatgccgagtccagagatcacccttctagccactcagcccagcccccacgtaaaggcggagctggacacacggacggtccccacagccaaacagcggaggcggacgctagtggcttacctcataaactgggggaggaggaccccgtgttaccaccggtgcccgacggagctggagagcctaccgtgcctgagggcgcaatctgggaggggagtgggctgcaaccgaagtgcccggatactctccagagccgcgaaggcctgggtaggatggaatctttcttaacactcgagagtgagaaaagcgatttcccgccaacccccgtggccgaggtcgcccctaaggcccaggagggggagtccaccctggaaatccgcaagatgggcagttgcgacggagagggattactgacctccccagaccaaccacgcggtcctgcctgcgacgcctctagacaggaattccacgctggagttccccacccaccccagggcgaaaacctcgccgctgatttaggcctgactgcccttatcctggaccaggaccagcaggggattccatcctgccccggagaagggtggattagaggcgcagcatctgaatggcccctactcagttccgaaaagcacttacagccatcccaagcacagcccgagacttccatctttgatgtgttgaaagagcaagctcagccccctgagaacgggaaggaaacaagcccctctcatcccggtttcaaagaccaaggagcagattcttcgcaaattcacgtccccgtggaaccacaagaggacaacaaccttcccacacatggaggccaggagcaagcgctaggatccgagctgcagagccagctgccaaagggaactttgtctgatactccaacatcaagccctacagacatggtctgggagagcagccttactgaggagtccgagctctctgcccctacacggcaaaaactgccagccctgggggagaaaaggccggagggagcctgcggagatggacagtcttctagagtgagccccccagctgccgacgtgttgaaagatttctctctggcaggtaatttttctaggaaagaaacatgctgtactggtcagggccctaacaagagtcagcaggctctggctgacgccttggaggaagggagccagcacgaggaggcctgtcagaggcaccctggggcatctgaggctgccgacggctgttctcctctgtgggggctgtccaaacgcgagatggcttccgggaacaccggagaggccccaccctgccagcctgatagcgtagccctgttagacgcagtcccctgcctgcccgcactggccccagcttcccctggcgtgacacctacccaagacgccccagagaccgaagcatgcgatgaaacccaggaggggcgacaacagcccgtgcccgcacctcagcagaaaatggaatgctgggcaacatctgacgcagagagcccgaaacttctggccagcttcccaagtgccggtgagcaaggcggagaggcgggtgctgcagagactgggggaagcgccggtgccggagatccagggaaacaacaggcgcctgaaaaacctggcgaagctacgctgtcctgtgggctcctgcaaacagagcattgcttaactagtggggaggaggcatcaactagcgccctgcgggagagctgccaggccgaacatccaatggcgtcctgtcaggacgcactactccctgccagggaactcggcggtatacccagatccacaatggatttttccactcaccaagcagtgcccgaccccaaggagctacttctgtcggggccaccagaggttgcagcccctgacacaccatatctacacgttgatagcgcagcgcagaggggcgctgaggactctggcgttaaagccgttagctctgctgatccgagagcaccaggtgagtctccatgccccgtgggggaacctccgctcgccctggaaaatgcagctagcctcaagctgttcgcaggcagcctagcccctttgctccagcctggtgctgcagggggagagatccccgcagtgcaggcatcttctggcagccctaaggctcgcaccaccgaagggccagtggacagcatgccctgcttagaccgcatgcctcttctcgctaaggggaagcaagccaccggagaagaaaaggctgcaacggctccaggggcaggcgcaaaggccagcggggaggggatggcgggagatgctgcaggggagaccgaaggatctatggaaaggatgggcgagccctcacaggaccctaagcagggtacctctggcggagtggatacctcaagcgaacagattgcgaccctcaccggtttccctgactttcgcgagcacattgccaaaatcttcgaaaaaccagtgctgggcgcacttgctacacccggtgaaaaagcaggcgcaggaaggtcggccgtgggcaaggatctgacgagacccctgggcccagagaagcttctggatggccctccaggtgtggacgtgacccttctcccagcgccacccgcacgcctacaagtcgagaaaaagcaacaattagccggagaagccgaaatcagtcacctggccctccaggatcctgcgagtgacaaactcctgggcccagctggcctcacatgggagcgcaatctgcccggagctggcgtgggcaaggaaatggctggcgtgcctcctacactccgagaagacgaaagaccggagggtcccggtgcagcctggcccggactggagggacaagcctatagccagctggaacggagcagacaggagctcgccagcgggctgcctagtccagcggctactcaagagttgcctgtcgagagggcagccgctttccaggtggctccgcactctcacggagaggaagcagtcgcgcaagatcgtatcccttctggcaagcagcaccaagaaacttccgcctgtgattctcctcacggcgaggacggtccaggcgactttgcccatacaggagtgccagggcatgttcctaggtcaacctgtgccccttccccccagcgcgaggttctcaccgtccccgaggcaaatagtgagccctggacgctggacaccctgggtggtgaacggcgaccgggtgtcacagctggcatcctggagatgaggaacgctctgggaaatcagtccaccccagccccacctaccggagaggtcgcggacactcccttagaacccggaaaagtcgccggagctgccggagaggccgagggggatataaccctgtctaccgctgaaacacaagcttgtgcttccggcgacttgcccgaggcgggtaccactcgcacattttctgtggtggcgggagatttggtgctccccggatcatgccaagatcccgcttgctctgataaagcccctgggatggaggggacagcagcacttcacggggacagtcctgcaagaccccagcaggccaaggagcagcctgggccagaacgcccaataccggcaggggatgggaaggtctgtgtgagttcacctcctgagcccgacgagacccatgacccgaagctgcagcacctcgcaccagaagaacttcacaccgaccgagaaagcccacgccctgggccttcaatgctgccaagcgtgcctaagaaagatgccccaagagtcatggataaagtgacaagcgacgagaccagaggagctgaagggacagagcgctcagcgaaagatataggcctgtggaaagcaatgatgcccagcctggatacagataccctcgatgtactcgagagaagggtggttctcatccagcacgagttcctgcacaaaaaagaagccaacgggcactctagattcatgtactcaagtcctgtggccgatgacataattcagcccgctgctccagccgatctggaaagcccaaccctcgcagccagtagctaccatggtgatgtggtcggtcaggtgtccactgaccttatcgctcaaagaagttcggattccgaggaggctttcgagactccagagtccaccactcctgtcaaggcccctcccgcacctccccctccacccccagaggtgattcccgaaccggaggtgagcactcagccccctcctgaggagcctggctgtggaagcgaaacggttcccgtccctgacggtcctagatccgactctgttgagggctccccatttcggccaccaagtcactctttttcggcagtttttgacgaggacaaacctatagccagcagtggtacatacaacttggattttgataatattgaacttgtggatacattccagacccttgagccccgtgcaagtgatgctaaaaaccaggagggcaaggttaatacaaggagaaaaagtactgattccgttcccattagtaaaagcacgctgagccgatctctctccctccaggcctcagactttgacggggcaagcagctccggcaaccctgaagcagtcgcactggcccctgatgcatactcgactgggagctcgagcgccagttctactctgaagcgcaccaaaaaacctcggcctccgtcattgaagaagaaacagacgactaagaagccaacagagacgcctcccgttaaggagacccagcaggagccagatgaagagagcctcgtaccttccggcgagaacctggcctcagagacaaagaccgagagtgctaaaaccgagggaccatcccccgcactgttagaagagacaccgcttgagcccgctgtgggcccaaaagccgcatgcccactcgattcagaatccgctgaaggagtggtacctccagctagcggcggaggccgtgttcaaaatagtccacccgtgggccgtaaaactctacccctaactaccgctcccgaggcgggagaagtgaccccttctgattcaggcggtcaggaggacagccccgcaaaggggttgtctgtacggctcgagtttgactacagtgaggacaaaagctcctgggataaccagcaggaaaacccgccaccaaccaagaagatcggcaagaagcccgtggccaaaatgcccttgcggcgacctaaaatgaagaaaactcccgagaagctagacaataccccagccagccctccccgttcacctgctgagcccaatgatattcctattgccaaaggcacttacacgttcgacatcgataaatgggacgaccccaattttaatcctttttcctcaacctccaaaatgcaagaaagtcctaagttgccacaacagagctacaacttcgatcccgacacatgcgatgagagtgtggacccatttaaaacaagctcgaagacgccctcttccccttcgaagtcacctgcttcctttgagatcccagcgtcggccatggaggcaaatggagtggatggggatgggctgaacaaaccagcaaaaaagaagaaaacccctttgaagacagatacatttcgtgttaaaaagtcccccaaaagatctcccctgagcgacccgcctagccaggaccccacacctgcagccactccagaaaccccccctgtgatctcagctgtggtccacgctaccgatgaagagaaactggccgtgaccaaccagaagtggacctgcatgaccgtcgatctagaagcagataaacaggactatccgcagccaagcgacctttcaactttcgtgaacgagaccaaattctctagccccacagaagagctcgattaccgcaactcatacgagatcgaatatatggagaagatcggttctagcttaccacaggacgatgatgcacctaagaagcaggccttgtaccttatgttcgacacatcacaagaaagtcccgtgaagagtagcccggtgcggatgtctgagtcccccaccccctgttccggtagctcattcgaggaaaccgaggccttagtgaacaccgctgctaaaaaccagcatcctgtgccaaggggactggccccaaaccaggagtcgcatctgcaagtgcccgagaagagcagccaaaaagagctcgaggccatgggacttgggacaccctctgaggcaatcgagattcgcgaagccgctcatccaaccgacgtatcaatttctaaaaccgccctgtacagccgaatcggcacggcagaggtagaaaagcccgctggcctacttttccagcaacctgacctagacagcgcccttcagatagcaagagcagagatcattactaaggaaagggaggtgtcagagtggaaggacaagtatgaagagtctcggagagaagtaatggaaatgcggaaaatagttgcagaatatgaaaaaaccatcgcacaaatgatcgaagatgagcagcgggaaaagtcggtaagtcatcaaacagtgcaacagctggtgctggaaaaggagcaggctctcgccgacctcaattccgtcgagaaaagccttgcagatctattccggagatatgagaaaatgaaggaagttttagagggctttcgcaaaaatgaggaggtgctgaaaaggtgtgcgcaggagtacctgtctcgggtgaaaaaggaagaacaaaggtaccaggccttgaaggtgcacgccgaagaaaagcttgatcgcgctaatgcagaaatagcccaggttcgagggaaggcgcagcaggaacaggccgctcatcaggcatccctacggaaggaacagctgagagtggacgcccttgagcgtacattagaacagaagaataaagagatcgaggagctcaccaagatttgcgatgagctcattgctaagatgggtaagtccta

SEQ ID NO: 110146 - DNA, 8963 bp, Artificial Sequence
  derived and/or modified sequence
gtcacctctgacaaaattctggggacgctgggaacactgaatcaacatgggcaatgagaacagcacctcggacaaccagaggactttatcagctcagactccaaggtccgcgcagccacccgggaacagtcagaatataaaaaggaagcagcaggacacgcccggaagccctgaccacagagacgcgtccagcattggcagcgttgggcttggaggcttctgcaccgcttctgagagttctgccagcctggatccatgccttgtgtccccagaggtgactgagccaaggaaggacccacagggagccagggggccagaaggttctttgctgcccagcccaccaccgtcccaggagcgagagcacccctcgtcctccatgccctttgccgagtgtcccccggaaggttgcttggcaagtccagcagcggcacctgaagatggtcctcagactcagtctcccaggagggaacctgccccaaatgccccaggagacatcgcggcggcatttcccgctgagagggacagctctactccataccaagagattgctgccgtccccagtgctggaagagagagacagccgaaggaagaaggacagaagtcctccttctccttctccagtggcatcgaccagtcacctggaatgtcgccagtacccctcagagagccaatgaaggcaccgctgtgtggagagggggaccagcctggtggttttgagtcccaagagaaagaggctgcaggtggctttccccctgcagagtccaggcagggggtggcttctgtgcaagtgacccctgaggcccctgctgcagcccagcagggcacagaaagctcagcggtcttggagaagtcccccctaaaacccatggccccgatcccacaagatccagccccaagagcctcagacagagaaagaggccaaggggaggcgccgcctcagtatttaacagatgacttggaattcctcagggcctgccatctccctaggagcaattcaggggctgccccagaagcagaagtgaatgccgcttcccaggagagctgccagcagccagtgggagcatatctgccgcacgcagagctgccctggggcttgccaagtcctgccctggtgccagaggctgggggctctgggaaggaggctctggacaccattgatgttcagggtcacccacagacagggatgcgaggaaccaagcccaatcaagttgtctgtgtggcagcaggcggccagcccgaagggggtttgcctgtgagccctgaaccttccctgctcactccgactgaggaagcacatccagcttcaagcctcgcttcattcccagctgctcagattcctattgctgtagaagaacctggatcatcatccagggaatcagtttccaaggctgggatgccagtttctgcagatgcagccaaagaggtggtggatgcagggttggtgggactggagaggcaggtgtcagatcttggaagcaagggagagcatccagaaggggaccctggagaggttcctgccccatcaccccaggagaggggagagcacttgaacacggagcaaagccatgaggtccaaccaggagtaccaccccctcctcttcccaaggagcaaagccatgaggtccaaccaggagcaccaccccctcctcttcccaaggcaccaagtgaaagtgccagagggccaccggggccaacggatggagccaaggtccatgaagattccacaagcccagccgtggctaaagaaggaagcagatcacctggtgacagccctggaggaaaggaggaagccccagagccacctgatggtggagacccagggaacctgcaaggagaggactctcaggctttcagcagcaagcgtgatccagaagtaggcaaagatgagctttcaaagccaagcagtgatgcagagagcagagaccatcccagctcacactcagcacagccacccagaaaggggggtgctgggcacacggacgggccccactctcagacagcagaggctgatgcatctggcctaccacacaagctgggtgaggaggaccccgtcctgccccctgtgccagatggagctggtgagcccactgttcccgaaggagccatctgggaggggtcaggattgcagcccaaatgtcctgacacccttcagagcagggaaggattgggaagaatggagtctttcctgactttagaatcagagaaatcagattttccaccaactcctgttgcagaggttgcacccaaagcccaggaaggtgagagcacattggaaataaggaagatgggcagctgtgatggggagggcttgctgacgtccccagatcaaccccgcgggccggcgtgtgatgcgtcgagacaggaatttcatgctggggtgccacatcccccccagggggagaacttggcagcagacctggggctcacggcactcatcctggaccaagatcagcagggaatcccatcctgcccaggggaaggctggataagaggagctgcatccgagtggcccctactatcttctgagaagcatctccagccatcccaggcacaaccagagacatccatctttgacgtgctcaaggagcaggcccagccacctgaaaatgggaaagagacttctccaagccatccaggttttaaggaccagggagcagattcttcccaaatccatgtacctgtggaacctcaggaagataacaacttgcccactcatggaggacaggagcaggctttgggatcagaacttcaaagtcagctccccaaaggcaccctgtctgatactccaacttcatctcccactgacatggtttgggagagttctctgacagaagagtcagaattgtcagcaccaacgagacagaagttgcctgcactaggggagaagcggccagagggagcatgcggtgatggtcagtcctcgagggtctcgcctccagcagcagatgtcttaaaagacttttctcttgcagggaacttcagcagaaaggaaacttgctgcactgggcaggggccaaacaagtctcaacaggcattggctgatgccttggaagaaggcagccagcatgaagaagcatgtcaaaggcatccaggagcttctgaagcagctgatggttgttccccactctggggcttgagtaagagggagatggcaagtggaaacacaggggaggccccaccttgtcagcctgactcagtagctctcctggatgcagttccctgcctgccagccctggcgcccgccagccccggagtcacacccacccaggatgccccagagacagaggcatgtgatgaaacccaggaaggcaggcagcaaccagtgccggccccgcagcagaaaatggagtgctgggccacttcggatgcagagtccccaaagcttcttgcaagtttcccatcagctggggagcaaggtggtgaagccggggctgctgagactggtggcagcgctggtgcaggagacccaggaaagcagcaggctccggagaaacctggagaagctactttgagttgtggcctccttcagactgagcactgccttacctccggggaggaagcttctacctctgccctacgtgagtcctgccaagctgagcaccccatggccagctgccaggatgccttgctgccagccagagagctgggtgggattcccaggagcaccatggatttttctacacaccaggctgtcccagacccaaaggagctcctgctgtctgggccaccagaagtggctgctcctgacaccccttacctgcatgtcgacagtgctgcccagagaggagcagaagacagtggagtgaaagctgtttcctctgcagaccccagagctcctggcgaaagcccctgtcctgtaggggagcccccacttgccttggaaaatgctgcctccttgaagctgtttgctggctccctcgcccccctgttgcaaccaggagctgcaggtggggaaatccctgcagtgcaagccagcagtggtagtcccaaagccagaaccactgagggaccagtggactccatgccatgcctggaccggatgccacttctggccaagggcaagcaggcaacaggggaagagaaagcagcaacagctccaggtgcaggtgccaaggccagtggggagggcatggcaggtgatgcagcaggagagacagagggcagcatggagaggatgggagagccttcccaggacccaaagcagggcacatcaggtggtgtggacacaagctctgagcaaatcgccaccctcactggcttcccagacttcagggagcacatcgccaagatcttcgagaagcctgtgctcggagccctggccacacctggagaaaaggcaggagctgggaggagtgcagtgggtaaagacctcaccaggccattgggcccagagaagcttctagatgggcctccaggagtggatgtcacccttctccctgcacctcctgctcgactccaggtggagaagaagcaacagttggctggagaggctgagatttcccatctggctctgcaagatccagcttcagacaagcttctgggtccagcagggctgacctgggagcggaacttgccaggtgccggtgtggggaaggagatggcaggtgtcccacccacactgagggaagacgagaggccagaggggcctggggcagcctggccaggcctggaaggccaggcttactcacagctggagaggagcaggcaggaattagcttcaggtcttccttcaccagcagctactcaggagctccctgtggagagagctgctgccttccaggtggctccccatagccatggagaagaggccgtggcccaagacagaattccttctggaaagcagcaccaggaaacatctgcctgcgacagtccacatggagaagatggtcccggggactttgctcacacaggggttccaggacatgtgccaaggtccacgtgtgccccttctcctcagagggaggttttgactgtgcctgaggccaacagtgagccctggacccttgacacgcttgggggtgaaaggagacccggagtcactgctggcatcttggaaatgcgaaatgccctgggcaaccagagcacccctgcaccaccaactggagaagtggcagacactcccctggagcctggcaaggtggcaggcgctgctggggaagcagagggtgacatcaccctgagcacagctgagacacaggcatgtgcgtccggtgatctgcctgaagcaggtactacgaggacattctccgttgtggcaggtgacttggtgctgccaggaagctgtcaggacccagcctgctctgacaaggctccggggatggagggtacagctgcccttcatggggacagcccagccaggccccagcaggctaaggagcagccagggcctgagcgccccattccagctggggatgggaaggtgtgcgtctcctcacctccagagcctgacgaaactcacgacccgaagctgcaacatttggctccagaagagctccacactgacagagagagccccaggcctggcccatccatgttaccttcggttcctaagaaggatgctccaagagtcatggataaagtcacttcagatgagaccagaggtgcggaaggaacagaaaggtcagcgaaagatattggtctttggaaggccatgatgccttccttagatacagacacactggatgttttggaaaggagagtagtccttatacagcatgagttcctacataagaaagaagcaaatggccattcccgttttatgtacagttcacctgtggcagatgatatcatccagcccgctgcccccgcagacctggaaagcccaaccttagctgcctcttcctaccacggtgatgttgttggccaggtctctacggatctgatagcccagaggagttccgattctgaagaggcatttgagaccccggagtcaacgacccctgtcaaagctccgccagctccacccccaccaccccccgaagtcatcccagaacccgaggtcagcacacagccacccccggaagaaccaggatgtggttctgagacagtccctgtccctgatggcccacggagcgactcggtggaaggaagtcccttccgtcccccgtcacactccttctctgccgtcttcgatgaagacaagccgatagccagcagtgggacttacaacttggactttgacaacattgagcttgtggatacctttcagaccttggagcctcgtgcctcagacgctaagaatcaggagggcaaagtgaacacacggaggaagtccacggattccgtccccatctctaagtctacactgtcccggtcgctcagcctgcaagccagtgactttgatggtgcttcttcctcaggcaatcccgaggccgtggcccttgccccagatgcatatagcacgggttccagcagtgcttctagtacccttaagcgaactaaaaaaccgaggccgccttccttaaaaaagaaacagaccaccaagaaacccacagagacccccccagtgaaggagacgcaacaggagccagatgaagagagccttgtccccagtggggagaatctagcatctgagacgaaaacggaatctgccaagacggaaggtcctagcccagccttattggaggagacgccccttgagcccgctgtggggcccaaagctgcctgccctctggactcagagagtgcagaaggggttgtccccccggcttctggaggtggcagagtgcagaactcaccccctgtcgggaggaaaacgctgcctcttaccacggccccggaggcaggggaggtaaccccatcggatagcggggggcaagaggactctccagccaaagggctctccgtaaggctggagtttgactattctgaggacaagagtagttgggacaaccagcaggaaaacccccctcctaccaaaaagataggcaaaaagccagttgccaaaatgcccctgaggaggccaaagatgaaaaagacacccgagaaacttgacaacactcctgcctcacctcccagatcccctgctgaacccaatgacatccccattgctaaaggtacttacacctttgatattgacaagtgggatgaccccaattttaaccctttttcttccacctcaaaaatgcaggagtctcccaaactgccccaacaatcatacaactttgacccagacacctgtgatgagtccgttgacccctttaagacatcctctaagacccccagctcaccttctaaatccccagcctcctttgagatcccagccagtgctatggaagccaatggagtggacggggatgggctaaacaagcccgccaagaagaagaagacgcccctaaagactgacacatttagggtgaaaaagtcgccaaaacggtctcctctctctgatccaccttcccaggaccccaccccagctgctacaccagaaacaccaccagtgatctctgcggtggtccacgccacagatgaggaaaagctggcggtcaccaaccagaagtggacgtgcatgacagtggacctagaggctgacaaacaggactacccgcagccctcggacctgtccacctttgtaaacgagaccaaattcagttcacccactgaggagttggattacagaaactcctatgaaattgaatatatggagaaaattggctcctccttacctcaggacgacgatgccccgaagaagcaggccttgtaccttatgtttgacacttctcaggagagccctgtcaagtcatctcccgtccgcatgtcagagtccccgacgccgtgttcagggtcaagttttgaagagactgaagcccttgtgaacactgctgcgaaaaaccagcatcctgtcccacgaggactggcccctaaccaagagtcacacttgcaggtgccagagaaatcctcccagaaggagctggaggccatgggcttgggcaccccttcagaagcgattgaaattagagaggctgctcacccaacagacgtctccatctccaaaacagccttgtactcccgcatcgggaccgctgaggtggagaaacctgcaggccttctgttccagcagcccgacctggactctgccctccagatcgccagagcagagatcataaccaaggagagagaggtctcagaatggaaagataaatatgaagaaagcaggcgggaagtgatggaaatgaggaaaatagtggccgagtatgagaagaccatcgctcagatgatagaggacgaacagagagagaagtcagtctcccaccagacggtgcagcagctggttctggagaaggagcaagccctggccgacctgaactccgtggagaagtctctggccgacctcttcagaagatatgagaagatgaaggaggtcctagaaggcttccgcaagaatgaagaggtgttgaagagatgtgcgcaggagtacctgtcccgggtgaagaaggaggagcagaggtaccaggccctgaaggtgcacgcggaggagaaactggacagggccaatgctgagattgctcaggttcgaggcaaggcccagcaggagcaagccgcccaccaggccagcctgcggaaggagcagctgcgagtggacgccctggaaaggacgctggagcagaagaataaagaaatagaagaactcaccaagatttgtgacgaactgattgccaaaatggggaaaagctaactctgaaccgaatgttttggacttaactgttgcgtgcaatatgaccgtcggcacactgctgttcctccagttccatggacaggttctgttttcactttttcgtatgcactactgtatttcctttctaaataaaattgatttgattgtatgcagtactaaggagactatcagaatttcttgctattggtttgcattttcctagtataattcatagcaagttgacctcagagttcctgtatcagggagattgtctgattctctaataaaagacacattgctgaccttggcc

SEQ ID NO: 110147 - DNA, 900 bp, Artificial Sequence
  derived and/or modified sequence
atgcggtccgtgggcgagggggcacgggaatggattagggagtgccagcatcaattcagacatcacagatggaattgcacaaccctggaccgcgatcacaccgtcttcggtagagtgatgttgcgaagttcacgggaggccgcattcgtttacgcaatatcctcggcaggcgttgtgcacgcaattacacgcgcatgtagccaaggcgaactgtcagtgtgttcctgtgatccatacaccaggggacgtcatcatgatcaacggggagatttcgattggggcggatgctctgataacatccactatggggtcaggtttgcgaaggccttcgtcgacgctaaggagaagcgcctgaaggacgctagggcattgatgaacctgcataacaatagatgcggccgtacagcggtaagacggttcctcaaactggagtgtaaatgccacggcgtgtccgggtcatgtaccctgcgtacatgttggcgggctttgtcagattttcggaggacaggtgattacctccgaaggagatacgatggtgcggtgcaagtgatggcaactcaggacggagcaaactttacagcagccagacagggctataggcgggcaactcgtacagatttagtgtacttcgataactcccctgattactgtgtgctggataaagctgcgggatcgctggggacagctggcagggtgtgcagcaagaccagcaagggcacagatggatgcgagatcatgtgctgcggaagaggttatgacaccacgagggttacacgggttacccaatgcgaatgcaagttccactggtgttgtgccgttaggtgtaaggaatgcagaaacactgtggacgtgcacacctgcaaggcgccaaagaaagcggagtggctcgaccagacatag

SEQ ID NO: 110148 - DNA, 900 bp, Artificial Sequence
  derived and/or modified sequence
atgaggtcagtgggggaaggtgctagggaatggatcagagaatgccaacatcagtttcgacatcataggtggaattgcaccactctggaccgggatcacaccgtcttcgggcgcgtcatgctgaggtccagtcgcgaggccgcatttgtatacgctatctccagcgcaggcgtagttcacgcgattacacgcgcttgcagccagggagagctttcagtatgttcatgcgacccctacacacgcggtcggcatcatgatcagaggggggacttcgactggggagggtgctccgataatattcattacggcgtgagatttgccaaagcattcgttgacgccaaagagaagcggctcaaagacgccagggccctgatgaaccttcataacaatagatgtggccgcaccgccgtccgccgttttctgaagctcgaatgtaagtgtcatggggtgtcaggctcctgtactctgaggacctgttggcgggctttatcggatttccgccgaaccggagattacttgaggcgtagatacgatggggcggtacaggtcatggccacccaagacggtgcgaacttcacagctgctaggcaaggttatcgccgcgcaacacggacagacctggtctatttcgacaactctcccgattattgtgtgctggacaaagcagccgggtcactaggcaccgccggaagagtttgtagcaaaacgtcaaagggaaccgatgggtgcgagatcatgtgctgcggtagaggctacgacactactcgggtaaccagggtcactcagtgtgagtgcaagttccactggtgctgtgccgtcaggtgtaaagaatgtaggaacacagtggacgtgcatacctgtaaagctcctaagaaggccgaatggctcgaccagacctag

SEQ ID NO: 110149 - DNA, 900 bp, Artificial Sequence
  derived and/or modified sequence
atgagatccgttggcgaaggcgctcgggagtggattagagagtgccagcaccaattccgccaccatagatggaattgcactactttagaccgtgaccatacagtatttggaagagttatgctgagaagtagcagagaggccgcctttgtgtacgcaataagctccgctggcgtagttcatgctattacacgggcatgtagccaaggggaattaagcgtttgtagttgtgatccttatacacgaggcaggcaccatgatcagagaggtgactttgattggggaggctgctctgacaatattcactatggggtgaggttcgccaaagcattcgtcgatgcgaaggaaaaaagattgaaggatgctagagcacttatgaacctacataacaatagatgtggaagaaccgctgtgcgcagatttcttaagctcgagtgtaagtgccacggggtgtccgggagctgtacattgcggacttgttggagggccctgtccgacttcagacgcacaggagattatttgaggagaaggtacgacggggctgtacaggtgatggcaacccaggacggggctaatttcacagccgctagacagggctacaggcgcgcaacacggacagacctggtctatttcgacaactctcccgattattgtgtgctggacaaagcagccgggtcactaggcaccgccggaagagtttgtagcaaaacgtcaaagggaaccgatgggtgcgagatcatgtgctgcggtagaggctacgacactactcgggtaaccagggtcactcagtgtgagtgcaagttccactggtgctgtgccgtcaggtgtaaagaatgtaggaacacagtggacgtgcatacctgtaaagctcctaagaaggccgaatggctcgaccagacctag

SEQ ID NO: 110150 - DNA, 900 bp, Artificial Sequence
  derived and/or modified sequence
atgagaagcgtgggcgagggcgccagagagtggatcagagagtgccagcaccagttcagacaccacagatggaactgcaccaccctggacagagaccacaccgtgttcggcagagtgatgctgagaagcagcagagaggccgccttcgtgtacgccatcagcagcgccggcgtggtgcacgccatcaccagagcctgcagccagggcgagctgagcgtgtgcagctgcgacccctacaccagaggcagacaccacgaccagagaggcgacttcgactggggcggctgcagcgacaacatccactacggcgtgagattcgccaaggccttcgtggacgccaaggagaagagactgaaggacgccagagccctgatgaacctgcacaacaacagatgcggcagaaccgccgtgagaagattcctgaagctggagtgcaagtgccacggcgtgagcggcagctgcaccctgagaacctgctggagagccctgagcgacttcagaagaaccggcgactacctgagaagaagatacgacggcgccgtgcaggtgatggccacccaggacggcgccaacttcaccgccgccagacagggctacagaagagccaccagaaccgacctggtgtacttcgacaacagccccgactactgcgtgctggacaaggccgccggcagcctgggcaccgccggcagagtgtgcagcaagaccagcaagggcaccgacggctgcgagatcatgtgctgcggcagaggctacgacaccaccagagtgaccagagtgacccagtgcgagtgcaagttccactggtgctgcgccgtgagatgcaaggagtgcagaaacaccgtggacgtgcacacctgcaaggcccccaagaaggccgagtggctggaccagacctag

SEQ ID NO: 110151 - DNA, 900 bp, Artificial Sequence
  derived and/or modified sequence
atgagaagtgtgggggaaggagcaagagaatggatccgcgagtgccagcatcagtttcggcatcatcgctggaactgcacaactttggatagggaccatacggtttttggtcgggtgatgctccggtcttctcgcgaagccgcctttgtgtacgccatttcatctgccggggtggtacacgccatcaccagggcttgctcacaaggggagctgtcggtgtgctcttgtgatccatacacacgaggccgacatcacgaccaaagaggcgattttgactggggtggatgctctgacaatatacactatggcgtccggtttgctaaggcttttgtcgacgccaaagagaagcgcctgaaggatgcgagagctctgatgaatctgcacaataacagatgcggtcgaaccgccgtccggcgcttcctaaagctggaatgcaaatgtcatggcgtgagtggcagctgcacgctgaggacctgttggcgtgccctgagcgattttaggaggacaggggactacctgcggagaaggtatgatggggcggttcaggttatggccacccaggacggtgccaactttacggccgccaggcagggataccggagggctacccgcacagacttggtttactttgataattcccccgattactgcgtgctagacaaagcagctggttccctagggactgcggggagagtctgctcaaaaaccagcaaaggtacagatggatgtgagatcatgtgttgtgggcggggatacgataccaccagagttaccagggtgactcaatgcgagtgtaaatttcactggtgttgcgccgtgcgctgcaaggagtgcaggaacacagtggacgtccatacctgtaaggctcctaagaaggccgaatggttagatcagacctag

SEQ ID NO: 110152 - DNA, 900 bp, Artificial Sequence
  derived and/or modified sequence
atgaggtctgtgggggagggcgcccgggagtggatccgggagtgccagcaccagttccgccaccaccgctggaactgcaccaccctggaccgggaccacacagtgtttggccgggtgatgctgcggagcagccgggaggccgcctttgtgtatgccatcagcagcgctggggtggtgcacgccatcacccgggcctgcagccagggcgagctgtctgtgtgcagctgtgacccctacacccggggccgccaccacgaccagagaggagactttgactggggcggctgcagcgacaacatccactacggcgtgcgctttgccaaggcctttgtggatgccaaggagaagaggctgaaggatgcccgggccctgatgaacctgcacaacaacagatgtggccgcacagctgtgcggcgcttcctgaagctggagtgcaagtgccacggcgtgtctggcagctgcaccctgcggacctgctggagggccctgagtgacttcagaagaactggagactacctgcggaggagatatgatggagctgtgcaggtgatggccacccaggatggagccaacttcaccgctgcccggcagggctaccgccgggccaccaggacagacctggtgtactttgacaacagcccagactactgtgtgctggacaaggctgctggcagcctgggcacagctggccgggtgtgcagcaagaccagcaagggcacagatggctgtgagatcatgtgctgcggccggggctatgacaccaccagggtgaccagggtgacccagtgtgagtgcaagttccactggtgctgtgctgtgcgctgcaaggaatgtagaaacacagtggatgtgcacacctgcaaggcccccaagaaggccgagtggctggaccagacctag

SEQ ID NO: 110153 - DNA, 900 bp, Artificial Sequence
  derived and/or modified sequence
atgcggagcgtgggcgagggcgcccgggagtggatccgggagtgccaacaccagtttcggcaccaccgatggaattgcacaactttggacagggatcacacagtgtttgggcgagtcatgctgcggagttcccgagaggcagcattcgtttatgctatttcctcggctggagtcgtgcacgcaataacccgcgcctgtagccagggggagttatctgtttgttcatgtgacccctacactaggggccgccatcacgatcagcggggcgacttcgactggggagggtgcagcgacaatatccattacggcgtgcgatttgccaaagctttcgtggatgccaaggaaaagagactcaaggatgcccgcgccctgatgaaccttcacaataaccgatgcgggcgtacagctgtgagacggttcctgaagctggaatgtaagtgccacggagtgagcggatcgtgtacgctaagaacctgctggagggctctatctgatttccgtcgaactggggactatcttaggagacggtacgacggggctgtccaggtcatggccacccaggatggagcaaattttaccgctgccagacagggatatcgtcgggcgacccgcactgatttggtctactttgacaattccccagactattgcgtgctcgacaaggccgcggggtctcttggaacagccggtagagtgtgtagcaaaacctcaaaggggactgatgggtgtgaaatcatgtgttgtggtcgcggatatgataccacaagagttaccagggtaacgcaatgcgaatgcaaatttcactggtgctgcgctgtgcgctgcaaggagtgcagaaataccgtggatgtgcatacatgtaaagcacctaaaaaggccgaatggttggaccagacgtag

SEQ ID NO: 110154 - RNA, 900 nt, Artificial Sequence
  derived and/or modified sequence
augaggucagugggggaaggugcuagggaauggaucagagaaugccaacaucaguuucgacaucauagguggaauugcaccacucuggaccgggaucacaccgucuucgggcgcgucaugcugagguccagucgcgaggccgcauuuguauacgcuaucuccagcgcaggcguaguucacgcgauuacacgcgcuugcagccagggagagcuuucaguauguucaugcgaccccuacacacgcggucggcaucaugaucagaggggggacuucgacuggggagggugcuccgauaauauucauuacggcgugagauuugccaaagcauucguugacgccaaagagaagcggcucaaagacgccagggcccugaugaaccuucauaacaauagauguggccgcaccgccguccgccguuuucugaagcucgaauguaagugucauggggugucaggcuccuguacucugaggaccuguuggcgggcuuuaucggauuuccgccgaaccggagauuacuugaggcguagauacgauggggcgguacaggucauggccacccaagacggugcgaacuucacagcugcuaggcaagguuaucgccgcgcaacacggacagaccuggucuauuucgacaacucucccgauuauugugugcuggacaaagcagccgggucacuaggcaccgccggaagaguuuguagcaaaacgucaaagggaaccgaugggugcgagaucaugugcugcgguagaggcuacgacacuacucggguaaccagggucacucagugugagugcaaguuccacuggugcugugccgucagguguaaagaauguaggaacacaguggacgugcauaccuguaaagcuccuaagaaggccgaauggcucgaccagaccuag

SEQ ID NO: 110155 - RNA, 900 nt, Artificial Sequence
  derived and/or modified sequence
augagauccguuggcgaaggcgcucgggaguggauuagagagugccagcaccaauuccgccaccauagauggaauugcacuacuuuagaccgugaccauacaguauuuggaagaguuaugcugagaaguagcagagaggccgccuuuguguacgcaauaagcuccgcuggcguaguucaugcuauuacacgggcauguagccaaggggaauuaagcguuuguaguugugauccuuauacacgaggcaggcaccaugaucagagaggugacuuugauuggggaggcugcucugacaauauucacuauggggugagguucgccaaagcauucgucgaugcgaaggaaaaaagauugaaggaugcuagagcacuuaugaaccuacauaacaauagauguggaagaaccgcugugcgcagauuucuuaagcucgaguguaagugccacgggguguccgggagcuguacauugcggacuuguuggagggcccuguccgacuucagacgcacaggagauuauuugaggagaagguacgacggggcuguacaggugauggcaacccaggacggggcuaauuucacagccgcuagacagggcuacaggcgcgcaacacggacagaccuggucuauuucgacaacucucccgauuauugugugcuggacaaagcagccgggucacuaggcaccgccggaagaguuuguagcaaaacgucaaagggaaccgaugggugcgagaucaugugcugcgguagaggcuacgacacuacucggguaaccagggucacucagugugagugcaaguuccacuggugcugugccgucagguguaaagaauguaggaacacaguggacgugcauaccuguaaagcuccuaagaaggccgaauggcucgaccagaccuag

SEQ ID NO: 110156 - protein, 110 aa, Artificial Sequence
  derived and/or modified sequence
MALWMRFLPLLALLFLWESHPTQAFVKQHLCGSHLVEALYLVCGERGFFYTPMSRREVEDPQVAQLELGGGPGAGDLQTLALEVAQQKRGIVDQCCTSICSLYQLENYCN

SEQ ID NO: 110157 - protein, 110 aa, Artificial Sequence
  derived and/or modified sequence
MALWMRLLPLLALLALWGPDPAAAFVNQHLCGSHLVEALYLVCGERGFFYTPKTRREAEDLQVGQVELGGGPGAGSLQPLALEGSLQKRGIVEQCCTSICSLYQLENYCN

SEQ ID NO: 110158 - protein, 98 aa, Artificial Sequence
  derived and/or modified sequence
MALWMRLLPLLALLALWGPDPAAAFVNQHLCGSHLVEALYLVCGERGFFYTPKTRREAEDLQGSLQPLALEGSLQKRGIVEQCCTSICSLYQLENYCN

SEQ ID NO: 110159 - protein, 110 aa, Artificial Sequence
  derived and/or modified sequence
MALWMRLLPLLALLALWGPDPAAAFVNQHLCGSHLVEALYLVCGERGFFYTDKTRREAEDLQVGQVELGGGPGAGSLQPLALEGSLQKRGIVEQCCTSICSLYQLENYCN

SEQ ID NO: 110160 - protein, 110 aa, Artificial Sequence
  derived and/or modified sequence
MALWMRLLPLLALLALWGPDPAAAFVNQHLCGSHLVEALYLVCGERGFFYTPKTRREAEDLQVGQVELGGGPGAGSLQPLALEGSLQKRGIVEQCCTSICSLYQLENYCG

SEQ ID NO: 110161 - protein, 110 aa, Artificial Sequence
  derived and/or modified sequence
MALWMRLLPLLALLALWGPDPAAAFVKQHLCGSHLVEALYLVCGERGFFYTPETRREAEDLQVGQVELGGGPGAGSLQPLALEGSLQKRGIVEQCCTSICSLYQLENYCN

SEQ ID NO: 110162 - protein, 110 aa, Artificial Sequence
  derived and/or modified sequence
MALWMRLLPLLALLALWGPDPAAAFVNQHLCGSHLVEALYLVCGERGFFYTKPTRREAEDLQVGQVELGGGPGAGSLQPLALEGSLQKRGIVEQCCTSICSLYQLENYCN

SEQ ID NO: 110163 - DNA, 563 bp, Artificial Sequence
  derived and/or modified sequence
agcttttggaccctcgtacagaagctaatacgactcactatagggaaataagagagaaaagaagagtaagaagaaatataagagccaccatggcgctctggtgaggtttctgcctttgttggccttgctgttcctctgggagtcccaccccacacaggcgtttgtgaagcagcacttgtgcgggtcgcatctggtggaggcactttatctcgtctgcggcgagcgaggattcttctacaccccgatgagcagacgcgaagtggaagatccgcaagtcgcgcagctcgaacttgggggtggtcccggagccggagacttgcaaactctcgctctcgaggtagcgcagcagaaacggggtatcgtagaccagtgttgcacgtcgatctgttcactttatcaacttgagaactactgtaattgaagcgctgccttctgcggggcttgccttctggccatgcccttcttctctcccttgcacctgtacctcttggtctttgaataaagcctgagtaggaaggcggccgctcgagcatgcatctagagggcccaattcgccctattcg

SEQ ID NO: 110164 - DNA, 567 bp, Artificial Sequence
  derived and/or modified sequence
agcttttggaccctcgtacagaagctaatacgactcactatagggaaataagagagaaaagaagagtaagaagaaatataagagccaccatggctctctggatgcggcttcttccactgctcgccctcttggcgttgtggggacccgaccctgcagcagcgtttgtgaatcagcacctctgcgggtcccatctggtcgaagccctttaccttgtgtgtggcgagcgcgggttcttctacacgcccaagacaaggcgcgaggcggaggatctccaagtagggcaggtggaattgggagggggaccgggagccggttcactccagcccctggcgttggaggggtcgctgcagaaaagaggtattgtcgaacagtgttgcactagcatctgctcgctgtatcaacttgagaactattgtaactgaagcgctgccttctgcggggcttgccttctggccatgcccttcttctctcccttgcacctgtacctcttggtctttgaataaagcctgagtaggaaggcggccgctcgagcatgcatctagagggcccaattcgccctattcgaag

SEQ ID NO: 110165 - DNA, 3262 bp, Artificial Sequence
  derived and/or modified sequence
accaatgcttaatcagtgaggcacctatctcagcgatctgtctatttcgttcatccatagttgcctgactccccgtcgtgtagataactacgatacgggagggcttaccatctggccccagcgctgcgatgataccgcgagaaccacgctcaccggctccggatttatcagcaataaaccagccagccggaagggccgagcgcagaagtggtcctgcaactttatccgcctccatccagtctattaattgttgccgggaagctagagtaagtagttcgccagttaatagtttgcgcaacgttgttgccatcgctacaggcatcgtggtgtcacgctcgtcgtttggtatggcttcattcagctccggttcccaacgatcaaggcgagttacatgatcccccatgttgtgcaaaaaagcggttagctccttcggtcctccgatcgttgtcagaagtaagttggccgcagtgttatcactcatggttatggcagcactgcataattctcttactgtcatgccatccgtaagatgcttttctgtgactggtgagtactcaaccaagtcattctgagaatagtgtatgcggcgaccgagttgctcttgcccggcgtcaatacgggataataccgcgccacatagcagaactttaaaagtgctcatcattggaaaacgttcttcggggcgaaaactctcaaggatcttaccgctgttgagatccagttcgatgtaacccactcgtgcacccaactgatcttcagcatcttttactttcaccagcgtttctgggtgagcaaaaacaggaaggcaaaatgccgcaaaaaagggaataagggcgacacggaaatgttgaatactcatattcttcctttttcaatattattgaagcatttatcagggttattgtctcatgagcggatacatatttgaatgtatttagaaaaataaacaaataggggtcagtgttacaaccaattaaccaattctgaacattatcgcgagcccatttatacctgaatatggctcataacaccccttgtttgcctggcggcagtagcgcggtggtcccacctgaccccatgccgaactcagaagtgaaacgccgtagcgccgatggtagtgtggggactccccatgcgagagtagggaactgccaggcatcaaataaaacgaaaggctcagtcgaaagactgggcctttcgcccgggctaattatggggtgtcgcccttcgctgaaagcttttggaccctcgtacagaagctaatacgactcactatagggaaataagagagaaaagaagagtaagaagaaatataagagccaccatggctctctggatgcggcttcttccactgctcgccctcttggcgttgtggggacccgaccctgcagcagcgtttgtgaatcagcacctctgcgggtcccatctggtcgaagccctttaccttgtgtgtggcgagcgcgggttcttctacacgcccaagacaaggcgcgaggcggaggatctccaagtagggcaggtggaattgggagggggaccgggagccggttcactccagcccctggcgttggaggggtcgctgcagaaaagaggtattgtcgaacagtgttgcactagcatctgctcgctgtatcaacttgagaactattgtaactgaagcgctgccttctgcggggcttgccttctggccatgcccttcttctctcccttgcacctgtacctcttggtctttgaataaagcctgagtaggaaggcggccgctcgagcatgcatctagagggcccaattcgccctattcgaagcgtcaaaagggcgacacaaaatttattctaaatgcataataaatactgataacatcttatagtttgtattatattttgtattatcgttgacatgtataattttgatatcaaaaactgattttccctttattattttcgagatttattttcttaattctctttaacaaactagaaatattgtatatacaaaaaatcataaataatagatgaatagtttaattataggtgttcatcaatcgaaaaagcaacgtatcttatttaaagtgcgttgcttttttctcatttataaggttaaataattctcatatatcaagcaaagtgacaggcgcccttaaatattctgacaaatgctctttccctaaactccccccataaaaaaacccgccgaagcgggtttttacgttatttgcggattaacgattactcgttatcagaaccgcccagggggcccgagcttaagactggccgtcgttttacaacacagaaagagtttgtagaaacgcaaaaaggccatccgtcaggggccttctgcttagtttgatgcctggcagttccctactctcgccttccgcttcctcgctcactgactcgctgcgctcggtcgttcggctgcggcgagcggtatcagctcactcaaaggcggtaatacggttatccacagaatcaggggataacgcaggaaagaacatgtgagcaaaaggccagcaaaaggccaggaaccgtaaaaaggccgcgttgctggcgtttttccataggctccgcccccctgacgagcatcacaaaaatcgacgctcaagtcagaggtggcgaaacccgacaggactataaagataccaggcgtttccccctggaagctccctcgtgcgctctcctgttccgaccctgccgcttaccggatacctgtccgcctttctcccttcgggaagcgtggcgctttctcatagctcacgctgtaggtatctcagttcggtgtaggtcgttcgctccaagctgggctgtgtgcacgaaccccccgttcagcccgaccgctgcgccttatccggtaactatcgtcttgagtccaacccggtaagacacgacttatcgccactggcagcagccactggtaacaggattagcagagcgaggtatgtaggcggtgctacagagttcttgaagtggtgggctaactacggctacactagaagaacagtatttggtatctgcgctctgctgaagccagttaccttcggaaaaagagttggtagctcttgatccggcaaacaaaccaccgctggtagcggtggtttttttgtttgcaagcagcagattacgcgcagaaaaaaaggatctcaagaagatcctttgatcttttctacggggtctgacgctcagtggaacgacgcgcgcgtaactcacgttaagggattttggtcatgagcttgcgccgtcccgtcaagtcagcgtaatgctctgctttt

SEQ ID NO: 110166 - DNA, 3259 bp, Artificial Sequence
  derived and/or modified sequence
accaatgcttaatcagtgaggcacctatctcagcgatctgtctatttcgttcatccatagttgcctgactccccgtcgtgtagataactacgatacgggagggcttaccatctggccccagcgctgcgatgataccgcgagaaccacgctcaccggctccggatttatcagcaataaaccagccagccggaagggccgagcgcagaagtggtcctgcaactttatccgcctccatccagtctattaattgttgccgggaagctagagtaagtagttcgccagttaatagtttgcgcaacgttgttgccatcgctacaggcatcgtggtgtcacgctcgtcgtttggtatggcttcattcagctccggttcccaacgatcaaggcgagttacatgatcccccatgttgtgcaaaaaagcggttagctccttcggtcctccgatcgttgtcagaagtaagttggccgcagtgttatcactcatggttatggcagcactgcataattctcttactgtcatgccatccgtaagatgcttttctgtgactggtgagtactcaaccaagtcattctgagaatagtgtatgcggcgaccgagttgctcttgcccggcgtcaatacgggataataccgcgccacatagcagaactttaaaagtgctcatcattggaaaacgttcttcggggcgaaaactctcaaggatcttaccgctgttgagatccagttcgatgtaacccactcgtgcacccaactgatcttcagcatcttttactttcaccagcgtttctgggtgagcaaaaacaggaaggcaaaatgccgcaaaaaagggaataagggcgacacggaaatgttgaatactcatattcttcctttttcaatattattgaagcatttatcagggttattgtctcatgagcggatacatatttgaatgtatttagaaaaataaacaaataggggtcagtgttacaaccaattaaccaattctgaacattatcgcgagcccatttatacctgaatatggctcataacaccccttgtttgcctggcggcagtagcgcggtggtcccacctgaccccatgccgaactcagaagtgaaacgccgtagcgccgatggtagtgtggggactccccatgcgagagtagggaactgccaggcatcaaataaaacgaaaggctcagtcgaaagactgggcctttcgcccgggctaattatggggtgtcgcccttcgctgaaagcttttggaccctcgtacagaagctaatacgactcactatagggaaataagagagaaaagaagagtaagaagaaatataagagccaccatggcgctctggatgaggtttctgcctttgttggccttgctgttcctctgggagtcccaccccacacaggcgtttgtgaagcagcacttgtgcgggtcgcatctggtggaggcactttatctcgtctgcggcgagcgaggattcttctacaccccgatgagcagacgcgaagtggaagatccgcaagtcgcgcagctcgaacttgggggtggtcccggagccggagacttgcaaactctcgctctcgaggtagcgcagcagaaacggggtatcgtagaccagtgttgcacgtcgatctgttcactttatcaacttgagaactactgtaattgaagcgctgccttctgcggggcttgccttctggccatgcccttcttctctcccttgcacctgtacctcttggtctttgaataaagcctgagtaggaaggcggccgctcgagcatgcatctagagggcccaattcgccctattcgcgtcaaaagggcgacacaaaatttattctaaatgcataataaatactgataacatcttatagtttgtattatattttgtattatcgttgacatgtataattttgatatcaaaaactgattttccctttattattttcgagatttattttcttaattctctttaacaaactagaaatattgtatatacaaaaaatcataaataatagatgaatagtttaattataggtgttcatcaatcgaaaaagcaacgtatcttatttaaagtgcgttgcttttttctcatttataaggttaaataattctcatatatcaagcaaagtgacaggcgcccttaaatattctgacaaatgctctttccctaaactccccccataaaaaaacccgccgaagcgggtttttacgttatttgcggattaacgattactcgttatcagaaccgcccagggggcccgagcttaagactggccgtcgttttacaacacagaaagagtttgtagaaacgcaaaaaggccatccgtcaggggccttctgcttagtttgatgcctggcagttccctactctcgccttccgcttcctcgctcactgactcgctgcgctcggtcgttcggctgcggcgagcggtatcagctcactcaaaggcggtaatacggttatccacagaatcaggggataacgcaggaaagaacatgtgagcaaaaggccagcaaaaggccaggaaccgtaaaaaggccgcgttgctggcgtttttccataggctccgcccccctgacgagcatcacaaaaatcgacgctcaagtcagaggtggcgaaacccgacaggactataaagataccaggcgtttccccctggaagctccctcgtgcgctctcctgttccgaccctgccgcttaccggatacctgtccgcctttctcccttcgggaagcgtggcgctttctcatagctcacgctgtaggtatctcagttcggtgtaggtcgttcgctccaagctgggctgtgtgcacgaaccccccgttcagcccgaccgctgcgccttatccggtaactatcgtcttgagtccaacccggtaagacacgacttatcgccactggcagcagccactggtaacaggattagcagagcgaggtatgtaggcggtgctacagagttcttgaagtggtgggctaactacggctacactagaagaacagtatttggtatctgcgctctgctgaagccagttaccttcggaaaaagagttggtagctcttgatccggcaaacaaaccaccgctggtagcggtggtttttttgtttgcaagcagcagattacgcgcagaaaaaaaggatctcaagaagatcctttgatcttttctacggggtctgacgctcagtggaacgacgcgcgcgtaactcacgttaagggattttggtcatgagcttgcgccgtcccgtcaagtcagcgtaatgctctgctttt

SEQ ID NO: 110167 - DNA, 330 bp, Artificial Sequence
  derived and/or modified sequence
atggctctgtggatgcgcctgctgccgcttctggccctgttggcgctctggggtcctgacccagccgctgcattcgttaatcaacacttgtgcggatcgcacctcgtcgaggcactgtacctggtgtgcggtgaacgcggctttttctacactccaaaaactcgccgtgaagccgaggatctgcaggtgggccaggtggagctgggagggggacccggcgcaggctctcttcaaccgctggctctcgaaggatcgttgcagaagcggggaattgtcgagcagtgttgcacctcaatctgcagcctttaccagctggagaactactgcggt

SEQ ID NO: 110168 - DNA, 330 bp, Artificial Sequence
  derived and/or modified sequence
atggcactgtggatgcgccttttgccgttgctggcccttctggctctgtggggtcctgaccccgcagccgcttttgtcaatcagcatttgtgtggatcccacctggtggaagcgttgtacctggtctgtggagagagaggattcttttacactcctaagactcggcgtgaggcggaagatctgcaagtgggacaagtggagctggggggtggccctggagccggaagcctccagccgcttgcgctcgaaggctcgctccagaaaagaggcattgtggaacaatgctgtaccagcatctgctctctctatcagcttgaaaactactgcgga

SEQ ID NO: 110169 - DNA, 330 bp, Artificial Sequence
  derived and/or modified sequence
atggcactttggatgagactgcttcctctcctcgctctcctggccctgtggggaccggacccagcggccgcctttgtgaatcagcacttgtgcggaagccacctcgtggaagccctctatctggtgtgcggcgagagaggatttttctacaccccaaagacccgccgagaagcggaggacctgcaagtgggacaggtggagctggggggcggacccggagcgggcagcctccaaccgctggctctcgaggggtccttgcagaaacgtggaattgtggaacaatgttgcacctcgatctgcagcctgtaccagctcgaaaactactgtgga

SEQ ID NO: 110170 - DNA, 330 bp, Artificial Sequence
  derived and/or modified sequence
atggctctatggatgcgacttctccctttgttagcactactcgccctctggggtccggatcccgcggcagccttcgttaaccaacacctttgtggcagtcatctggttgaagccctctaccttgtttgtggggaacgcggcttcttctacactcccaagacccgaagagaggcagaggacttacaggttgggcaagtagagttgggtggtgggcccggcgcaggttcactgcagcctctcgccttagagggctccctgcaaaagagaggaatagtagagcaatgttgtacctcaatctgctcactctatcagctggagaattattgtgga

SEQ ID NO: 110171 - DNA, 330 bp, Artificial Sequence
  derived and/or modified sequence
atggctctgtggatgcggctgctgcctctcctggcactgctcgccctttggggccctgaccctgctgcagctttcgtcaatcagcatctctgcggctcgcacctggtggaggccttgtacctcgtctgtggagagagaggattcttctacacccccaaaactaggcgcgaggctgaagatctccaggtggggcaggtggagctgggcggtggaccgggtgccgggtccttgcagccactggcactggagggctcgctgcaaaagcgcggtatcgtggaacaatgctgcacttcgatctgcagcctgtaccaactggaaaactactgtggc

SEQ ID NO: 110172 - DNA, 330 bp, Artificial Sequence
  derived and/or modified sequence
atggcactgtggatgcgcctgctccctctgctcgccctgctcgcattgtggggtcctgatcctgctgcagcgttcgtgaatcagcatctctgcggatcccacctggtcgaagcgctttacttggtttgtggagaacgtggctttttctacactccaaagaccaggagagaagccgaggatttgcaagtggggcaggtggagcttggtggagggccgggtgcagggagccttcaaccgcttgctcttgagggatcgcttcaaaagcgcggcattgtcgaacaatgctgtacttcaatctgttcgctctatcaactggagaactactgtggg

SEQ ID NO: 110173 - DNA, 330 bp, Artificial Sequence
  derived and/or modified sequence
atggcgctctggatgcggttactccccctattggccttgctggccctttggggtcctgaccctgccgccgccttcgttaaccagcacctttgcgggtcacacctggtggaggcactttatcttgtctgtggcgaacgaggttttttttacaccccaaagacgcgccgggaggcagaggatctccaggtcggtcaggtggagctcggcggcggacccggcgcaggcagcctgcagccactcgctttggaggggtccctgcagaagcggggcatcgttgagcagtgctgtacctctatttgcagtttgtatcagcttgaaaattattgtggt

SEQ ID NO: 110174 - DNA, 330 bp, Artificial Sequence
  derived and/or modified sequence
atggcgctgtggatgcgcttgctgccgctcctcgccctgttggcactgtggggaccggacccggccgcagcgttcgtgaaccagcatctctgtggatcccatctggtggaggccctgtacctcgtctgcggtgagcgcggtttcttttacaccccgaagactcgccgggaggcagaagatctccaggtcggtcaagtggagctgggaggaggaccgggggccggatcgctccaaccccttgcactcgaaggctcactccaaaagcgagggatcgtggagcagtgttgcacctcaatctgcagcctgtaccaactcgagaattactgtgga

SEQ ID NO: 110175 - DNA, 330 bp, Artificial Sequence
  derived and/or modified sequence
atggctctttggatgcgcctcctgcctcttttggcattgctggctttatggggacctgaccccgcagctgcattcgttaatcaacacctgtgtgggtcacatctcgtagaagccctgtaccttgtttgcggggagcggggttttttttatacccccaagactcgccgcgaagccgaggatttacaggtgggccaggtagagttgggaggtggacccggggccggaagcttacagcccttagctctggagggttccctgcaaaaaagaggtatcgtcgaacaatgttgcacatcaatttgctccctttatcagctggagaattactgtggg

SEQ ID NO: 110176 - DNA, 330 bp, Artificial Sequence
  derived and/or modified sequence
atggcactttggatgcgcctgcttcctttgctggcccttctggcattgtggggacccgaccctgcagccgcatttgtgaatcagcatctctgtggatcacatcttgtggaggcgctgtacctggtgtgtggggagcggggcttcttttacacccctaagactcgtcgagaagccgaagatctccaggttggccaagtcgagcttggtggcggccctggcgcggggagccttcagccgttggcgctggaggggtcgcttcaaaagcggggaatagtggaacaatgctgcacctctatctgttccctgtaccaattggagaactattgtgga

SEQ ID NO: 110177 - DNA, 330 bp, Artificial Sequence
  derived and/or modified sequence
atggcgctctggatgaggctactgcccctgctcgctctgttagcgctctggggaccagatcctgcagccgcattcgtgaaccaacacttatgcgggtcacacctcgtagaggccctgtatttggtctgtggcgagcgtggatttttttatacccctaagactcgtcgtgaagcggaagatttgcaggtcggacaggtcgagctgggcggtgggcctggcgctgggagtctgcagcctctcgcccttgaagggtctttgcagaagcgcggcatcgtcgagcagtgctgtacatctatctgctccctttatcaactcgagaactattgtggg

SEQ ID NO: 110178 - DNA, 330 bp, Artificial Sequence
  derived and/or modified sequence
atggccttgtggatgaggctgcttccactgctagcgctgctcgctctctggggtcctgatccagctgccgcctttgttaaccagcacctgtgtgggtcacatttggtcgaagctctgtatctggtttgtggggagcgtggtttcttttatactcccaagacacgcagggaggccgaggacctgcaagtgggtcaggtggaactcggaggagggcctggtgccgggagcctccagcccttggcgcttgagggttcccttcagaaacgggggattgtggagcagtgctgtacctctatttgcagtctgtatcagctggagaattattgcggg

SEQ ID NO: 110179 - DNA, 330 bp, Artificial Sequence
  derived and/or modified sequence
atggcactttggatgagactcttgccactccttgccctccttgcactctggggccctgatcctgcagcagcctttgtcaaccaacatctgtgtgggtcgcatctggtcgaggccctgtaccttgtgtgtggagaaagaggctttttctacactcctaaaactcggcgcgaggcagaggacctccaggtgggccaagtcgagctgggaggaggcccgggagctgggagccttcagccacttgcattggagggtagcctgcaaaagcgcgggatcgtggagcagtgctgtacctcgatatgctctctgtaccagctggaaaactactgtgga

SEQ ID NO: 110180 - DNA, 330 bp, Artificial Sequence
  derived and/or modified sequence
atggctttatggatgcgcctcttgccccttctggctctgctggccctgtgggggcccgatcctgctgccgcttttgtcaatcagcatctctgcggctcgcacctagtggaggcgctgtaccttgtttgcggagaacgaggtttcttctataccccaaagactaggcgggaggcagaggacttgcaagtcggccaggtcgaactgggaggcggcccaggagctgggtccttgcagccactcgcactcgaaggaagtcttcaaaagagaggcatcgtggaacaatgttgcacttccatttgcagtttgtatcagctggaaaactactgcggc

SEQ ID NO: 110181 - DNA, 330 bp, Artificial Sequence
  derived and/or modified sequence
atggccctctggatgcgccttctgcccctgctggccctgttggccctgtggggcccggaccccgccgcagcatttgtgaaccagcatctgtgtggctcacaccttgtcgaggcactgtacttagtttgcggagagagaggtttcttctacacccccaagactcggcgggaagcggaggacctacaggtgggacaggtagagctaggagggggtcccggcgctggaagtctccagcccctggccctggagggatctctccagaaacgggggatcgtggaacagtgttgtaccagtatttgcagtttgtaccaattggagaattactgtggc

SEQ ID NO: 110182 - DNA, 330 bp, Artificial Sequence
  derived and/or modified sequence
atggctttgtggatgcggctcctgccgctcctcgcactcctcgcgctgtgggggccagatcctgccgcggcatttgtcaaccagcatctctgcgggtcgcaccttgtggaagctctgtacctggtgtgcggggagcggggcttcttctacaccccgaaaacccgccgggaagcagaagatctgcaagtgggccaggtggagctcggaggaggacctggtgccgggtcacttcaaccgctcgccctggagggttcccttcagaagagaggtattgtggaacagtgctgtacttcgatttgcagcctgtaccagctggaaaactactgcgga

SEQ ID NO: 110183 - DNA, 330 bp, Artificial Sequence
  derived and/or modified sequence
atggccctctggatgcgactccttccgctgctggctttgcttgcactctggggaccggacccggcagccgctttcgtgaaccaacatctgtgtggatcgcacctggtggaagccctttacttggtgtgcggcgaaaggggttttttctacacccctaagactcggcgcgaggcggaggatctgcaagtcggtcaggtggagttgggcggcggccctggtgctggatcgctccagccactggcactggaaggaagccttcagaaacgcggaatcgtggaacaatgctgcacgtctatctgctctctgtaccagctggagaattactgtggg

SEQ ID NO: 110184 - DNA, 330 bp, Artificial Sequence
  derived and/or modified sequence
atggctctgtggatgcgccttctgccactgctcgccctgctggccttgtgggggccggacccggcggcggccttcgtgaaccaacacctgtgtggatcgcatctggtggaagctctctacctggtgtgtggagaacggggattcttttacactcctaaaacccgccgagaggccgaggatctgcaagtcggacaggtagagctgggaggcggtcctggcgcgggatcgctgcagccgctggctctggaaggaagtctccagaagagaggaatcgtcgaacagtgctgcaccagcatctgctcactctaccaactcgagaattactgtggc

SEQ ID NO: 110185 - DNA, 330 bp, Artificial Sequence
  derived and/or modified sequence
atggccctctggatgagacttctcccacttctcgcactcctcgcactttggggtcctgacccagcagcagcctttgtgaatcaacacctttgtggatcacatctggtggaggcgctctatctggtctgtggtgaaaggggttttttctacacccctaagacccgtagggaagctgaggacctccaggtgggccaagtggagctcggagggggacctggagcaggtagcttgcagcctctggcactcgaaggatcactgcagaaaagaggaatagtggagcaatgctgtacttccatctgcagcctttaccaactcgaaaactactgcggg

SEQ ID NO: 110186 - DNA, 330 bp, Artificial Sequence
  derived and/or modified sequence
atggcactgtggatgagactgctgccgctgctggccctgctggctctgtggggaccggaccctgccgccgctttcgtgaatcagcacttgtgcggatcgcatctggttgaagcgctctacctggtctgcggagaaagagggttcttctacaccccaaagacgcggcgggaagctgaggacctgcaagtgggacaggtggagctcgggggaggacctggagcgggaagcctccaaccgctggctcttgagggatcgctccaaaagaggggtattgtggaacagtgttgcacttcgatctgctcgctctaccaactcgagaactattgcgga

SEQ ID NO: 110187 - DNA, 330 bp, Artificial Sequence
  derived and/or modified sequence
atggcactctggatgcgattgcttcctttactggcgttattagcactatggggcccagacccagccgccgccttcgtcaaccaacacctgtgcggctcacatcttgtcgaggccctatatcttgtgtgtggggaacgaggctttttctatacaccgaagacacgaagagaagccgaagacctgcaggtgggccaggttgagcttggaggtggcccaggggcaggaagtctccagcccctggcactcgaaggcagcttgcagaagcgaggaatcgtcgaacagtgttgtactagcatatgttccctgtaccaactagagaactattgtggc

SEQ ID NO: 110188 - DNA, 330 bp, Artificial Sequence
  derived and/or modified sequence
atggcactctggatgcgtctattgcctttgttggccctgctggcactgtggggccccgatcccgcagcggccttcgtgaaccagcacctgtgcgggagccacctggtcgaagccttatacctcgtgtgtggagaaagaggatttttttacacgccaaagacccggcgcgaggcagaggacctacaagtcggacaggtggaactgggaggtggcccgggcgcaggtagcctccagcccctggcactggaggggagcctgcagaagcgcgggatagtggagcagtgttgcacatcaatatgtagcctgtaccagctcgagaattactgtgga

SEQ ID NO: 110189 - DNA, 330 bp, Artificial Sequence
  derived and/or modified sequence
atggcactctggatgaggctgctaccacttctggccctcctggccttgtggggccccgatccggcggccgcttttgtcaaccaacatttgtgcggtagtcatctggtggaagctctctatttggtgtgcggcgagcgagggtttttctataccccgaagacacgacgcgaagcagaggaccttcaggtgggtcaggttgagctggggggaggacccggcgctggcagcctgcagcctctagcgctcgaaggcagcctccaaaagcgcggaatcgtagagcagtgctgcacatcgatctgctccttgtatcaattggaaaactactgtgga

SEQ ID NO: 110190 - DNA, 330 bp, Artificial Sequence
  derived and/or modified sequence
atggctctttggatgcgcctccttcctctgctggccttgctggcactgtggggtcccgaccctgcagctgcgttcgtgaatcaacacctgtgcggatcccatttggtggaggccctctacctggtttgcggagaaaggggttttttctacaccccaaagaccagacgagaggccgaagatctccaggtgggacaggtagaactcggcgggggaccgggggcgggatcgcttcagccactggctctggaaggctctttgcagaaaaggggcattgtcgagcagtgttgtactagcatctgctcattgtaccaactcgagaactattgcgga

SEQ ID NO: 110191 - DNA, 330 bp, Artificial Sequence
  derived and/or modified sequence
atggccctttggatgagattgttaccacttcttgcacttctagcattatggggtcctgacccagcagcagctttcgtcaatcaacatctctgcggaagtcacttggtggaagccctctacctcgtctgtggagaacggggatttttttatacccccaaaacacgcagggaggctgaagatctgcaggtgggccaggtggagcttggaggagggcctggtgccggctcccttcaacctttggctctagagggcagtttgcaaaaaaggggaatagtcgagcaatgttgtacctcaatttgttccctctatcagctcgaaaattattgcggc

SEQ ID NO: 110192 - DNA, 330 bp, Artificial Sequence
  derived and/or modified sequence
atggccttgtggatgcggctgcttcctttgctggcactcctggcgctgtgggggccagacccggccgcggcgttcgtgaaccagcatctttgtggctcccacctcgtcgaagcgttgtacctggtgtgcggagaacgcggattcttctacaccccgaaaacgaggagagaagcagaagatctgcaagtgggacaggtggaactgggtggaggacctggggccggatcgctgcagccgctggcgctcgagggttcgctccagaagcgcggaatcgtggaacagtgctgcacttctatctgctccctctaccagctggagaattactgtgga

SEQ ID NO: 110193 - DNA, 330 bp, Artificial Sequence
  derived and/or modified sequence
atggccctctggatgaggctccttcctttgctcgctctcctcgcactgtggggccctgatccagcagccgccttcgttaaccaacatctgtgtgggtcacatcttgtggaggccctttaccttgtgtgtggagaaagagggtttttctatacccctaagactagaagagaggcagaagatctgcaagttggtcaggtggaactgggcggcggacctggcgcaggttcgctgcagccacttgcgcttgaggggtccctgcagaagcgcggtatcgtcgaacaatgctgtacttcgatttgttcattgtaccagctcgaaaactactgcggt

SEQ ID NO: 110194 - DNA, 330 bp, Artificial Sequence
  derived and/or modified sequence
atggcactttggatgcggttgctgcctctgctggcactcttggcactttggggcccggaccctgcagccgccttcgtgaaccaacacctgtgcgggtcacatctcgtcgaggcactttacctcgtgtgtggagagcgcggattcttttacacccccaagaccaggcgtgaggccgaagatcttcaagtgggtcaagtggaactgggaggaggaccaggggcgggatcgcttcaaccccttgctcttgaaggatcgctccagaaaagagggatagtggaacagtgctgtacctcgatttgttcactttaccaacttgaaaactactgcgga

SEQ ID NO: 110195 - DNA, 330 bp, Artificial Sequence
  derived and/or modified sequence
atggccctgtggatgcgactcctgccgctcttggcccttcttgcactgtggggaccggaccctgcggcggctttcgtgaatcagcatctgtgcggatcgcaccttgttgaggccttgtacctggtgtgcggagagagaggttttttctacactcccaaaaccaggcgcgaagctgaggatctccaagtaggccaggtcgaattgggaggaggcccaggagcaggttcgctgcaacctttggccctggaaggatcactccaaaagcggggtatcgtagagcagtgttgcacgagcatctgctccctctaccagctcgaaaactattgtggg

SEQ ID NO: 110196 - DNA, 330 bp, Artificial Sequence
  derived and/or modified sequence
atggccttatggatgcggctgctgccgcttctcgcacttctggcactctggggcccagatcctgctgcagcttttgtgaaccagcacctttgtgggagccacctcgtggaggctctatacctggtctgtggggaacgcgggttcttctacacccccaagacaaggcgcgaagcagaggacctccaggtcggccaggtggagcttggcggcggcccgggtgcaggtagcctccagccccttgctctagaaggcagcctgcaaaagaggggcatcgttgagcagtgttgcaccagtatctgttctttgtatcaactggaaaattattgcggc

SEQ ID NO: 110197 - DNA, 330 bp, Artificial Sequence
  derived and/or modified sequence
atggcattgtggatgagacttcttccacttcttgcgctgctggcactctggggaccagatcccgcagcggcctttgtcaaccagcacctgtgtgggtcacacctcgtggaagcactgtaccttgtgtgtggagaacgcggcttcttttacacgcccaagactcgtcgagaagcagaagatcttcaggtgggccaggtggagctgggaggtggacctggagccggtagccttcaacccttggcgcttgagggttcacttcaaaagagaggaattgttgaacagtgttgtacttcgatctgttccctgtaccagctggagaattactgtggt

SEQ ID NO: 110198 - DNA, 330 bp, Artificial Sequence
  derived and/or modified sequence
atggcactctggatgaggctgttaccgttgcttgcgctgctcgcactttggggaccagacccagccgccgcctttgtgaaccagcacctttgcgggtcccacttagtagaggccttgtatttagtgtgcggagagcgcggttttttctataccccaaagacaagacgggaggccgaggacttacaggtcggacaggttgagcttggcggtgggcctggggctgggtcgctgcagcccttagcattggaaggttctttgcagaagcgggggatcgttgaacagtgctgtaccagtatttgcagcctctatcagcttgagaactactgtggt

SEQ ID NO: 110199 - DNA, 330 bp, Artificial Sequence
  derived and/or modified sequence
atggcactttggatgaggctgctgcctctcttggcccttttggccctctgggggcccgaccctgctgcagcctttgtgaatcagcacctgtgcggctcacacctcgttgaggctctctatctcgtctgcggagagcgcggatttttctacacacctaagactcggcgtgaggctgaagaccttcaagtgggtcaagtggagctgggtggggggccaggtgccgggtccctgcagcccctcgccttagagggctccctgcagaagcggggcattgtcgaacagtgttgtacttccatttgcagtctttatcaactcgaaaactactgcggt

SEQ ID NO: 110200 - DNA, 330 bp, Artificial Sequence
  derived and/or modified sequence
atggcgctgtggatgcggcttctgcccctgctggcgctcctggcgctctggggacccgacccagccgccgccttcgtgaaccagcatttatgtgggagtcacctggttgaagcactgtacctggtctgcggcgagcgaggcttcttttacacacccaagacgcgtagagaggcagaggatctccaagttggtcaggtggagctggggggtgggcccggagccggttccctacagcctttggccctagagggatcactgcagaaaagaggcattgtcgaacagtgctgcaccagcatatgttctctctatcaactagagaattattgtgga

SEQ ID NO: 110201 - DNA, 330 bp, Artificial Sequence
  derived and/or modified sequence
atggccctgtggatgagactgcttccactgttggcgcttctagcactatgggggccagatcccgccgctgccttcgttaaccagcacctctgcggatctcacctagtagaagccctatacctcgtgtgtggggaacgcgggttcttctatactccaaaaacacggcgtgaggccgaagatctccaggttgggcaggttgaactgggaggagggcctggggctgggtcacttcagccacttgctcttgaagggtctctacagaagaggggaattgtggagcagtgttgtacttcaatatgttccctttaccagctggagaactactgtggg

SEQ ID NO: 110202 - DNA, 330 bp, Artificial Sequence
  derived and/or modified sequence
atggccctatggatgcgattgctcccactactagccctcctcgctttgtggggtcctgatccagcggcagcgtttgtcaaccagcacctctgcggaagtcaccttgtggaggcactctatcttgtatgtggtgagcgtggattcttctacacgccgaagacccgtcgcgaggccgaggaccttcaggtaggccaggttgagctgggcgggggacctggggctggatccctacaaccgttggccctagaaggctcgttacagaaacgcggtatcgtcgaacagtgctgcacgtctatctgtagtttgtatcaactcgagaattactgcggc

SEQ ID NO: 110203 - DNA, 330 bp, Artificial Sequence
  derived and/or modified sequence
atggcactctggatgcggctgctcccgctgctggcgctgttggcgctctggggccctgatcctgccgccgcttttgtcaaccagcacttatgtgggagtcaccttgtggaagccttatatctagtgtgcggagagcgcgggttcttctacactccaaaaacgcgccgggaagccgaagatctccaggtcggacaggtggaactaggtggcggccctggcgcaggatctcttcagcctctcgccctggaggggtcacttcagaagcggggtatcgtggaacagtgttgtaccagcatttgcagcctgtaccagctggagaactattgtggc

SEQ ID NO: 110204 - DNA, 330 bp, Artificial Sequence
  derived and/or modified sequence
atggcgctgtggatgcgccttctgccactgttggcactgctggcgctttgggggccagaccctgcagcagccttcgtgaaccaacacctgtgcggtagccatctggtcgaggcgctctaccttgtctgcggagagcgcggatttttctacaccccgaaaacccggagggaggctgaagatctgcaagtgggacaggtcgagctggggggaggtccaggggctggatcgctccagcctcttgcccttgagggatcgcttcagaagcggggcatcgtggaacagtgttgtacctcaatttgtagcctctaccaactggaaaactactgtgga

SEQ ID NO: 110205 - DNA, 330 bp, Artificial Sequence
  derived and/or modified sequence
atggctctgtggatgcggctccttccccttcttgccttgttggccctttggggaccggatcctgcagccgcttttgtgaatcaacacctttgtggaagtcatctggtcgaagcactttaccttgtttgcggggagagaggattcttttacaccccaaagacgcgtcgcgaagccgaggacctgcaagtgggccaggtcgaactggggggcggacccggtgcaggtagcctgcaacctcttgcattggaaggatcgttgcagaaaagagggattgtcgaacagtgttgcacctcaatctgttcgttgtatcaactcgaaaactactgcggc

SEQ ID NO: 110206 - DNA, 330 bp, Artificial Sequence
  derived and/or modified sequence
atggctttgtggatgcggttgcttccccttctggcccttctggccctctggggtccggatcccgctgccgcattcgtcaaccagcatttgtgcggatcacacttggttgaggccctgtatcttgtttgtggcgaaaggggatttttctacaccccaaagaccaggagagaagcagaagacctccaggtgggacaggtcgaactcggaggggggcccggagccggaagtctgcagcccttagccttggaaggcagtctccagaaaagaggcatcgtggaacagtgttgtacctccatctgcagcctgtatcagcttgagaactactgtggg

SEQ ID NO: 110207 - DNA, 330 bp, Artificial Sequence
  derived and/or modified sequence
atggcgctctggatgcgcctgcttccgcttctggccctgctggctctctggggaccggatcctgcggccgctttcgtgaatcaacacctctgtggctcgcatctcgttgaagcactgtacctggtgtgcggagagcggggattcttctacacccctaagactcggcgcgaagccgaggatctgcaagtcggacaggtggaattgggaggtggtcccggcgccggctcccttcagccgctggcgttggagggatctctccaaaagagagggatcgtggaacaatgctgtacctcgatctgctcactttaccagctggaaaactactgcggc

SEQ ID NO: 110208 - DNA, 330 bp, Artificial Sequence
  derived and/or modified sequence
atggcactttggatgagactccttcctctgctggcacttctggcgctgtggggtccagaccctgccgcagcatttgtgaaccaacatttgtgtggctcccatttggtcgaagccttgtacctggtctgtggcgaacgcggttttttctacacccctaagacccggcgtgaagcagaggatctgcaagtgggacaggtggaactgggtggagggcctggtgcaggttccctgcaaccacttgctctggagggatcgctgcagaaaaggggaatagtggagcagtgttgcacttcgatatgctcactctaccaactggaaaactattgcggg

SEQ ID NO: 110209 - DNA, 330 bp, Artificial Sequence
  derived and/or modified sequence
atggcactgtggatgcggctgcttccacttcttgctctgttggcgctgtggggacctgaccctgcagcagcctttgtgaaccagcatctgtgcggaagccatctcgtggaagcactctacctggtgtgtggcgaacggggattcttctacacccctaaaactagacgcgaagccgaggacctgcaggtgggccaagtggagctgggcggcggaccaggagcaggatccttgcaaccacttgccctggagggatcgcttcaaaagaggggtatcgtggaacagtgttgtacttccatttgtagcctttaccagctggagaactactgcgga

SEQ ID NO: 110210 - DNA, 330 bp, Artificial Sequence
  derived and/or modified sequence
atggcactctggatgcgcctcctccctctgctggccctgctggcactctggggccccgatcctgccgccgcattcgtgaaccagcacctgtgcggctcccatttggtagaagccctgtatcttgtctgtggcgagcgtggtttcttctacactccaaaaacacgtagggaagccgaagacctccaggttggccaagtggagctcggcggcggccccggcgctggaagtctccaacccctcgctcttgaaggaagtctgcagaagagaggcatcgtggagcagtgctgcacctccatttgttcactttaccagctggagaactactgtgga

SEQ ID NO: 110211 - DNA, 330 bp, Artificial Sequence
  derived and/or modified sequence
atggctctgtggatgaggctccttcctctcctggcattattagcattatggggcccggatcctgcggcggcatttgtcaaccagcacttatgcgggtcccacttggttgaagccctctatcttgtctgcggcgaacggggctttttctatacgccgaaaactagaagagaagccgaagatttacaggttggtcaagttgagcttggaggtggacctggcgcaggctctttacaaccgctggccctggagggaagtctgcaaaagcgcggcatcgtggaacagtgttgtacgtctatctgttctctctatcagctggaaaactattgcggc

SEQ ID NO: 110212 - DNA, 330 bp, Artificial Sequence
  derived and/or modified sequence
atggccttatggatgagactactgcctctgttagctttgcttgctctttgggggcctgaccccgctgccgccttcgttaatcagcacttgtgcggttctcacttggtggaggctctgtacctagtatgcggtgaaagaggtttcttctatacaccgaaaacccgcagagaagccgaggatttgcaggtcggccaggtcgaattaggaggaggcccaggcgctggtagtctccaacctctagcccttgaaggatccctgcagaagcggggcatagttgaacagtgctgtacttccatttgttccctctaccagctggaaaactattgtggc

SEQ ID NO: 110213 - DNA, 330 bp, Artificial Sequence
  derived and/or modified sequence
atggccctctggatgcgccttctgcctctgctggccctcctggcactttggggtccagatcctgcggctgcatttgtgaaccagcacctgtgtgggtcccatctggtagaggcactctatctggtgtgtggcgaaagagggttcttctatactcccaaaacacgccgagaagctgaagacctccaggttggacaagttgaactgggaggagggcccggtgccggatccctccagcccctggcattggagggaagcttgcagaagcggggaatcgttgagcagtgctgtacttcaatctgctcactctaccagctcgagaattattgcgga

SEQ ID NO: 110214 - DNA, 330 bp, Artificial Sequence
  derived and/or modified sequence
atggcactgtggatgagactgctgcctcttctggcactgcttgcactctgggggccggatccagcagccgcttttgtgaaccagcacctgtgtggctcccatcttgtggaggcactttacctggtgtgtggggagagaggctttttctatactccaaaaacccggagagaagcagaggatctccaagtgggtcaagtggagctcggaggaggacctggtgctggatcactccaacccctggctctggagggtagcttgcaaaagagaggaattgtggaacagtgttgcacttcaatttgttccctctaccagcttgagaattactgcggt

SEQ ID NO: 110215 - DNA, 330 bp, Artificial Sequence
  derived and/or modified sequence
atggcattgtggatgcgtctgctccctcttctggcgcttcttgctctctggggtcctgatcctgccgccgcgtttgtaaatcaacacctgtgtggatcccatcttgtggaagccttgtacctcgtctgtggcgagaggggtttcttttacacgcctaaaactagacgggaagcagaggacctgcaggtgggacaggtcgaactgggcggcgggcccggagcagggtcacttcagccgctggcacttgagggatcgctccaaaagcggggaattgtcgaacagtgctgcacctcgatctgctcattgtaccaactggagaactactgtgga

SEQ ID NO: 110216 - DNA, 330 bp, Artificial Sequence
  derived and/or modified sequence
atggcactgtggatgcgcctgcttcctcttctggcgctgctcgcactctggggaccagatcctgcggccgcctttgttaatcagcatctttgtggttcacacctcgtggaggcactctatctggtgtgcggcgagcgcgggtttttctacacccctaagactcgcagggaagcagaggacctgcaagtgggccaagttgaacttggcggaggtcccggagcaggatctctgcaaccactggcccttgaaggaagccttcagaaacgtggaatagtggaacagtgttgtacgtcgatttgctcgctctaccaattggagaattactgcggt

SEQ ID NO: 110217 - DNA, 330 bp, Artificial Sequence
  derived and/or modified sequence
atggcactgtggatgagactcctgcctctgcttgcattgctcgccctttgggggccggatcctgcagcagctttcgtcaaccagcacctttgcggcagccatttggttgaagctctctacttggtttgcggggagcgcggttttttttatacacccaagacccgaagggaggccgaggatctgcaagttggccaggtggaattggggggcggccctggggctgggtccctccagccattggctctggaaggtagcttgcagaagaggggcatagtggagcagtgttgtacatctatctgctctctgtaccagctggagaactactgtggt

SEQ ID NO: 110218 - DNA, 330 bp, Artificial Sequence
  derived and/or modified sequence
atggcgttatggatgcgactcttgccactcctcgcgttgctggcgctttggggccccgaccctgctgcagcgttcgttaaccagcacctgtgcggtagtcacctggtggaggccctatacctggtgtgtggagagaggggcttcttctacactcccaaaaccaggcgggaggctgaggatttgcaggtgggccaggtggagctgggaggaggtccaggagcaggctctcttcagcctttagcactggagggcagtctgcagaaaagaggtatagtcgagcagtgctgcacgagcatttgctcactctatcagttagagaattactgtggc

SEQ ID NO: 110219 - DNA, 330 bp, Artificial Sequence
  derived and/or modified sequence
atggcactgtggatgcgattgctgccactcctggctctgctggccttgtgggggccggaccccgcagccgcttttgtcaaccaacacctgtgtggatcacatctggtggaagccctatatctagtatgtggcgaacgcggattcttttacacaccaaaaactcgtagagaggccgaagatctgcaggtcggccaggtggagcttggaggagggcccggagccggctccctccagccattagccctcgaaggctcactccagaagcgagggatcgttgagcagtgttgcaccagcatctgctccctgtaccagctggagaactactgtggg

SEQ ID NO: 110220 - DNA, 330 bp, Artificial Sequence
  derived and/or modified sequence
atggcactgtggatgagactgttgccactacttgctctcctggctctgtgggggcccgatcctgcagccgccttcgtcaaccagcacttatgcggatcgcacctggtggaagccctgtacttagtgtgtggggaaaggggctttttctacacacctaaaacaagaagggaagcggaagacctgcaggtcggccaggtggagctcggtggtgggcccggggccgggagtcttcagcccttggcactggagggatccctacagaaaagagggatcgtggagcagtgttgtacttcaatttgcagtctttaccagcttgagaattattgtggc

SEQ ID NO: 110221 - DNA, 330 bp, Artificial Sequence
  derived and/or modified sequence
atggccctgtggatgcggctactgcccttattagcccttctggcactgtgggggccagatccagccgccgccttcgtgaatcagcacctctgtggaagtcatctggtagaggcactctatttggtatgcggggaacggggattcttctacaccccaaagacccggagggaggccgaggacctgcaagtaggccaggtggagctgggtggtgggccaggggccggatcactgcagcccctcgcgttagagggcagtctccagaaacgcggtatcgtcgagcaatgttgtacctcaatctgcagtctctatcaacttgagaactattgcggc

SEQ ID NO: 110222 - DNA, 330 bp, Artificial Sequence
  derived and/or modified sequence
atggcactgtggatgcggttgctcccgctgctggccctgctcgcactgtggggcccagacccggctgctgcatttgttaatcaacatctgtgcggctctcatctagtcgaggcactgtacttggtgtgcggtgagcgcggttttttctatacgcctaaaacccgccgcgaggccgaagacctgcaggtgggtcaggtagagcttggcggtggtccaggggctggttcactgcaaccactcgccctcgaaggcagcctccagaagcgcggcattgtggagcagtgttgtacgtctatctgtagcctgtaccagctggaaaattactgcggt

SEQ ID NO: 110223 - DNA, 330 bp, Artificial Sequence
  derived and/or modified sequence
atggcactttggatgcgattgctcccactgctcgccctcctggccctttggggccccgaccccgctgccgcattcgtgaatcaacacctctgcgggagccatctagtggaagcactttacttagtgtgcggggagaggggcttcttttacacccccaagaccagaagagaggcagaggatctgcaggtcggacaagtcgaactgggcggcggcccgggtgctggctccctccagcctcttgccctcgagggaagtttgcagaagagaggcatcgtcgagcagtgttgcacatccatttgttctctctaccagctggaaaactattgcgga

SEQ ID NO: 110224 - DNA, 330 bp, Artificial Sequence
  derived and/or modified sequence
atggcactgtggatgagacttctcccattgctcgcgctattagcattatggggaccagatccagcagctgcttttgtaaaccagcacctgtgcggtagtcatctagtcgaagctctctaccttgtttgtggagaaagaggcttcttctacacacccaagactcgacgcgaagccgaagatctgcaagtcgggcaagttgagcttgggggaggacccggagccggatccctgcagccgctcgctctggagggatctcttcaaaaacgtggaatcgttgaacaatgttgtacttcgatctgcagcctgtatcaactcgagaattattgtgga

SEQ ID NO: 110225 - DNA, 330 bp, Artificial Sequence
  derived and/or modified sequence
atggccctgtggatgcgattacttcccctgttggctctcctcgcgctctggggccctgacccggctgctgcattcgtgaaccagcatttgtgcggtagccatctggtagaagccctgtacctcgtctgcggtgagaggggatttttctacacgcccaaaacaaggcgggaagcggaagatctgcaggtcggtcaggttgaacttgggggaggcccaggggctggtagcttgcagcccttagccttggaggggtcactgcaaaaacgaggcatcgtcgagcagtgctgcactagtatctgctctctgtatcagctagaaaactattgcggg

SEQ ID NO: 110226 - DNA, 330 bp, Artificial Sequence
  derived and/or modified sequence
atggcactgtggatgcggctgctcccgttattggcccttctggcactttggggcccagaccctgcagccgcgtttgtcaatcagcacctttgtggatcacatctcgttgaggccctttatctcgtctgcggagaaagaggatttttctatacccctaagacgcgtcgtgaggccgaagacctacaggtcggtcaggtggaactgggaggcggaccaggtgcagggtccctgcagccgttagcgctggagggatctcttcaaaaaaggggtatcgttgaacagtgttgtactagtatttgctcgctgtaccagttggaaaattactgcggt

SEQ ID NO: 110227 - DNA, 330 bp, Artificial Sequence
  derived and/or modified sequence
atggccctctggatgcgactcttgccgctgctggccctgctcgcactttggggaccagatcctgctgcggcctttgtcaatcagcacctctgcgggtcccacctggtcgaagccttgtacctcgtgtgcggggagcgcggtttcttctacaccccaaagactcggcgggaagctgaagatctgcaggttggacaggtggaactgggaggagggccgggtgctgggagcctgcaaccgctcgccctggagggctcgctgcagaagcgcggaatcgtcgaacagtgttgcacctccatttgtagcctgtaccaactcgaaaactactgcggc

SEQ ID NO: 110228 - DNA, 330 bp, Artificial Sequence
  derived and/or modified sequence
atggcgttatggatgcgtttactaccgttattagcgttactagcgctatggggtccggatccggcggcggcgtttgtaaatcaacatttatgtggttcgcatttagtagaagcgctatatttagtatgtggtgaacgtggttttttttatacgccgaaaacgcgtcgagaagcggaagatttacaagtaggtcaagttgaattaggtggtggtccgggtgcgggttcgttacaaccgctagcgttagaaggttcgttacaaaaacgtggtatagtagaacaatgttgtacgtcgatatgttcgctatatcaactagaaaattattgtggt

SEQ ID NO: 110229 - DNA, 330 bp, Artificial Sequence
  derived and/or modified sequence
atggccttgtggatgaggttgttgccattgctggcgcttttggcattgtgggggcccgaccccgccgctgctttcgtcaaccagcatttgtgtggaagtcacctcgtcgaggcgctttacctggtgtgtggagaaagagggtttttttatacacctaaaactaggagggaagcagaggaccttcaagttggccaggtggagcttggcggaggccctggcgctggttctctccagcccctggctctggagggctccctgcagaaacggggaatcgtggaacagtgctgcacatcaatctgtagcctgtatcagctcgagaactactgcgga

SEQ ID NO: 110230 - DNA, 330 bp, Artificial Sequence
  derived and/or modified sequence
atggcattgtggatgcgactcctgccgctgctggcgcttctggcgctttggggccctgacccggctgctgccttcgtcaatcagcacctgtgcgggagccatctggtggaagctctctacctcgtttgcggagagcgcggctttttctacacccccaaaactcggcgcgaggcggaagatttgcaggtgggccaagtggaactggggggaggccctggcgcggggagtctccagccgttggcactcgagggatcgctgcagaagagaggaattgtcgagcaatgctgtacgagcatctgctccctttaccaactcgaaaactactgcggg

SEQ ID NO: 110231 - DNA, 330 bp, Artificial Sequence
  derived and/or modified sequence
atggcgctgtggatgcgactgcttcctttgctggcactgctcgccctgtggggccccgatccagctgctgcttttgtaaatcagcatttgtgtggctctcacttagtggaggctttgtacctggtttgtggagagcgcggcttcttttatacccccaagacgaggagggaggccgaggacttacaggtcggtcaggtggagttgggaggtggacctggggctggcagcctgcagccactggctcttgagggcagcctgcagaagaggggaatcgtggaacagtgctgtaccagcatttgctcgctgtatcagctggagaattactgcgga

SEQ ID NO: 110232 - DNA, 330 bp, Artificial Sequence
  derived and/or modified sequence
atggcactgtggatgaggctccttccgctccttgccctgctggccctttggggtccggatcccgcagcagcatttgtgaatcaacatctctgtggttcccacctcgtggaagcactttaccttgtgtgtggagaaagaggctttttctacacccctaagaccaggcgagaggcagaagatttgcaagtggggcaggtcgaactcggcgggggacctggggccggttcgctgcaaccattggcgctggaaggctcacttcaaaagcgcggaatagtggaacagtgttgtaccagcatctgttctctgtaccagcttgaaaactactgtgga

SEQ ID NO: 110233 - DNA, 330 bp, Artificial Sequence
  derived and/or modified sequence
atggccctgtggatgcgcctgctgccgctgctggcacttctggccttgtggggccctgaccctgccgcagcctttgtgaatcaacacctgtgcggaagtcatctagtggaagccttgtatttagtttgtggggagagaggcttcttctatacccctaagacgagaagggaggccgaagatctgcaggtgggacaggtcgaattaggggggggacctggcgccggaagtctccaaccccttgctctcgagggttcactccagaaacgaggtatcgtggagcaatgttgcacatccatatgctccctgtaccagctggagaactactgcggg

SEQ ID NO: 110234 - DNA, 330 bp, Artificial Sequence
  derived and/or modified sequence
atggcactttggatgcggctgctgcctctgcttgcgctcctcgccctgtggggccccgatccagcggctgcctttgtgaaccagcatctttgtggcagccacctggtcgaggcgctgtacctggtgtgcggagagcggggattcttctacaccccgaaaacccgtagggaggccgaggacctgcaggtgggacaggtcgaattggggggcggaccgggggcaggaagtctgcaaccgctggctcttgaaggctcgctgcaaaagcgcggcatcgttgaacagtgttgcacttccatctgctctctctatcagctcgaaaactactgcgga

SEQ ID NO: 110235 - DNA, 330 bp, Artificial Sequence
  derived and/or modified sequence
atggcgctttggatgcggctgctcccgctgttggctctcctggcactgtggggacctgatcctgccgcggcttttgtgaatcagcatctgtgcggatctcacctcgtcgaagcactgtacctggtctgcggagaacgcggcttcttctacaccccaaagactcgccgcgaggctgaggacctgcaagtggggcaagtcgagctcggaggaggccctggagcaggctcactgcagccgctcgccctggagggatcgcttcagaagcggggaatcgtcgagcagtgctgcacttcaatctgttcgctgtaccaactcgagaattactgtgga

SEQ ID NO: 110236 - DNA, 330 bp, Artificial Sequence
  derived and/or modified sequence
atggcactgtggatgcgactcctccctttgctggccctcctcgctctgtggggccccgacccagccgccgccttcgtgaatcagcatctgtgcggtagtcaccttgtggaggccttgtacctcgtgtgtggtgagcgcggcttcttctacacacccaagaccagacgtgaggcagaggatcttcaggtgggtcaggtcgagctgggtgggggcccgggtgctgggtctttgcaacccctggccctggagggttcactgcagaaacggggaattgtggagcagtgctgcacaagcatctgttccctgtaccagcttgaaaactactgcggc

SEQ ID NO: 110237 - DNA, 330 bp, Artificial Sequence
  derived and/or modified sequence
atggcgctctggatgcggcttctgcccttgctggccttgctagcgctttgggggccggacccggccgcagcattcgtcaaccagcatctctgcggctcccatctggtcgaggctctttacctcgtctgcggggaacgtggctttttctacactcctaagacccgccgcgaggccgaagatttgcaggtgggccaagtcgagctgggcggaggccccggtgcgggatcattacagccgcttgcgctggaggggtcgctccaaaagcgtggtattgtggagcagtgctgcaccagcatctgctccctctaccagctagaaaactactgcgga

SEQ ID NO: 110238 - DNA, 330 bp, Artificial Sequence
  derived and/or modified sequence
atggccttgtggatgcgcctcctccctttattagctctgctcgccctgtgggggccagatcccgcagctgctttcgtgaatcagcacctctgcgggtcccatctcgtggaagccctgtacctcgtgtgcggagaaagggggttcttttatacacccaaaactaggcgggaagccgaagatctccaggtaggacaggtcgaacttggaggaggaccaggagctgggtccctacagcctctagcccttgaaggatccctccagaaaagggggatagtggaacagtgttgtactagtatttgtagtctctatcagctcgaaaattactgcggg

SEQ ID NO: 110239 - DNA, 330 bp, Artificial Sequence
  derived and/or modified sequence
atggcactctggatgaggttgctcccgctccttgctttgcttgccctgtggggcccagatccagctgcggcttttgtgaaccagcacctgtgtggttcccatttggttgaggctctttacttggtctgtggagagagggggtttttctacactccaaaaactcgacgagaggccgaagacctccaggtgggacaggtggaactgggcgggggccctggggccggatctctccagcctctggcgctagagggcagtctgcagaaacgcgggatcgtggagcagtgctgcacttcaatttgctcactgtatcagctggagaactactgtggc

SEQ ID NO: 110240 - DNA, 330 bp, Artificial Sequence
  derived and/or modified sequence
atggcactttggatgcggctcttaccattgctggcgttgctggcattgtggggaccagaccccgcagctgctttcgtgaatcagcatctgtgtgggtcacatctggtcgaagctctgtacctcgtatgtggtgagcggggattcttttacacccccaaaaccagaagagaggccgaggacctacaggtgggtcaggtagaactggggggcgggcccggagcgggctcactccagcccctcgcgctcgaagggtcactgcagaagcggggaatcgtggagcagtgctgtacttctatatgttctctgtaccagctggaaaactattgtgga

SEQ ID NO: 110241 - DNA, 330 bp, Artificial Sequence
  derived and/or modified sequence
atggctctatggatgaggctgctgccactgctggccctcttggcattgtggggcccagaccctgcagccgcgttcgtaaaccagcatctctgcggtagccacctggtggaggccctgtaccttgtatgcggtgaacgaggttttttttacactccaaagacacgacgcgaagccgaggacctgcaggttggccaggtggaactgggcgggggccccggcgctgggtcactgcagcctttggccctcgaaggcagcctgcagaagcgcgggattgtggagcagtgttgtactagcatctgctccctttaccagctagagaactattgcggg

SEQ ID NO: 110242 - DNA, 330 bp, Artificial Sequence
  derived and/or modified sequence
atggccctttggatgcgcctgctgccgctgctcgcgctcctcgcactgtggggcccagacccggcggcagccttcgtcaaccaacatctttgcggaagccacctcgtggaagctctctacctggtctgcggggagcggggatttttctacaccccaaagaccaggagagaggccgaagatctgcaagtgggacaggtggaactcggcggtggccctggggccggatcgctgcagcccctggctttggaaggttcattgcagaaacgcggaatcgtggagcagtgctgtacttcgatctgttccctgtaccaactggagaattactgcgga

SEQ ID NO: 110243 - DNA, 330 bp, Artificial Sequence
  derived and/or modified sequence
atggccctatggatgcgcttactgccactacttgccctgttagcattatggggccccgacccggccgcagcctttgtcaaccagcacctgtgtggctctcacctggtggaggcactgtatctagtgtgcggagaacgaggatttttttatacccccaagacgcggcgcgaggcagaagacctccaagttggccaggtggaacttggaggtggaccgggggctggcagtctgcagccgttggccctggagggtagtcttcagaagcgtggtattgtggagcagtgctgcactagtatatgttctctgtatcaactagagaactactgcggg

SEQ ID NO: 110244 - DNA, 330 bp, Artificial Sequence
  derived and/or modified sequence
atggcactgtggatgcgactgctccccctcctggcattgttggccctatggggtccggacccagcggccgccttcgtgaaccagcacctgtgcgggagtcatctggttgaagctctttatctggtctgcggggagagaggatttttttacacacccaagacaagacgggaggcggaagatctccaagttggacaagtggagttgggagggggacccggggctggatcacttcagcccctcgcgctcgagggctctctgcagaagagaggaatcgtggagcaatgctgcactagcatctgctccctataccaactggagaactactgcggg

SEQ ID NO: 110245 - DNA, 330 bp, Artificial Sequence
  derived and/or modified sequence
atggcattgtggatgcgcctgctgcccctcctggcactgctggccctttggggaccagatccggcagccgcctttgtgaaccaacacctctgcgggtcacatctcgtggaagcactttacctcgtgtgcggagaacgcggattcttctacacgcctaagactagacgcgaggcagaggaccttcaagtgggtcaggtggagctgggtggcggaccaggagcggggtctttgcagccacttgccctcgagggatcgctgcagaaaagaggaatcgttgagcagtgctgcacctccatctgttccctgtaccagctcgagaattactgcggt

SEQ ID NO: 110246 - DNA, 330 bp, Artificial Sequence
  derived and/or modified sequence
atggcattatggatgagattattaccattattagctttattagcattatggggaccagatccagctgctgcttttgttaatcaacatctttgtggatcacatcttgttgaagcactttatttagtttgtggagaaagaggatttttttatactccaaaaactagacgagaagcagaagatcttcaagttggacaagttgaattaggaggaggtccaggagctggatcattgcaaccattagcacttgaaggtagtttgcaaaaaagaggaattgttgagcaatgttgtacctcaatttgttcactatatcagcttgaaaattattgtgga

SEQ ID NO: 110247 - DNA, 330 bp, Artificial Sequence
  derived and/or modified sequence
atggctctctggatgagactgctgcctctcttggctctgcttgccttgtggggcccagaccctgccgccgcgttcgtcaaccaacatctttgtggtagccacctggtcgaggccctgtacttagtgtgcggagagaggggctttttctatacacctaaaacccgcagggaagctgaagaccttcaggtggggcaagtggagcttgggggcgggccgggtgcaggctcgttgcagcccctggcactcgaaggctcgctacagaaacgtggaatagtcgagcagtgttgtactagtatttgcagcctctaccagcttgagaactactgcggg

SEQ ID NO: 110248 - DNA, 330 bp, Artificial Sequence
  derived and/or modified sequence
atggctctgtggatgcgactgttacctctgttagcattgctggccctgtggggccctgatcctgcagccgccttcgtcaatcagcatctctgtggctctcacttggtggaggcactgtatcttgtgtgcggcgagagaggatttttttacactcccaagactagaagagaggctgaagatctgcaagtgggccaagttgagctgggcggtgggcccggggctgggagtttacagccactggcactggaaggcagtctgcaaaaaagaggcattgttgagcagtgttgcacctctatttgcagtctataccaacttgagaattactgcggc

SEQ ID NO: 110249 - DNA, 330 bp, Artificial Sequence
  derived and/or modified sequence
atggctctgtggatgcggcttttgcctcttctcgcgctgctcgccctgtggggaccagatcctgcagccgcgtttgtgaaccagcacctctgtggatcacatctcgttgaggccctttaccttgtgtgcggcgagcggggattcttttacactccgaaaacccgcagggaagcagaagatcttcaagtgggacaagttgagcttggaggaggccctggcgccggttccctccagccacttgcactggaaggatcgctgcagaagaggggaattgtcgaacaatgctgtacgtcgatctgcagcctgtaccaattggaaaactactgtggt

SEQ ID NO: 110250 - DNA, 330 bp, Artificial Sequence
  derived and/or modified sequence
atggccctgtggatgagactgctgccattgctggcgctgctggcattgtggggcccagaccccgcagcagctttcgtgaatcagcatctgtgcgggagtcacttggtggaagccctgtatctcgtctgcggagaacgcggatttttttacacgcctaaaacaagaagggaggccgaggacctccaggtgggacaggtcgaattgggggggggcccgggtgccgggtcactccaaccgcttgcactcgaaggctcactgcagaagagaggcatcgtggagcagtgttgcaccagcatctgctccctgtatcagctggaaaactactgtgga

SEQ ID NO: 110251 - DNA, 330 bp, Artificial Sequence
  derived and/or modified sequence
atggctctgtggatgcgcttgcttcccttgctcgcactgcttgctttgtggggcccagaccccgccgccgctttcgtaaatcagcacctgtgcggttcacacttggtagaggccctctacctggtgtgtggagagcgcggatttttctacacccctaagactagacgcgaagcggaagatctccaggtgggtcaggtcgaattgggcggtggtcccggagctggaagccttcagcctctggccttggagggatccctccagaaaaggggcattgtcgagcaatgctgcacctccatctgttcactctaccagctggagaactattgcggt

SEQ ID NO: 110252 - DNA, 330 bp, Artificial Sequence
  derived and/or modified sequence
atggcactttggatgcggcttctcccacttttggcacttctggcactttggggcccagaccccgcagcagcctttgtgaatcagcatctctgcggctcacacttggtcgaggcgctgtacctggtgtgtggtgaaagaggattcttttacaccccaaaaactcggagagaggcagaagatcttcaagttggtcaagtcgaactgggtggaggccctggggccggatccctccaaccgcttgcacttgaaggatcactgcagaagcgaggaatcgtggaacagtgctgtacttcaatctgtagcctttaccagctggagaactactgtggg

SEQ ID NO: 110253 - DNA, 324 bp, Artificial Sequence
  derived and/or modified sequence
atggcgctatggatgaggctcctgccactgctggccctcctggcactctggggaccagatccagccgccgcgtttgtgaaacagcacctgtgcgggtcacaccttgttgaagccctatacctcgtgtgcggggagcggggattcttctatactcccgaaaccgaggcagaggacttgcaggtggggcaggtggagctgggagggggccctggcgctggttccctgcaaccgctagctctggaaggatctctgcaaaagagagggattgtcgagcagtgttgcacttccatatgctcactttaccagcttgaaaactactgtaat

SEQ ID NO: 110254 - DNA, 324 bp, Artificial Sequence
  derived and/or modified sequence
atggccctctggatgcgactactgccactcttggccctcctcgctctgtggggcccagatcctgcagcagcatttgtgaaacagcacctctgtgggagccacctagtcgaggctctgtacttagtctgcggagagcgtggttttttctacacccctgagacagaagcagaagacttgcaggtgggacaggtcgaactcggaggcgggcccggggccggatcactgcagcctttggcccttgaggggtctctgcagaaacgggggattgtcgagcaatgctgcacttcgatctgcagcctgtaccagctggagaattattgcaat

SEQ ID NO: 110255 - DNA, 324 bp, Artificial Sequence
  derived and/or modified sequence
atggccttgtggatgcggctcctcccactcctggccctgctggctctctggggtccggatcccgcagcagcctttgtgaagcaacatctctgcggatcgcaccttgtcgaagcgttgtacttggtgtgcggcgaaagaggtttcttctatactcctgagacggaagctgaggacttgcaagtgggtcaggtcgaacttggcggaggccctggagctggatcactgcagccgctcgcgctggaaggcagccttcagaaacgggggattgtggagcagtgctgcacctcgatctgctctctttaccaactggagaactactgtaat

SEQ ID NO: 110256 - DNA, 324 bp, Artificial Sequence
  derived and/or modified sequence
atggccctctggatgagactgctcccactcctggcattgcttgcgctgtgggggccggacccggctgctgcctttgtgaagcaacacctctgcgggtcccatctggtggaagcgctgtacctggtgtgcggggaacggggcttcttctacaccccggaaaccgaagccgaagatctgcaggttggacaagtggagctcggcggaggcccgggagccggaagcctgcagccgctcgccctggagggatcgcttcagaagcgcggcatcgttgagcaatgctgcacttccatctgctcactgtaccaattggagaactactgcaac

SEQ ID NO: 110257 - DNA, 324 bp, Artificial Sequence
  derived and/or modified sequence
atggccttgtggatgcggttactccctttgttagctctacttgcgttgtgggggccggaccctgcggcggcgttcgtgaaacaacacctttgcggcagccatctggtggaagctctatacctcgtttgcggagaacgcggatttttctatactccggaaacagaggctgaagacctgcaggtaggtcaggtggaattgggcggaggaccaggagcaggatctctccaaccgctggccttagaaggatctttacagaagagagggattgtagaacaatgctgcacatcgatctgttctttatatcagttagaaaactattgtaac

SEQ ID NO: 110258 - DNA, 324 bp, Artificial Sequence
  derived and/or modified sequence
atggctctctggatgcgcctactaccgctgctggcactcctggccctgtggggacctgatcctgcagcggcatttgtgaagcagcacctctgcgggagccacctggtggaggctctttatctggtgtgcggagaaaggggatttttttataccccagaaactgaggccgaggacctccaggtgggacaggtcgagctcggcggcgggccaggggcaggctccctgcagcctctcgccctggaaggctccctgcagaaaagagggatagttgagcagtgttgtacctctatttgcagtctgtaccaactggagaactattgtaac

SEQ ID NO: 110259 - DNA, 324 bp, Artificial Sequence
  derived and/or modified sequence
atggcactttggatgagactgcttcctctgctggctcttcttgcgctgtgggggcctgaccctgcagcggcgtttgtgaagcagcatctctgtggtagccatctcgtggaagcattgtacctcgtctgtggagaacggggatttttctacaccccagagactgaggcggaagatcttcaggtgggccaagtcgagctggggggaggaccaggagcgggctctcttcagcctcttgcccttgagggatcgctgcagaagaggggaattgtggaacagtgttgcacgtcaatttgttccttgtaccaactggaaaactactgtaac

SEQ ID NO: 110260 - DNA, 324 bp, Artificial Sequence
  derived and/or modified sequence
atggcactgtggatgaggttgctgccactgctcgccctcctggctttgtggggcccagacccagctgcagcctttgtcaaacaacacctgtgcggctcccacctcgtcgaggccttgtacttggtgtgtggtgaaagaggattcttttacacacctgaaactgaagctgaagaccttcaagtgggacaggtcgaactcggtggaggtcccggcgccggaagtttgcagcctttggcactggaaggatccctgcagaagaggggaattgtggaacagtgctgcacttctatttgtagtctgtaccagctcgagaattattgcaac

SEQ ID NO: 110261 - DNA, 324 bp, Artificial Sequence
  derived and/or modified sequence
atggcgttatggatgcgattattaccgctactagcgctattagcgctatggggtccggatccggcggcggcgtttgtaaaacaacatctatgtggttcgcatctagtagaagcgttatatttagtatgtggtgaacgtggttttttttatacgccggaaacggaagcggaagatttacaagtaggtcaagtagaattaggtggtggtccgggtgcgggttcgttacaaccgctagcgttagaaggttcgttacaaaaacgtggtatagttgaacaatgttgtacgtcgatatgttcgttatatcaactagaaaattattgtaat

SEQ ID NO: 110262 - DNA, 324 bp, Artificial Sequence
  derived and/or modified sequence
atggctctgtggatgaggctgttaccgttgctcgcattgctggcgctatgggggcctgatcccgcagccgccttcgtaaagcagcatttatgcggatctcatctggtggaagcgctctatctggtatgcggcgagagaggattcttttatactccagaaactgaggcagaagacttgcaggtgggccaagtggaactgggtggcggcccgggagccggctcccttcaacctctcgccctggaaggaagccttcagaagcgtggtattgttgagcagtgctgcacatcgatctgttctctgtaccaactagaaaactactgcaac

SEQ ID NO: 110263 - DNA, 324 bp, Artificial Sequence
  derived and/or modified sequence
atggcactgtggatgcggctactgcctctgcttgctctcctggcgctctggggtcccgacccggccgcagcttttgtgaaacagcacttgtgcggttcgcaccttgtggaggctctctacctcgtttgtggagagcgggggttcttctacacaccagagactgaagcagaggaccttcaagtggggcaagtggagttaggcggcggaccaggcgctggttctctccagcccctcgcgcttgagggctctctgcagaagcgcggcatcgtcgagcaatgctgcacgagtatttgcagcctctaccaactggagaactattgcaat

SEQ ID NO: 110264 - DNA, 324 bp, Artificial Sequence
  derived and/or modified sequence
atggcgctctggatgcgcctgctgcctcttctggctcttctagcgctctggggacccgatccagcagcagcctttgttaaacagcatctttgtggctcccacttggtggaagcgctatatctggtgtgcggggagcggggctttttttacactccagaaacagaagctgaggatctgcaggtgggacaagtggaacttggtggcgggcccggggccgggtcactgcaacccctcgcgctggaagggagcctgcagaagcgaggcatcgtggagcagtgctgtacgtcaatttgcagcctgtaccagcttgagaactactgcaac

SEQ ID NO: 110265 - DNA, 324 bp, Artificial Sequence
  derived and/or modified sequence
atggcgctatggatgaggttactgcccttgcttgcgctactggcactttggggaccagatccagccgccgccttcgtcaagcagcatctctgtggatcacacttggtcgaggctctctacctggtgtgcggagagaggggattcttttacacacccgaaaccgaggccgaagatctgcaagtagggcaagtggagctggggggtggacctggagccgggagtctgcagcctctggccttagagggttcccttcagaagagggggattgtggaacagtgttgcacttctatatgctctctgtaccagttagagaattactgtaat

SEQ ID NO: 110266 - DNA, 324 bp, Artificial Sequence
  derived and/or modified sequence
atggccttgtggatgaggctgctgccactgcttgccttgctggctctgtggggaccggaccctgccgcagcatttgtcaagcagcacctctgcggaagccacctggtcgaagccttgtatcttgtgtgcggagagaggggctttttttatacacccgagaccgaggctgaagacctgcaggttggtcaggtcgagctgggcgggggccccggggctgggtccctgcagccgctagccctggaaggctccctgcagaagaggggcattgtggagcagtgttgcacatccatctgttctctttaccagctagaaaattattgcaac

SEQ ID NO: 110267 - DNA, 324 bp, Artificial Sequence
  derived and/or modified sequence
atggcactctggatgcgactgttgccattgcttgcgctgctcgccctctggggtcctgacccagctgccgcattcgtgaagcagcacctgtgtgggagccatttggtagaagcactctatctagtatgtggagagaggggtttcttctatacgcctgagaccgaggcggaagacctgcaggtgggacaagttgagcttgggggcggtcccggagccggatcccttcagcccctcgccctcgagggatccctgcagaagcgaggcatcgttgaacagtgttgtacatcaatatgcagtctctatcaactggaaaattactgtaat

SEQ ID NO: 110268 - DNA, 324 bp, Artificial Sequence
  derived and/or modified sequence
atggccttgtggatgcgactcctgcccctcctggctctcttggccctctgggggcctgatccagccgctgcattcgtgaagcagcatttatgtggctctcacctggtcgaggcactttaccttgtttgcggcgagaggggctttttctacaccccggaaactgaagctgaggacctgcaggtgggccaagtggagctggggggtggaccaggagctggtagcctgcaacctctcgcgttggagggttcattgcagaaacgcggcattgtggaacagtgctgtacctctatttgcagcctctatcagctggagaattattgcaac

SEQ ID NO: 110269 - DNA, 324 bp, Artificial Sequence
  derived and/or modified sequence
atggcattatggatgcgactgcttcctctgctcgccctccttgctctatggggacccgatcccgccgcagcattcgtcaagcagcatctgtgcggttctcacctagtcgaagccctatatctggtgtgtggagaacgcgggttcttctatacgcccgaaacagaggccgaggacctgcaagtgggtcaggtggaactgggcggcggtccaggtgcgggctcactccaaccgctcgccctcgaggggtcactgcagaagaggggcattgtggagcagtgttgtacctcgatctgtagcctgtaccagctcgaaaactactgtaat

SEQ ID NO: 110270 - DNA, 324 bp, Artificial Sequence
  derived and/or modified sequence
atggccctctggatgcggctgctcccgctcttggcactgttggccttatggggtccagatccagccgccgcctttgtaaaacaacatctgtgcggatctcacctggttgaagctctttacctggtttgcggagagagaggcttcttttatacaccagagaccgaggcagaggatttacaagtgggacaggtggagctcggaggtggccctggagccggcagtctacagccacttgccttggaaggttcattacagaagagagggattgtggagcaatgttgtacaagcatttgcagcctgtaccagcttgaaaactactgcaac

SEQ ID NO: 110271 - DNA, 324 bp, Artificial Sequence
  derived and/or modified sequence
atggcgctgtggatgcgcctgttgccgctgctagctcttttggcgttgtggggcccagatcctgctgcggctttcgttaagcagcacctgtgtgggtctcatttggttgaagcactgtacctggtatgtggagagcgggggtttttttacactccggagactgaggcggaagacctgcaggttggtcaggtcgagttgggcggcggccctggcgccggtagcctccaacctttggccctcgagggctcgctgcagaaacgcggtattgttgagcagtgctgcacctctatatgcagcctctatcagctggagaactactgcaac

SEQ ID NO: 110272 - DNA, 324 bp, Artificial Sequence
  derived and/or modified sequence
atggcattgtggatgcgcttgctgccactccttgccttgcttgcactgtggggccctgatcccgcagcagcatttgtgaaacaacatctttgtggaagccatctcgtggaggccttgtacctcgtgtgtggagaacggggatttttctacactccagaaactgaagcggaagatctccaagtgggacaagtggagctgggtggcggtcccggagcgggttcgcttcagcctcttgcattggagggatcccttcaaaaaaggggaattgtggagcagtgttgtacctcaatttgctccctgtaccagttggagaactattgtaat

SEQ ID NO: 110273 - DNA, 324 bp, Artificial Sequence
  derived and/or modified sequence
atggccctgtggatgcgcttattgccgctcctcgccctcctagctctgtggggtccagaccccgcggctgccttcgtgaaacagcacctatgcggctcccacctcgtggaggcactgtatttagtgtgtggggaaaggggatttttctataccccggagaccgaggcagaggacctccaggttggacaggtagaactcggcggcggtcccggcgccggtagtcttcagcctttggcattggaaggatccctccagaaacgcggtatagttgagcagtgttgcaccagcatatgtagcctatatcagctcgaaaactattgcaac

SEQ ID NO: 110274 - DNA, 324 bp, Artificial Sequence
  derived and/or modified sequence
atggctctctggatgagactgctccctttgctcgccctgctggccttgtggggccccgatcctgccgcagcgttcgtgaagcagcacctgtgcggttcccatctcgtggaagcactttatctggtctgcggagagcgaggtttcttttacactcccgaaactgaagctgaggaccttcaagtcggacaagttgagctgggaggagggcccggcgcgggctcgcttcagccactggcactggagggttccttgcagaagcggggcatcgttgagcaatgttgtacctcaatctgcagcctctaccaactggaaaactactgcaac

SEQ ID NO: 110275 - DNA, 324 bp, Artificial Sequence
  derived and/or modified sequence
atggcattgtggatgaggctgctgccactgctggctttgctcgccctgtggggcccggatcctgctgccgcattcgtcaaacaacacctgtgtggatcccatcttgtcgaagctctctacctggtgtgtggggagagagggttcttctatactccggagacggaagccgaggacctgcaagtcggccaagtggagttgggaggagggccgggagctggatctctccaaccgctggccctcgaaggttcgctgcagaagaggggcatcgtggaacagtgttgcacctcaatctgctccctgtaccagctggaaaactactgcaac

SEQ ID NO: 110276 - DNA, 324 bp, Artificial Sequence
  derived and/or modified sequence
atggcactttggatgagacttctgcctctgttggcactgcttgcactgtggggaccagatcctgccgctgcatttgtcaagcaacacctctgcggctcccatctggtggaagcactttatctggtttgcggagaacgcggctttttctacacccctgaaactgaggcagaggaccttcaggtgggacaggtggagttggggggaggtccaggagcaggatccctgcaacctctggcactcgagggatcgctgcaaaaacgaggtatcgtggaacagtgttgtacttcgatctgttcgctgtatcagcttgagaattactgcaat

SEQ ID NO: 110277 - DNA, 324 bp, Artificial Sequence
  derived and/or modified sequence
atggcactctggatgcgactcctgcctctgctggcgctgcttgcactctggggacccgaccccgctgcagcattcgtgaaacagcatctgtgtggttctcaccttgtggaagccctgtacctggtgtgtggcgagcgcggattcttttacactcccgagacggaagccgaagatctgcaggtgggtcaagtggaattgggaggcggaccaggtgcaggcagccttcaacctcttgcactggaaggttcacttcaaaagagaggtatcgttgagcagtgttgcactagcatctgctccctgtaccagctggagaattactgtaac

SEQ ID NO: 110278 - DNA, 324 bp, Artificial Sequence
  derived and/or modified sequence
atggccctgtggatgagactcctgcctctgctggcgctgctggctctctggggcccggatcctgcggccgccttcgtcaagcagcacctgtgcggatcccatctcgtggaagcgctgtacctggtgtgcggggaacgcgggttcttttacacccctgaaactgaagcagaggaccttcaggtcggccaggtggagctcgggggcggaccaggagcagggtcgcttcagccccttgcgctggaaggatcgctccaaaaaagaggaatcgtggaacagtgctgtacttccatctgctccctctaccagctggaaaactactgtaac

SEQ ID NO: 110279 - DNA, 324 bp, Artificial Sequence
  derived and/or modified sequence
atggccctgtggatgagactgttgccattactagccttgctagccctatggggacccgatcctgcagccgcatttgtgaaacagcacctctgcgggtcacatctagtggaagccttgtacttggtgtgcggagaacgcgggtttttttatacacctgaaactgaggctgaagacttgcaagtgggacaggttgaactcggaggagggcctggggccgggtccctacagcccttagctctggaggggtccctccagaaaagaggaatcgtcgaacagtgctgtacatctatctgttctctctaccagctggaaaactactgcaat

SEQ ID NO: 110280 - DNA, 324 bp, Artificial Sequence
  derived and/or modified sequence
atggctctttggatgcgtctgttgcccctgctggctctgcttgcgctgtgggggccggatccagcagccgcctttgtgaaacaacatctctgcgggtcacaccttgtggaagccctttacttggtgtgtggtgaaagaggattcttttacaccccagagactgaagcggaggacctccaagttggacaggtggagctgggcggtggacctggagcaggatcgctccaacccttggcactggagggctcactgcaaaagcgcggaatcgtggaacagtgctgtacctctatttgtagcctctaccaacttgaaaactactgtaac

SEQ ID NO: 110281 - DNA, 324 bp, Artificial Sequence
  derived and/or modified sequence
atggctctgtggatgcggttgctgcctttgttggcactcctcgcactatggggtccagaccctgctgctgccttcgtcaagcagcatctttgcggctctcaccttgtcgaggctctctacttggtatgtggtgaacggggtttcttctacaccccagagacggaggccgaggacttgcaagtcggccaagttgaacttggcggcggccccggagcaggatctctacagccactggccttggagggttcgttgcaaaaaagggggatcgtggagcaatgctgcacgtcaatatgttctctgtaccagctggaaaactactgcaac

SEQ ID NO: 110282 - DNA, 324 bp, Artificial Sequence
  derived and/or modified sequence
atggcgttgtggatgagattgcttcctttactcgctcttctcgctctttgggggccagacccggctgccgcttttgtcaagcaacatttgtgtggatcgcatctagttgaagcactctacttggtttgtggagagaggggatttttttatacgccggaaaccgaggcagaggatttgcaggttggacaagtggagctgggtggtgggccaggagcgggatcattacaaccgttggcgcttgaaggatctttgcagaagcggggaattgttgaacaatgttgtacaagtatctgctctttgtatcaacttgagaactattgtaat

SEQ ID NO: 110283 - DNA, 324 bp, Artificial Sequence
  derived and/or modified sequence
atggcactctggatgcggctgcttccgctgctggccctgctggctttatggggacccgaccctgccgctgctttcgtaaagcaacacctttgtggttcgcatctggtagaggcactgtacctagtctgcggggaacgaggttttttctacactcctgagaccgaggccgaggacctccaagtgggccaagttgaacttggtggtgggcctggggccgggtcacttcaaccactggccctggagggatccctgcagaagcgtggtatcgttgaacagtgctgcacatcaatctgttccctgtaccagcttgagaattactgtaac

SEQ ID NO: 110284 - DNA, 324 bp, Artificial Sequence
  derived and/or modified sequence
atggcgctgtggatgagactgctccctttgcttgcgcttcttgccctgtggggaccagacccggcagcggctttcgtgaagcagcacctgtgcggctcacacttggtggaagccctgtacctggtgtgcggagaacggggatttttctacactccagaaacggaggctgaggatttgcaagtcggacaggtcgagctggggggaggacctggcgctggatccctgcaaccgctggctctggaaggctccctgcagaagcgaggtatcgtggaacagtgctgcacctcgatctgctccctgtaccagcttgaaaactactgcaat

SEQ ID NO: 110285 - DNA, 324 bp, Artificial Sequence
  derived and/or modified sequence
atggcactgtggatgcggctgcttccgctcctcgcacttcttgcgctttggggtcctgaccctgcggctgcctttgtgaagcagcatctttgtgggtcgcaccttgtggaggccctctatcttgtctgcggagagagaggtttcttctacactccagagacggaagccgaggatcttcaagtggggcaagtcgagcttggaggcgggcctggggcaggctcacttcagccattggcactggaaggatcgcttcagaaacgaggaatcgtcgaacaatgttgcaccagcatttgctccctctatcagctggaaaactactgtaac

SEQ ID NO: 110286 - DNA, 324 bp, Artificial Sequence
  derived and/or modified sequence
atggcactgtggatgcgtctgctcccactgctggcgttgcttgcactctggggacctgaccctgcagcagcctttgtgaagcagcacttgtgtggatcacaccttgtggaagcgctctacctggtctgcggcgagcgcggtttcttttacacccccgaaactgaagcggaagatttgcaagtgggacaagtggaacttggaggcggaccgggtgcaggaagcctgcagcccctggcactggaaggatcgctgcaaaagaggggcatcgtcgagcaatgttgtacttcaatttgcagcctttaccaactggagaattactgtaat

SEQ ID NO: 110287 - DNA, 324 bp, Artificial Sequence
  derived and/or modified sequence
atggcgctttggatgaggctgctacccctactcgccctcctcgctctgtggggtcctgaccctgctgctgcttttgttaaacaacacttatgcgggtcacacctcgtagaagctttatatttggtatgtggcgaacgaggttttttttacacaccagagacggaagctgaagaccttcaggtgggacaagttgagttgggtgggggaccaggtgcaggctctctgcaacccttggccctggagggatctttgcagaaaaggggcattgtggaacagtgctgcacatctatttgttcgttgtaccagctcgagaattattgtaac

SEQ ID NO: 110288 - DNA, 324 bp, Artificial Sequence
  derived and/or modified sequence
atggccttatggatgcggctgctcccattgctagccctcctggccctgtggggcccagatcctgccgcagccttcgtaaaacagcacctttgcggctctcatctggttgaagctctgtacttagtttgtggagagcgcgggtttttttacaccccagagactgaagcagaggacctacaggtggggcaggtggagctcggggggggtcctggtgctggttcactccagcctcttgctttagaggggtctctccaaaaaaggggaatcgttgagcagtgttgcacgagtatttgtagtctgtatcagttggagaattactgcaac

SEQ ID NO: 110289 - DNA, 324 bp, Artificial Sequence
  derived and/or modified sequence
atggccctgtggatgcgtctgcttcctttactcgctctccttgcgctttgggggccagatccggcagctgcatttgtgaaacagcatctttgcgggtcacacttagtggaggccctttacctcgtgtgcggagagagagggttcttctatacgcccgaaactgaggcggaggatctacaggtgggtcaagttgagctgggaggcgggcctggcgccggatccttacaacctctggctctggagggcagcctgcagaaacgagggatcgtggaacagtgttgcacttccatctgttccctttatcagctggagaactattgtaac

SEQ ID NO: 110290 - DNA, 324 bp, Artificial Sequence
  derived and/or modified sequence
atggccctttggatgaggctgttacctcttctcgccctcctggcactctgggggccggaccccgccgccgcctttgttaaacagcacctgtgcggtagccatttggtggaggctctctacctcgtttgcggagagcggggtttcttctatacgccggaaacggaggccgaagacctgcaggtggggcaggtcgagctgggtggaggcccgggcgcgggatctctccagcccctggcactagaagggtctctacaaaagaggggaatcgtagagcagtgctgtacctctatatgctcattgtaccagttggagaactactgcaac

SEQ ID NO: 110291 - DNA, 324 bp, Artificial Sequence
  derived and/or modified sequence
atggccctttggatgaggctgttacctctgttggctcttctcgcgctgtggggtccagaccctgcagcggcctttgtcaagcaacatttatgtggctctcatttggtggaagccctgtacctggtttgtggagagaggggcttcttctatactcccgagacagaggctgaggaccttcaagttggccaagtggagcttggcggcggaccgggcgctgggtctctacagccactggcgttagaggggtccctccagaagcgggggattgtcgaacagtgttgcacttcaatttgtagcctataccaactcgagaattactgcaac

SEQ ID NO: 110292 - DNA, 324 bp, Artificial Sequence
  derived and/or modified sequence
atggccttgtggatgagactactgcctctgctggctctgctggctctatggggccccgatcctgctgccgccttcgtcaagcagcacctgtgtggcagtcatctggtggaagctctgtatttagtgtgcggcgaacgggggttcttctacactcccgagaccgaggcagaagatctgcaagttgggcaggttgagctgggcgggggcccaggcgctggatctctgcaacctcttgctctggagggctccctgcagaagagagggatagtggaacaatgctgcaccagcatctgcagcctgtaccagctggaaaactactgcaac

SEQ ID NO: 110293 - DNA, 324 bp, Artificial Sequence
  derived and/or modified sequence
atggcgctgtggatgcgcttgctgccactgctcgcgctgctcgccctgtggggtccggatccggctgccgctttcgtaaagcagcacctgtgcggtagtcatttggtggaagctctctacctggtgtgtggggaaagaggattcttctatactccggaaaccgaggcggaggatctccaagtcggccaggtggaacttggtggaggccctggggctggctcgctccaacccctggcattggaaggatccctccaaaaacggggaattgtggagcagtgctgcacgtcgatctgctcattgtaccagctggagaactactgcaat

SEQ ID NO: 110294 - DNA, 324 bp, Artificial Sequence
  derived and/or modified sequence
atggcactttggatgaggcttctgccacttctggcactcctggccctgtggggtcctgatcccgctgcagcattcgtgaagcaacatctgtgcggcagccaccttgttgaagccttgtaccttgtgtgcggagaacgcggttttttctacactcccgaaaccgaagccgaggatcttcaggtcggtcaagtggagcttggtggcggccccggagctgggtcgctccaaccactcgcactcgaaggatcccttcagaaacgtggaattgtggagcaatgctgcacctcaatttgttccctttaccagcttgaaaactactgtaac

SEQ ID NO: 110295 - DNA, 324 bp, Artificial Sequence
  derived and/or modified sequence
atggcgctttggatgcgcctgctgccgcttctggccctgctcgcactctggggcccggacccagcggccgcgtttgtaaagcagcacctgtgcggatcccacttggtcgaagctctgtaccttgtctgcggcgaacggggcttcttttacacccctgaaaccgaagcggaggatcttcaggtgggacaggtggaactggggggaggaccaggtgccggttcgttgcagccgctcgccctcgaggggtccctccaaaagagaggaatcgtggaacagtgctgtaccagcatctgttcattgtatcaactggagaattactgcaat

SEQ ID NO: 110296 - DNA, 324 bp, Artificial Sequence
  derived and/or modified sequence
atggccctgtggatgcgcctgctgccccttttagccctgctggcactgtggggccccgacccagctgccgctttcgtgaaacagcacctctgcggctcccacctcgttgaggctctttatctggtttgcggtgaaaggggatttttctacactccagagacggaagccgaagaccttcaggtgggccaggtggagctgggaggcggcccaggggcagggtctctgcagcctctagcactagaggggagcctccaaaaacgcggaatcgtcgagcagtgttgcacgagtatttgctcactctatcaactcgagaactactgtaac

SEQ ID NO: 110297 - DNA, 324 bp, Artificial Sequence
  derived and/or modified sequence
atggctttatggatgagattattaccattacttgctttattagctctttggggaccagacccagctgctgcatttgtcaaacaacatttatgtggatctcatttagttgaagcattatatttagtttgtggagaaagaggttttttttatacaccagaaacagaagcagaggaccttcaagttggtcaagttgaacttggaggtggtccaggtgcaggatcattacaacctcttgcattagaaggatctttacaaaaacgtggaatagtagaacaatgttgtacttctatttgttcactttatcaacttgaaaattattgtaac

SEQ ID NO: 110298 - DNA, 324 bp, Artificial Sequence
  derived and/or modified sequence
atggctctctggatgaggctcctccccttgctggcactattagctctgtggggacccgatccagccgctgctttcgtcaagcagcacctgtgcgggtctcacctcgtagaggcactctacctggtgtgcggagagcgcgggttcttctacacaccagaaactgaggccgaagacctccaggtagggcaggtggaacttggagggggacccggagcaggatcgctccagcctcttgctctagaagggtccctccaaaaacggggaattgtagaacagtgttgtacttctatctgctccctataccagcttgaaaactattgtaac

SEQ ID NO: 110299 - DNA, 324 bp, Artificial Sequence
  derived and/or modified sequence
atggctctgtggatgcggttgcttcccctacttgcactgttggcgttgtgggggcccgaccccgcagcggcttttgtcaaacagcacctgtgtggatcacaccttgtagaggccctttatttggtctgtggtgagagagggtttttctatacaccagaaacagaggcggaggacctgcaggtgggccaggtggaattaggcgggggacccggggcaggctccctccaaccattagcccttgagggcagtctgcagaagcgcggaatagtcgaacagtgttgtacgagcatatgcagcttataccaactggagaactactgcaat

SEQ ID NO: 110300 - DNA, 324 bp, Artificial Sequence
  derived and/or modified sequence
atggccttgtggatgcgccttcttcctctgctggcgctcctggccctttggggcccagatccagccgcagcttttgtcaagcaacacctgtgtgggtcccatctcgtggaagcactgtacctcgtctgtggtgaacggggtttcttctacactcctgaaaccgaagcagaggacttgcaggtcggtcaggtggaactcggaggaggcccaggggcaggatccctccaaccacttgctcttgaaggtagccttcaaaaacgcggcattgtggaacagtgctgtacctccatttgttccctgtaccagttggaaaactattgcaac

SEQ ID NO: 110301 - DNA, 324 bp, Artificial Sequence
  derived and/or modified sequence
atggcactatggatgagactattgcctttattggcgcttctcgctctatggggtccggaccccgctgccgctttcgtaaagcagcacttatgtggctcacacctcgtggaagcactctatctcgtctgcggcgaacgcggcttcttctatacacccgaaaccgaggccgaggacctgcaggtcggtcaggtggagctgggcggcggtcctggcgctggttctctccaacctctggccttggaagggtctctccagaagcgcggcattgttgaacaatgctgtacatcaatttgctccctctaccaactggaaaactattgcaac

SEQ ID NO: 110302 - DNA, 324 bp, Artificial Sequence
  derived and/or modified sequence
atggccctctggatgaggctcctgcctctgctggcacttctggcactttggggccctgacccggcagctgcatttgtcaagcaacacctgtgtggttctcatctcgtggaggcattgtatctggtgtgtggagaaagaggattcttttacacccctgagactgaagccgaagatctgcaagtgggacaggtcgagctcggcgggggtccgggcgcgggatcgcttcaaccattggccctcgaaggtagcctccagaaacggggaattgtggaacagtgttgcaccagtatctgttccttgtaccaacttgagaattactgcaac

SEQ ID NO: 110303 - DNA, 324 bp, Artificial Sequence
  derived and/or modified sequence
atggcactttggatgcgccttctgcccttattggcattattggccctctggggcccggatcctgcagctgcgtttgtaaaacaacacctgtgcggctcccaccttgtcgaagccttgtatctggtgtgcggagagagggggtttttctacaccccagaaacagaggcagaggaccttcaagttgggcaggtcgaattaggagggggacccggggcaggatcattgcagccactcgctttggaaggatctctccagaaaagaggaatcgtcgagcaatgctgcaccagcatctgcagtctgtatcagttggaaaactattgtaat

SEQ ID NO: 110304 - DNA, 324 bp, Artificial Sequence
  derived and/or modified sequence
atggccctgtggatgaggctgctcccgctgctggcgttgctggcgctgtggggaccagaccccgctgccgctttcgtgaagcagcacctgtgcggatctcatctggtggaggcactctatctggtctgcggggaacggggttttttctacactcctgaaaccgaggcagaggatttgcaagtcggacaagttgagcttggcggcggaccgggcgccggatccctccaaccattggcactcgaaggatctctgcagaaacgcggaatagtcgaacagtgttgcacctcaatctgcagcctgtaccagctcgagaattactgcaat

SEQ ID NO: 110305 - DNA, 324 bp, Artificial Sequence
  derived and/or modified sequence
atggctctgtggatgagacttcttcctttactggccctactggccctttggggcccggacccagctgccgcattcgtcaaacagcacttatgtggctctcacttggttgaagcgctgtacctggtttgcggagagcgagggtttttttatacccctgagacggaagccgaggatctccaggtgggccaggtggagcttgggggaggacccggagctggctctctgcagccacttgctctggagggctcattgcagaagcgcggtattgttgagcagtgctgtacgtctatttgttccctgtatcagctggagaactattgcaat

SEQ ID NO: 110306 - DNA, 324 bp, Artificial Sequence
  derived and/or modified sequence
atggcgttgtggatgaggctgctcccgttgctcgccctgctcgctctgtggggaccggacccggccgcagcctttgtcaagcagcacctgtgcggaagccatctcgtggaagccctctaccttgtgtgcggcgagcgagggtttttctacaccccagagactgaagccgaggatctgcaggttggacaagtggagttgggcggaggcccaggtgccggatcgctccagccgctggcactcgagggatccctgcaaaagcggggcatcgtggagcaatgctgtacctcgatctgcagcctgtaccaattggagaactactgtaac

SEQ ID NO: 110307 - DNA, 324 bp, Artificial Sequence
  derived and/or modified sequence
atggccttgtggatgagactgctgcctcttttagctttgctggccctctggggtccggacccagcagctgcattcgttaaacagcatctgtgtggatctcatttggtcgaggccctgtatctggtgtgcggcgaacgtggctttttttacacccctgaaacagaggctgaagacctccaggtggggcaagtggaactggggggcggtccaggcgcaggctccttacaaccactcgccctcgagggaagcctgcagaagcgcgggatagtggaacagtgttgcacctctatttgttcgctgtaccagctagagaattattgtaac

SEQ ID NO: 110308 - DNA, 324 bp, Artificial Sequence
  derived and/or modified sequence
atggcgctgtggatgaggttactccctctcctggcgttgttggccctgtggggacccgatcctgcagccgcttttgtcaagcaacacttgtgcggctcacacttagttgaggcactgtatcttgtgtgtggtgagcgaggttttttttatacacctgagacggaagctgaagatctccaggttgggcaggtagagttgggcggaggtccaggcgctggtagcctccagcctctagctttggagggttctcttcagaaacgcggcattgtcgagcagtgctgcacatcaatttgctccctgtatcaattggagaactattgtaat

SEQ ID NO: 110309 - DNA, 324 bp, Artificial Sequence
  derived and/or modified sequence
atggccctctggatgagattgctccctcttctcgctctgctggccctgtggggacctgaccctgctgccgcttttgtgaaacaacatctgtgtgggtcccacctcgtggaggcactgtaccttgtctgtggagagagggggtttttctacactcccgagaccgaggccgaagatctgcaggtgggacaggtggagcttggtggagggcctggggcggggagtctgcagcctctggccctggaaggatcactgcagaagcgaggcattgtggagcagtgctgtacaagtatctgttcactttaccagctggaaaactattgcaac

SEQ ID NO: 110310 - DNA, 324 bp, Artificial Sequence
  derived and/or modified sequence
atggcactctggatgcgtctcctgcccctgctggctctactggccctctggggcccagatcccgctgccgcattcgttaagcagcatctctgtggctctcatttggtcgaggcactttacctcgtctgcggcgagcgtggctttttctacacgcccgaaacggaggccgaggatttgcaagtgggccaggtcgagcttggtggtggtccaggcgccggttctctccagcctctggcgctggagggtagtttgcagaagcgtgggatcgtcgagcaatgctgcacctctatctgcagcctctaccaactcgagaattattgcaac

SEQ ID NO: 110311 - DNA, 324 bp, Artificial Sequence
  derived and/or modified sequence
atggcgctgtggatgaggttgctgcccctcctggccttgctggctctgtggggacccgatcctgccgccgctttcgtaaagcagcatttgtgtgggtctcacctggttgaagcactgtatctggtatgcggagaacggggctttttttacactccagagacggaagctgaggacttgcaggtcggtcaggtcgaacttggcggtggtccgggtgccggctccttgcagcccttggccctggaaggttcactgcagaaacgaggcatcgtggagcagtgttgcacttcaatctgctccttgtatcagctggagaattattgcaat

SEQ ID NO: 110312 - DNA, 324 bp, Artificial Sequence
  derived and/or modified sequence
atggccctttggatgcggctccttcccttgctggcacttcttgcattgtggggaccggaccccgcagcagcatttgtgaagcagcacctgtgcggatcccaccttgtggaagctctttaccttgtgtgcggagaacggggattcttttacacgccagaaactgaagcagaggatctccaagtgggccaggtggaactggggggaggtcccggagcaggttcactgcaacctctcgcactggaagggtcacttcagaagagaggaattgtggaacaatgttgtacctctatctgctcgctgtaccaactggagaattactgtaac

SEQ ID NO: 110313 - DNA, 324 bp, Artificial Sequence
  derived and/or modified sequence
atggctctgtggatgcgcttgctgccattgctggcacttctcgcactctggggtcccgatccagctgctgcgttcgtcaagcagcacttgtgcggaagccacctcgtagaagccctttatcttgtgtgtggcgagaggggattcttctacacaccagagaccgaggctgaggatcttcaggtcggtcaggtcgaactgggcggcggcccaggagcaggtagcttgcaacccctcgcattggaaggatccctgcagaaaaggggtatagtggaacagtgttgtacctccatctgttccctgtatcaactcgagaattattgcaac

SEQ ID NO: 110314 - DNA, 324 bp, Artificial Sequence
  derived and/or modified sequence
atggcactgtggatgcgcttgctgcctctgctcgcacttctggcactgtggggacccgacccagcggcagcattcgtcaagcagcatctgtgtggatcgcatctcgtggaagctctctacctcgtctgcggggaacggggtttcttctacaccccagaaactgaggctgaggacctgcaagtggggcaggtggaactgggaggtggcccgggcgccgggtccctccaaccgttggccctggagggatcgctccaaaagaggggaatcgttgagcagtgttgcacgtccatctgctccttgtaccagctcgagaactactgtaac

SEQ ID NO: 110315 - DNA, 324 bp, Artificial Sequence
  derived and/or modified sequence
atggcgttgtggatgcggttgctgccattactcgcactgctcgccctgtgggggcctgatcccgctgcagcttttgtgaaacagcatctgtgtgggagccacttagtggaggcattgtacttagtgtgtggggagagaggtttcttttatactcccgagacggaagccgaggatctgcaggtggggcaggtcgagttaggagggggacccggggccggaagcctacagccattggcccttgagggcagcttacaaaagaggggcatcgtcgagcagtgttgtacctccatttgttccctctaccagctagagaattattgcaac

SEQ ID NO: 110316 - DNA, 324 bp, Artificial Sequence
  derived and/or modified sequence
atggccctgtggatgcggttgctcccgctgctcgctctgttggcgctctggggaccggaccctgccgcggctttcgtgaagcagcatctgtgtggctcgcacctggtggaagcactgtacctggtgtgcggagaaagagggttcttttacaccccagagactgaagccgaggatctgcaagtcggccaggtcgagctcgggggtggtcccggcgcaggatcgcttcagccgctcgccctggagggatcactgcagaaacgcggaatcgtggaacaatgttgcaccagcatctgctccctctaccaacttgaaaactactgcaat

SEQ ID NO: 110317 - DNA, 324 bp, Artificial Sequence
  derived and/or modified sequence
atggcactttggatgaggctccttccccttctggcgctgctcgccttgtggggcccggacccggctgccgcttttgtcaaacagcacctgtgcggctcccatctggtagaagcactttacttggtctgcggtgagcgcgggttcttctacactcctgaaaccgaggcggaagatttgcaagtgggacaagtggaactgggaggcggcccaggggcgggaagtctccagcccctcgccctcgagggaagcctgcagaagcggggaatcgtggaacagtgctgcaccagcatctgctcactctaccagctggagaactactgtaac

SEQ ID NO: 110318 - DNA, 324 bp, Artificial Sequence
  derived and/or modified sequence
atggcactgtggatgagattgctccccctgttggccctgttggcgctttggggcccggaccccgcagccgcatttgtgaagcaacacctctgcggatcgcatcttgtcgaagccctgtacctcgtgtgtggggagcggggattcttctacacgcccgaaactgaggccgaggacttgcaggttggccaagtggagcttggagggggaccgggcgcgggctcgctgcagccgttggctctggagggatcactgcagaaacgcggaatcgtggagcagtgttgcactagcatttgctcgctctatcaactggaaaactactgtaac

SEQ ID NO: 110319 - DNA, 324 bp, Artificial Sequence
  derived and/or modified sequence
atggcgttgtggatgaggttgctgccattgctcgcacttctggcattgtgggggccggatccggccgctgccttcgtgaaacagcacctttgcggttcacatttagtagaggccctatatcttgtgtgtggtgaaagagggttcttctacaccccagagactgaagccgaggacctccaagttggtcaggttgaactcggcggcggccccggtgccggaagcctgcaacccctagccctggagggtagcctgcagaagagaggcattgtggagcagtgttgcacttccatctgcagcctctaccaattggagaattactgtaac

SEQ ID NO: 110320 - DNA, 324 bp, Artificial Sequence
  derived and/or modified sequence
atggctctctggatgagactgctgcccctgctggccctgctcgcactttggggcccggacccagccgccgcatttgtcaagcagcatctgtgcggttcacatctggtggaagccctgtacctggtctgcggtgagcgcggatttttctacaccccagagactgaagccgaagatctccaggtgggccaagtagagctgggaggcgggcctggcgcgggtagccttcagcctcttgctctggaagggtccttgcagaagcgggggatagtcgagcagtgttgcacctccatttgcagtctctatcagctggaaaattactgtaac

SEQ ID NO: 110321 - DNA, 324 bp, Artificial Sequence
  derived and/or modified sequence
atggccctgtggatgcgtctgctcccacttctcgccttgcttgctctgtggggaccggacccggctgcagcgttcgtgaagcaacacctgtgcgggtcccatctggtagaagcactctacctcgtctgcggggaacgcggattcttttacacccctgaaactgaggcggaggatctccaggtgggacaggttgagctgggcggtggacccggggcgggttccctccagcccttggctctcgaaggatcgcttcagaaacggggcatcgtggaacagtgctgcacgtctatctgttcactgtaccaattggagaactattgtaat

SEQ ID NO: 110322 - DNA, 324 bp, Artificial Sequence
  derived and/or modified sequence
atggccttgtggatgcgccttttgcctcttctggcgctgctggcattgtggggccccgaccctgctgccgcttttgtgaagcagcacctctgcggtagccatcttgtcgaagcactctacctggtatgtggagaacgtggtttcttttacaccccggaaactgaggcagaggatttgcaagtggggcaggtggaactcggcggaggccctggagcgggttccctccaaccacttgcactcgagggatcgcttcaaaaacggggtatcgtggagcagtgttgtacctctatttgttcactctatcagttggaaaactactgcaat

SEQ ID NO: 110323 - DNA, 324 bp, Artificial Sequence
  derived and/or modified sequence
atggcgttgtggatgaggcttcttccactcctggcactgctggccctgtggggtccagaccctgccgcagcgtttgtcaagcaacacctctgtggttcacatctcgtcgaagcactttaccttgtgtgtggagaacgggggtttttctatactccagaaaccgaagcagaggacctgcaagtgggtcaggtggaactgggtggaggtccaggtgccggatcccttcaaccgctggcgctggaaggatcgctgcagaaacgcggaattgtcgaacaatgctgtacctcaatttgttctctctaccaacttgagaactactgtaat

SEQ ID NO: 110324 - DNA, 324 bp, Artificial Sequence
  derived and/or modified sequence
atggcactgtggatgcgcctgctgccgctcctggcgttgctggctctgtggggacccgatccggccgcggcttttgtgaaacaacacctgtgcggatcccatttggtggaagccctgtacctggtctgtggtgagagaggcttcttctacacgcccgaaaccgaagctgaagatctgcaagtcggtcaggtggaacttggaggcggaccaggagcgggaagcctgcaaccactggccctcgaagggtcgttgcagaagcggggtatcgtggagcaatgctgcacctcaatttgtagcctctaccagctcgagaactattgtaac

SEQ ID NO: 110325 - DNA, 324 bp, Artificial Sequence
  derived and/or modified sequence
atggccctttggatgcgactgctgcctctgctggctcttcttgcactttggggccctgatcctgctgcagcgtttgtgaagcagcatctgtgcggatcccacctcgtcgaagcactctacttggtgtgtggagaaagagggttcttttacacgcccgaaaccgaggccgaagatttgcaggtcggccaggtggaactgggaggtggaccgggagcaggttcgctgcaacctctcgcactcgagggctcactgcagaagagaggcattgtggaacagtgttgtacttcgatttgttcgctgtaccaactggagaactactgtaat

SEQ ID NO: 110326 - DNA, 324 bp, Artificial Sequence
  derived and/or modified sequence
atggcactctggatgcggcttctcccgctgctggcactcctcgcactctggggaccggatccggcagcagcgtttgtgaaacaacatctgtgcggctcgcacctggtcgaagccctgtacctggtctgcggcgaacgcggcttcttttacactccagaaaccgaagcggaggacctgcaggtgggacaagtggagctcggcggtgggcctggagcagggtccctgcaacctctcgccctggaaggaagcctgcagaagcggggaatcgtggagcagtgttgtacttccatctgtagcttgtaccaactggaaaactattgtaac

SEQ ID NO: 110327 - DNA, 324 bp, Artificial Sequence
  derived and/or modified sequence
atggctctgtggatgcgcctgttgcctctcctggcactcctcgccttgtggggacccgatcccgccgccgccttcgttaagcaacacctctgcggtagccatttggttgaggccctctacctcgtgtgtggagagcgggggttcttttatacccccgagacagaggcagaagatctgcaagtgggccaagtggaactcggcggcggaccaggagccgggtccctgcagccacttgcccttgagggttccctccagaaacggggtattgtggagcagtgttgcacatccatttgttctctctaccagctggagaactactgcaat

SEQ ID NO: 110328 - DNA, 324 bp, Artificial Sequence
  derived and/or modified sequence
atggctctgtggatgcgactgctgccacttctggccctgctggcgctgtggggaccggacccggctgccgctttcgttaagcagcatttgtgtggttcgcacctcgtggaggccctttacctggtgtgcggcgagcgcggattcttctatacccccgaaacggaggccgaggatctccaagtcggccaggtcgaactgggtggcggccctggtgccgggtccctgcagccactcgccttggaaggatcactccagaagagaggaattgtggagcagtgctgcacttcgatttgttcactctaccaacttgagaactactgcaac

SEQ ID NO: 110329 - DNA, 324 bp, Artificial Sequence
  derived and/or modified sequence
atggctctctggatgcgcctgctcccactgctggcgctacttgcgctgtggggaccagacccagccgccgcatttgttaagcaacacctttgtggctcgcacttggtggaagctctgtatctggtctgcggggagcgcggattcttttacacccctgagaccgaggcggaggatctgcaggtgggccaggtagagctgggaggcggaccaggcgccggctcgctgcagccgctggctctcgaaggttccctgcagaagcgcgggattgttgaacagtgttgtacctccatctgcagcctttaccaactggagaattactgtaat

SEQ ID NO: 110330 - DNA, 324 bp, Artificial Sequence
  derived and/or modified sequence
atggccctgtggatgcgcttgctcccgctgctcgcgctgctggcgctgtggggacccgacccggcggctgccttcgtcaagcagcatttgtgcggctcgcacctggtcgaggccctgtacttggtgtgcggagagcgcggctttttctacactccagaaacggaagcagaagatctccaagtggggcaagtggagctgggtggcgggccgggcgctggatcactccagcctctggctctcgagggctcactgcagaagcgcggaatcgtcgagcagtgctgcaccagcatttgcagtctgtatcaactcgaaaactactgtaat

SEQ ID NO: 110331 - DNA, 324 bp, Artificial Sequence
  derived and/or modified sequence
atggctctatggatgcggttactgcctctcctggccctgctcgccctctgggggccagatcccgccgccgccttcgtaaagcagcacctctgcggttctcacttagttgaagccctgtaccttgtgtgtggcgaaagggggtttttctacacccctgaaactgaggctgaggatttacaagtaggccaggtcgaacttggtgggggtcctggggctgggtctttgcagcccttagcactggaaggatccctgcaaaaaagggggatcgtcgaacagtgctgcacctcaatttgttcattgtatcaactggagaattattgtaac

SEQ ID NO: 110332 - DNA, 324 bp, Artificial Sequence
  derived and/or modified sequence
atggccctttggatgcggcttctgccacttcttgcactgctcgccctttgggggcctgacccggcagccgcatttgtgaaacaacacctttgcggctcgcatcttgtcgaagcactgtaccttgtgtgcggcgaacgtggcttcttttacacccctgaaaccgaagcagaggatcttcaagtgggacaagtggagctgggaggaggtcctggtgcagggtcgcttcaacctctcgcactcgaaggctcactgcagaagcgagggattgtggaacaatgttgtacttcaatttgttctctctaccagttggaaaactactgtaac

SEQ ID NO: 110333 - DNA, 324 bp, Artificial Sequence
  derived and/or modified sequence
atggcactttggatgaggcttctgcccttgttggccctcctggcactctggggtccggatcctgccgcagcatttgtgaagcagcacctttgcggcagccatctcgtggaggcactttacttggtgtgcggcgaaagaggtttcttttacactccagagacggaagctgaggaccttcaagttggacaagtcgagctgggtggcggtccaggtgcaggctcgctccaacctcttgcgctggaaggatctctgcaaaaacgcgggattgtggaacagtgctgtacctctatttgttcactttatcagctggagaattactgtaac

SEQ ID NO: 110334 - DNA, 324 bp, Artificial Sequence
  derived and/or modified sequence
atggcgttgtggatgcgtctcctcccgctcctcgccctgctggcgttgtggggccccgatcccgcagcagcctttgtcaagcagcatctatgcggcagtcacttggtcgaagctctgtacctcgtgtgtggagagcgaggttttttctatacccctgaaaccgaggctgaggatctccaggtagggcaagttgagttaggtggtggacccggagccggatctttacagcctctagcacttgaaggcagtctacagaagagaggcattgttgaacagtgttgcacgtctatctgctctctttaccagctcgaaaactactgcaac

SEQ ID NO: 110335 - DNA, 324 bp, Artificial Sequence
  derived and/or modified sequence
atggctctgtggatgcgcttgcttcctttgctggctcttctggcattatggggcccggatcccgccgcggcgttcgttaagcaacatctctgtggcagtcacttagtcgaagctctgtatctcgtctgcggtgagcgcgggtttttctacacgccggagactgaggcagaggacctgcaggtgggacaggtggaactcggcggggggccaggcgccgggtctctgcaacctctggccctggagggctccctgcagaagagaggtatcgtcgagcagtgttgtacaagtatttgctcactgtatcagctggagaattattgcaac

SEQ ID NO: 110336 - DNA, 324 bp, Artificial Sequence
  derived and/or modified sequence
atggctctctggatgagattgttacctctcctggccttactcgcactgtggggtccggatccggctgctgcttttgttaaacagcatctttgcgggagtcacctggtcgaagctctgtaccttgtgtgtggagagagaggattcttttacacaccggaaacggaagccgaggatctccaggttggtcaggtcgagctgggaggcggccccggagctgggagccttcagccgttggcattggagggctcactgcagaaaagaggtatcgtggagcagtgttgcacgagtatctgttcactgtaccagctggaaaactattgtaac

SEQ ID NO: 110337 - DNA, 324 bp, Artificial Sequence
  derived and/or modified sequence
atggcactctggatgaggttgctccctttgctagcactgctggcgctgtggggtccagaccctgcagctgctttcgtgaaacagcacttatgtggctcccatcttgtggaagctttgtatctggtttgtggagagcgtggattcttctatactccagaaactgaggcggaagatttgcaggtcggtcaggttgagctgggaggcgggccaggagcgggttcgttgcagcccttagctttggaaggaagcttgcagaagcggggcatagtggaacagtgttgtacctcgatctgttcgttatatcaactggaaaactattgtaac

SEQ ID NO: 110338 - DNA, 324 bp, Artificial Sequence
  derived and/or modified sequence
atggcactgtggatgagattgctccccctgttggcactcctggcgctgtggggacccgatccggcagccgcttttgtgaaacaacacctgtgcggcagccatctggtggaagctctttacctcgtctgtggtgaacgcggctttttctacactccggaaacggaagcagaagatctccaagtgggccaagtcgagctcggaggaggtcctggagcagggtcgcttcagcctctggcacttgaggggagcctccagaagagaggtattgtggaacaatgttgtacctcgatctgttcactgtaccaactcgaaaactactgcaat

SEQ ID NO: 110339 - DNA, 324 bp, Artificial Sequence
  derived and/or modified sequence
atggcgttgtggatgcggctgttgccacttctggcgctgcttgcgctttggggccctgaccctgccgctgccttcgtaaatcagcacctgtgcggttcacatcttgtggaggctctgtacttggtgtgtggcgaaagaggatttttctataccaagccgactgaagcagaagatctgcaagtcggtcaagtcgaattgggaggcggaccgggggccggatccctgcagcccctggcactcgaaggaagcctgcagaagcgcggcattgtggagcagtgctgcacttcgatctgttcactctaccagctggagaactactgtaat

SEQ ID NO: 110340 - DNA, 324 bp, Artificial Sequence
  derived and/or modified sequence
atggcactgtggatgcgcctcctgccactcctcgccctgctggcgctctggggaccggaccccgcggctgcttttgtgaatcagcacctctgcggaagccacctggtggaggccctgtacctcgtttgcggggagagagggtttttctacactaagccaaccgaagccgaggatctgcaggtgggccaggtggagctgggaggtggccccggcgcggggtcactccagccgctggccctggagggatcccttcagaagagaggtatcgtcgaacagtgctgcacctccatctgttccctgtaccaactggaaaactactgcaac

SEQ ID NO: 110341 - DNA, 324 bp, Artificial Sequence
  derived and/or modified sequence
atggccttgtggatgcgtctgctcccactcctggcacttctggccctctggggaccagatccggcagcggcgtttgtgaaccaacatctgtgcgggagccacctggttgaagccctgtatttggtctgtggtgagaggggctttttctacactaaacctacggaagcagaggatctccaggtcggtcaagtggaacttggtggaggacccggcgcaggatcactccaacctcttgcgctcgagggaagcctccagaagcgaggtatcgtcgaacaatgctgtacctcaatttgttcactctaccaactggaaaactactgtaac

SEQ ID NO: 110342 - DNA, 324 bp, Artificial Sequence
  derived and/or modified sequence
atggcactgtggatgcgccttctccctctgctcgcactgctcgcattgtgggggccggacccggccgcagcttttgtcaatcagcacctctgtggatcacatctggtcgaagctctttacctggtgtgtggtgaacgcgggttcttctataccaagccaactgaggcggaagatctccaagttggacaagtcgaacttggtggcggtcccggtgctggatccctgcagccactggcactggagggatcccttcaaaaacgtggaattgtggagcagtgttgcacctcgatctgttcgctctaccagctggaaaactactgtaac

SEQ ID NO: 110343 - DNA, 324 bp, Artificial Sequence
  derived and/or modified sequence
atggccctctggatgcgcctcctccctctgctagcattgctcgcgctgtggggtcccgatcccgcagccgcctttgtaaaccaacacctctgtggatcccatctggtggaggctctttacttagtgtgtggcgaaaggggcttcttctacacaaaaccaacggaggctgaagatctccaagtcggacaggtcgagctcgggggtggccctggggctggttccctgcagccactggctttggaggggagccttcagaaacggggaatcgtggaacagtgctgcacttctatctgctcactttatcagctggaaaactattgtaat

SEQ ID NO: 110344 - DNA, 324 bp, Artificial Sequence
  derived and/or modified sequence
atggctctgtggatgcggctcctccccttgctcgccctccttgcactgtggggccctgaccctgctgcggcctttgtgaatcagcacttgtgtggtagccaccttgtagaggcactgtacttggtctgcggtgaaaggggctttttctatactaaaccaacagaggcagaggacctgcaagtggggcaggttgagttgggggggggtccaggcgccggatcattgcagccacttgctttagagggctcactccagaaaagggggatcgttgagcaatgctgcacaagcatatgctccctgtaccaactggagaattactgtaac

SEQ ID NO: 110345 - DNA, 324 bp, Artificial Sequence
  derived and/or modified sequence
atggccttgtggatgcgactgctccctcttctggctcttctcgcgctctggggtccggatccagctgcagctttcgtgaaccagcatctctgcggcagccacctggttgaggcgctgtacctagtatgcggagagagggggtttttctacaccaagccaactgaggctgaagatttgcaggtcggccaggtagaactaggcggggggccaggagctggatccctgcagccattggcgctggaagggagtttgcagaagcggggtattgtggagcagtgttgtacaagcatatgttcactttaccagctggaaaactattgtaat

SEQ ID NO: 110346 - DNA, 324 bp, Artificial Sequence
  derived and/or modified sequence
atggccctctggatgcggctgttgccgctcctcgcactactcgctttgtgggggcccgacccagcagctgccttcgtgaatcagcacttatgcggatcacacctggtggaggcgctctaccttgtctgcggcgaacggggttttttctacacaaaacccaccgaagccgaggatcttcaagttggtcaggtggagctcggcggcgggcccggtgctggatctctacagcctctcgctctagagggatccctgcagaaacgtggcatcgtggaacagtgctgcaccagtatttgttccctttatcagctcgagaactactgtaac

SEQ ID NO: 110347 - DNA, 324 bp, Artificial Sequence
  derived and/or modified sequence
atggcactgtggatgcggcttcttccgcttctcgcgctcctggcgctgtggggccctgatccggccgccgcgttcgtcaaccaacatttgtgtggctcccacctcgtggaggcactctatctggtctgtggggaacgcggattcttttacactaagccaactgaggccgaggaccttcaagttgggcaggtggagctgggaggaggtccgggagcaggatcactccagccactcgcactggaaggatccttgcagaagcgcggcatcgtggagcagtgctgcactagcatttgctcgctctaccaactcgaaaactactgcaat

SEQ ID NO: 110348 - DNA, 324 bp, Artificial Sequence
  derived and/or modified sequence
atggctttgtggatgcggttacttccactgctggcgttacttgcgctgtggggtccagaccctgctgctgcattcgtgaatcagcacttgtgcgggtcccacttagtcgaggccctttacctagtgtgtggagaaagaggcttcttttataccaagcccactgaagcggaggacttgcaggtcggccaggtggagctgggcggtggccccggcgcaggatctctgcagcccctggcacttgagggctctcttcagaagagggggatcgtggagcagtgttgtactagtatctgcagcctctatcaactcgaaaattactgcaat

SEQ ID NO: 110349 - DNA, 324 bp, Artificial Sequence
  derived and/or modified sequence
atggctctttggatgagactgctgccactcctggctttgctggctttgtggggccccgatcctgccgccgccttcgtgaaccagcacctgtgtggctcccatttggtggaggccttgtatctggtctgcggagagagagggtttttttatacgaaacctacagaggcagaggatctgcaggtggggcaggtcgagctgggtggcggtcctggagctggctccctgcagcccctggccttggaaggttctctgcagaaaaggggtatcgtcgagcagtgctgcactagcatatgctccctctatcaacttgagaattattgcaat

SEQ ID NO: 110350 - DNA, 324 bp, Artificial Sequence
  derived and/or modified sequence
atggcattgtggatgcgattgctgccgttgctagcccttcttgccttgtggggccctgaccctgctgccgcctttgtcaaccagcatttgtgtgggtcccatctggtcgaggccctgtatctggtgtgtggtgagagggggttcttctatactaaacccacggaggcagaggacttgcaggtggggcaggtcgaactcgggggaggacccggcgccggaagcttacagccacttgctcttgaaggaagcttacagaaaagagggatcgtggaacagtgctgcacaagtatatgctcactatatcagctagagaactactgcaac

SEQ ID NO: 110351 - DNA, 324 bp, Artificial Sequence
  derived and/or modified sequence
atggcactgtggatgcgcctgttgcccctgctggcgctcctggcactttggggcccagacccggccgcagcttttgtcaaccaacatctttgtggatctcacctggtggaggctttgtaccttgtctgtggagaaagggggtttttctacacgaaacctaccgaagccgaggatctgcaagtgggacaagtggaactgggagggggacctggcgctgggtcgttgcagccgcttgccctcgagggttccctccagaagagaggaattgtggaacaatgttgcactagcatctgtagcttgtaccagctggaaaactactgcaat

SEQ ID NO: 110352 - DNA, 324 bp, Artificial Sequence
  derived and/or modified sequence
atggcactttggatgcggctgcttcctcttctggcactgttggccctgtggggacctgatccagccgcagcgtttgtgaaccaacatctttgtggtagccatctggtggaagcactgtacctggtttgcggcgaaagaggttttttctacactaagccaaccgaagcagaagatcttcaagtcgggcaagtcgagctgggaggagggcccggagctggctccttgcagcctcttgcactcgaaggcagtctccaaaagaggggcattgtcgagcaatgttgtacctccatctgcagcctttaccagctcgagaattactgcaat

SEQ ID NO: 110353 - DNA, 324 bp, Artificial Sequence
  derived and/or modified sequence
atggcactctggatgcgactgctgccactcctggcattgctcgcgctctggggccctgacccagccgccgcgtttgtgaaccaacatctctgtggatctcacctcgtggaggcactgtacctcgtgtgcggagagcggggtttcttttacaccaagcccacggaggcagaggatcttcaagtcggccaggtggaacttggcggtggacctggggcgggtagcctgcaaccgttggcacttgaaggatcattgcagaagcgaggtattgtggaacaatgttgtacttccatttgttccctttaccagctggagaattactgtaac

SEQ ID NO: 110354 - DNA, 324 bp, Artificial Sequence
  derived and/or modified sequence
atggctttgtggatgaggctgctgcccctgctggccttgctggcactgtggggccctgatcccgcagctgctttcgttaaccagcacctgtgtggcagccatctggtggaagccttgtacctggtatgcggcgagcgaggttttttctacacaaaacctaccgaggctgaggacttgcaggtaggacaggttgaacttgggggtgggcccggggcagggagtctgcaacccctcgctctggaggggtcactccaaaagagaggcatcgttgagcaatgctgtacatccatctgcagtctttatcagctggagaattattgtaac

SEQ ID NO: 110355 - DNA, 324 bp, Artificial Sequence
  derived and/or modified sequence
atggccttatggatgcggcttttgccattgctcgcactgttggccctatggggtcctgacccagcagcagcctttgttaaccagcatctctgcggttcccacctcgtggaggcactgtatcttgtgtgtggagagcgagggtttttttacactaagcccacagaggcagaggacttgcaggtggggcaagtcgaactcggcggcgggccaggagccggatctcttcaacccctggctcttgaggggtccttgcagaagaggggcatcgtggagcagtgttgcacctccatctgtagcctgtatcagctagagaactattgcaac

SEQ ID NO: 110356 - DNA, 324 bp, Artificial Sequence
  derived and/or modified sequence
atggctctatggatgaggctgcttccgttactcgccctcctggccctgtggggccccgaccccgctgcggccttcgtcaatcagcatctctgcggaagccatctagttgaggcactgtacctggtgtgcggcgagcgaggattcttctatacaaagccgacggaggccgaagacttacaagtgggacaggtggagctgggggggggacccggagccggctcactgcagcccttggctctagaagggtccctccagaagcgaggtatcgtggaacagtgctgcacaagcatatgcagtttgtaccaattggagaattattgcaat

SEQ ID NO: 110357 - DNA, 324 bp, Artificial Sequence
  derived and/or modified sequence
atggccctgtggatgcgcctcctcccattgcttgcccttctggccctctggggacctgacccggcggctgcgttcgtgaatcaacacctttgtggttcacatttggtggaggcactctaccttgtgtgcggagagcgaggcttcttttacaccaaacccactgaagccgaagatctgcaggtcgggcaggtggagcttgggggcggaccaggagcagggtcgctgcagcctcttgcattggaaggttccctgcagaagcgggggattgtagagcaatgttgcacgtcgatctgctctttgtaccagctggaaaactactgcaac

SEQ ID NO: 110358 - DNA, 324 bp, Artificial Sequence
  derived and/or modified sequence
atggccttgtggatgcgactactgcccctattggccttgctggcgttgtggggacctgatccagccgctgctttcgtcaaccagcatctctgtggctcccatctggttgaagctctgtacctggtgtgcggagaaagaggctttttctatacgaagccaaccgaggcagaggacctgcaagttgggcaggtcgagctcgggggggggcctggagccggctcactgcagcctctggccctcgagggcagcctccagaaacgtggtatcgtggaacagtgttgcacttctatttgttcactgtatcagctcgagaactactgcaac

SEQ ID NO: 110359 - DNA, 324 bp, Artificial Sequence
  derived and/or modified sequence
atggccctctggatgagactgttgccattgttggcgctcttagctctgtgggggccggatcctgcagcagcgttcgtaaatcagcatctgtgtggtagccaccttgtggaggccttgtatttagtgtgcggtgagaggggttttttctatacaaagcccactgaggcagaggatctgcaggtcggacaggtcgaactgggcgggggccctggcgccggttcccttcagccgctggcgctggaggggtcactgcagaagcgtggcatcgtggaacagtgttgtacatccatttgctccctataccagctagagaactattgtaac

SEQ ID NO: 110360 - DNA, 324 bp, Artificial Sequence
  derived and/or modified sequence
atggcgctgtggatgcgcctgcttccactcctggctttgctggcattgtggggaccggatccggcagccgcatttgtgaaccagcacctgtgcgggtcgcatcttgtcgaagcactctacctcgtgtgtggcgaacgcggattcttctacactaagcctacggaggcggaggaccttcaggtcggacaagtggaactcggcggcggaccaggtgccggctccctccaaccgcttgccctggagggctcactgcaaaagcgtggaatcgtggaacaatgttgcaccagcatctgctcgctttatcagttggaaaactactgcaac

SEQ ID NO: 110361 - DNA, 324 bp, Artificial Sequence
  derived and/or modified sequence
atggccctttggatgcggcttctgccattgctcgctctgctggcactctggggaccagacccggcagcggcctttgtgaatcaacacctgtgtggatcccatttggttgaggcactgtaccttgtgtgcggcgaacgtggcttcttctacaccaagcctaccgaagcagaggatcttcaggtcggacaggtggagctcggcggaggacccggtgctggttccctgcaaccccttgcacttgaaggttccttgcaaaaacgtggcattgtcgagcaatgttgcacgtcaatctgttcgttgtaccaactggaaaactactgtaac

SEQ ID NO: 110362 - DNA, 324 bp, Artificial Sequence
  derived and/or modified sequence
atggccctttggatgagactgctcccgctgttggctctgctggcgttgtggggaccggatccggccgcggcgttcgttaaccaacatctgtgcggaagccacctcgtcgaggcgctttacctcgtgtgcggcgaaagggggttcttttacacgaagcctactgaagccgaggaccttcaagtgggccaggtcgaactgggaggaggacccggtgccggttcgttgcagcccctcgctctggagggctcccttcagaaacgggggatcgtggagcagtgttgtacctcaatctgctcgctctatcaattggaaaactactgcaac

SEQ ID NO: 110363 - DNA, 324 bp, Artificial Sequence
  derived and/or modified sequence
atggccctgtggatgcgcctcttacctcttctcgctcttttggcactctgggggccggaccctgccgcagcctttgttaatcagcatctgtgcggctcccatctggtagaagcactctatctagtctgtggcgaaagggggttcttttacacaaagccaaccgaagcggaggatttgcaggtcggccaggtggagttgggaggagggccaggagcgggtagcctacagcccctcgctctggagggatcgctgcaaaagcggggcatcgtcgaacagtgctgcacaagcatttgttcgctgtaccagctcgagaactactgcaat

SEQ ID NO: 110364 - DNA, 324 bp, Artificial Sequence
  derived and/or modified sequence
atggctctttggatgcgactgctgccactgcttgcattgctggcactgtggggcccagaccccgcggcggcatttgtgaaccagcatctgtgtggcagccacctcgtggaagcgctttacctggtgtgtggcgagcgcggtttcttttacactaagccaactgaagccgaagatcttcaggtcgggcaagtggaactgggtggaggtccgggggcaggttcgcttcagccccttgccctcgagggatcgctccagaagagaggaattgtcgaacagtgttgtacttccatatgcagcctgtaccaactggaaaactattgtaac

SEQ ID NO: 110365 - DNA, 324 bp, Artificial Sequence
  derived and/or modified sequence
atggccctttggatgcgcttgctcccactgcttgcccttctcgcactgtggggtcctgacccagcagcagcattcgtgaaccagcacctttgtggcagccatctggtggaggcactgtacctcgtgtgcggcgaacggggattcttttacactaaacccaccgaggcagaagatctgcaagtaggccaagtcgaactgggtggaggccccggcgcgggtagcctgcagccgctggcacttgaaggttcactccagaagagaggtattgtcgaacagtgttgcacctccatctgttccttgtatcaactggagaattactgtaat

SEQ ID NO: 110366 - DNA, 324 bp, Artificial Sequence
  derived and/or modified sequence
atggccctgtggatgagacttctccctctcctggctttgttggccctgtggggaccagatccagccgcagcatttgtaaaccagcacctgtgtggcagccatcttgtggaggctttgtacttggtgtgtggtgagaggggttttttttacactaaacccacagaggccgaagatttgcaggtaggacaagttgaactcggtggaggccctggcgccggcagccttcaaccccttgccctggagggctctctgcaaaaacgcggaatagtggagcaatgttgtacaagcatttgcagtctgtatcagctcgaaaattactgcaat

SEQ ID NO: 110367 - DNA, 324 bp, Artificial Sequence
  derived and/or modified sequence
atggccttgtggatgcgcttgttgcctctgctcgctttgctcgcactttggggacccgaccctgcggctgccttcgtcaaccaacacttatgtggatcccacctggtagaagcactctacctcgtctgtggtgaacgtgggttcttctataccaagcctactgaggccgaggatcttcaggtcgggcaggttgaactaggcggcggccccggcgccggttcattgcagccccttgccctggagggttctttacaaaaacgaggtattgtggagcaatgttgcactagtatctgttcactataccaactggagaattactgcaac

SEQ ID NO: 110368 - DNA, 324 bp, Artificial Sequence
  derived and/or modified sequence
atggctttatggatgcgtctgctaccgttgttggctcttttagctctttggggtccggatcctgctgcagcctttgtgaaccagcatctgtgcggctctcatctggttgaggcattgtaccttgtgtgtggtgaaaggggatttttctacacaaaacctacagaagcggaagatctccaagtgggccaagtcgaactcggcggaggcccgggtgcgggctctttgcagccgctagctcttgaaggatccttgcagaagagggggatcgtcgaacagtgttgtacatcaatctgttctttgtatcagctagagaactactgcaat

SEQ ID NO: 110369 - DNA, 324 bp, Artificial Sequence
  derived and/or modified sequence
atggccctttggatgaggcttcttcctcttcttgcactgcttgcactgtggggaccagatccagcagcagcctttgtgaaccagcacctctgtgggagccacctggtggaagcactctacctggtctgcggtgaacgcggatttttctataccaaacccaccgaagccgaagatcttcaggtcggacaagtggagcttggtggcggtccaggagccggatcactgcagccactggccctcgaaggatcgcttcagaagagaggtattgtggaacaatgctgtacctccatttgtagcctctaccaattggagaactactgcaat

SEQ ID NO: 110370 - DNA, 324 bp, Artificial Sequence
  derived and/or modified sequence
atggccctgtggatgcgtctgctcccgttgctcgcacttcttgcactgtggggtccggatccagcagccgcctttgtgaatcagcatctgtgtggatcgcatctcgtggaggcgctctacctggtgtgcggagagcggggattcttctacaccaagcccaccgaggccgaggacctgcaggtgggtcaggtggaactgggcggaggcccgggtgcaggatccctgcagcctctggctctcgagggttctctgcaaaaacgcggcatcgttgaacaatgctgtaccagcatctgttcactgtaccagctggagaactattgcaac

SEQ ID NO: 110371 - DNA, 324 bp, Artificial Sequence
  derived and/or modified sequence
atggctttgtggatgcgactcttgcccttgcttgcactgttagcactttgggggccagatcccgcagccgcctttgtgaatcagcatctgtgtggatcacatctggtagaggcactgtatcttgtgtgtggagaacgtggatttttttatacaaaaccaacggaagctgaggatttgcaggttggacaagttgaattgggaggaggacccggagctggatcactacaacctttagcactagaggggtcactacaaaagcgagggatagttgagcaatgttgtacttcaatatgctcactctaccaattagagaactattgcaac

SEQ ID NO: 110372 - DNA, 324 bp, Artificial Sequence
  derived and/or modified sequence
atggcactctggatgcggttgttgccgctgctggcgttactagctctgtggggacccgaccccgccgcagcttttgtgaaccagcacctgtgtggctcacacttggtcgaagcactctacctcgtctgtggagaacgcggattcttctatacgaagcccaccgaggctgaagatctgcaggtgggccaagtggaacttggggggggaccaggggcagggagcctgcagcccctggctctcgaaggctccctgcagaagcgggggatagtggaacaatgctgcactagcatctgctctctttaccaactggagaattactgcaac

SEQ ID NO: 110373 - DNA, 324 bp, Artificial Sequence
  derived and/or modified sequence
atggctctgtggatgcgccttttgccccttctggccctgctggctctgtggggtcctgaccccgcagcagcatttgtgaatcagcatctctgcggctcgcaccttgtcgaagccctctatctggtttgcggtgagcggggatttttctacaccaagccaactgaggccgaagatctgcaggtgggacaggtggagctgggcggcggccctggcgccggctcactccagcctctggcactcgagggaagtttacaaaaaagaggtatcgttgagcaatgctgtacctctatctgcagtctttatcagctagagaactattgcaac

SEQ ID NO: 110374 - DNA, 324 bp, Artificial Sequence
  derived and/or modified sequence
atggctctctggatgaggctgctaccacttctggcactgctcgccctgtggggacccgacccggcagctgcattcgttaaccagcacctatgtggatcccacctggttgaagcactgtatttggtctgtggagaacggggcttcttctatacaaagcccactgaggccgaagacctccaagtagggcaggtagaactgggcggtggcccgggggctggttccctacaacctttggctctcgagggcagtttgcaaaagcgcggcattgttgagcagtgttgtaccagcatttgcagcctgtaccagctggagaattattgcaat

SEQ ID NO: 110375 - DNA, 324 bp, Artificial Sequence
  derived and/or modified sequence
atggcactctggatgaggctcttgccattgctcgctctgcttgctttatggggtcctgatccggccgcagccttcgtcaaccagcacctgtgcgggagtcacctggtggaagcactgtaccttgtctgtggcgagcgtggattcttctacacaaagccaactgaagccgaagatctgcaagtagggcaggtggagcttggcggaggccccggggcaggaagcctgcagccgctcgcccttgaaggcagcttacaaaaaagaggaatcgtggaacaatgctgtacctcaatatgctctctctaccagcttgagaattattgcaac

SEQ ID NO: 110376 - DNA, 324 bp, Artificial Sequence
  derived and/or modified sequence
atggcattgtggatgcgtcttctacctttgctggccttattagccttgtgggggcccgatcctgctgcggcttttgttaaccaacacctatgcggctcccacttggtggaagccttatacttggtgtgcggtgaacgtggatttttctatactaaacctacagaagccgaagatttgcaagtgggtcaagttgagcttggcggtgggccaggtgccggttcattacaaccattggccttagagggctccctacagaaacgtgggattgtagaacagtgttgtacgagcatctgtagtttatatcagctagagaactattgcaat

SEQ ID NO: 110377 - DNA, 324 bp, Artificial Sequence
  derived and/or modified sequence
atggcgttgtggatgcgcctcttgccgctgctcgccctgctcgccctctggggcccggatccggccgcagccttcgtgaaccagcacctgtgcggatcgcacctggtggaggccctgtacctcgtgtgcggcgagcgggggttcttttacactaagccaaccgaggctgaagatctgcaggtcggacaagtggaactcggtggaggcccgggcgccggaagcctgcaaccgctggctctggagggatcgctgcagaagcgcggaatcgtcgagcagtgctgtaccagcatctgctcactgtaccagctggagaactactgcaac

SEQ ID NO: 110378 - DNA, 324 bp, Artificial Sequence
  derived and/or modified sequence
atggcgctgtggatgcgcctgctgccgctgctggccctgctcgccctgtggggccctgaccctgctgcggctttcgtgaaccaacatctgtgcggatcccacctggtggaggcgttgtacctcgtgtgcggagaaaggggatttttctacactaagccgaccgaggccgaggacctgcaagtgggacaggtggaactgggcggcgggcctggagccggctctctgcagccgctggctcttgaaggatccctccagaagagaggaatcgtcgaacagtgctgcacctcgatctgctcgctctaccagcttgagaattactgcaat

SEQ ID NO: 110379 - DNA, 324 bp, Artificial Sequence
  derived and/or modified sequence
atggccttatggatgcgactgctgcccttgctggctctgctggcactctggggtcccgatcccgcagcggctttcgtcaaccaacacctttgcggatctcatcttgtggaagctctgtacttggtgtgtggcgaacgcggttttttctataccaagcccactgaggcggaggatctgcaggtcgggcaggtggaactgggaggtggaccaggtgccggaagcctgcagcccctggcattggaaggctcattgcagaagaggggcatcgtagagcagtgttgcacttccatatgctccctctatcaattggagaattactgcaat

SEQ ID NO: 110380 - DNA, 324 bp, Artificial Sequence
  derived and/or modified sequence
atggcgttgtggatgagactgctgccgcttctcgctctgctggcactttggggacccgatcctgccgcggcttttgttaaccagcatctgtgtggatcccacctggtagaagccctttaccttgtctgtggtgagaggggatttttctacactaaacctacggaggcagaggaccttcaggtgggtcaggtggaactcggaggaggcccaggggccggttcactgcaaccactggcactggaaggatcacttcaaaagagagggattgtggaacaatgctgtaccagcatttgcagcctttatcaacttgaaaactactgcaat

SEQ ID NO: 110381 - DNA, 324 bp, Artificial Sequence
  derived and/or modified sequence
atggccctgtggatgagacttcttcctctgctggcattgctggccctgtggggtcctgacccagcagcagcctttgttaaccagcacctttgtggatcacatttggtggaggcactttacctcgtgtgcggcgaaagaggtttcttttacaccaagccaactgaagcagaggaccttcaggtgggtcaagttgaactcggcggtggtcccggagccggatcccttcagccacttgcgctggagggcagcctccaaaaaagaggtattgtggaacaatgttgtacctcaatctgttcgctttaccaacttgaaaactactgtaac

SEQ ID NO: 110382 - DNA, 324 bp, Artificial Sequence
  derived and/or modified sequence
atggctctgtggatgcgcttgctcccgctgctggcacttctggcactgtggggaccagacccagcggcggccttcgtcaaccagcacctgtgcggctcgcacctcgtcgaagcactgtacctcgtgtgtggagaaagaggattcttctacaccaaaccgactgaggccgaggacttgcaggttgggcaggtggaacttggtggaggacccggtgctggatcactgcagccgttggccctcgagggtagcctgcaaaaacggggcatcgtggagcagtgctgcacctccatttgcagcctgtaccagctggagaactactgtaac

SEQ ID NO: 110383 - DNA, 324 bp, Artificial Sequence
  derived and/or modified sequence
atggccttatggatgcgcttactgcccctgctggcactcctcgctctatggggccccgaccctgccgcagcgttcgtgaaccagcacctgtgcggctcacatcttgttgaagccctgtatctggtgtgtggcgaacgaggttttttctacaccaagcctacagaggccgaagacctacaagtagggcaggtagagcttggcggcggtccaggggccgggtctctacaacctctcgcactcgagggttcgcttcagaagagagggatcgtcgagcagtgttgcacatcgatctgcagtctgtatcagcttgagaattattgtaat

SEQ ID NO: 110384 - DNA, 324 bp, Artificial Sequence
  derived and/or modified sequence
atggcgctgtggatgcgactgctgccactcctcgcactgctggctctctggggaccagaccccgctgctgcgtttgtgaaccaacacctttgcggaagccacctcgtggaggccctctacctggtgtgcggtgagagaggattcttctataccaaaccgaccgaggcagaggacttgcaagtgggtcaggtggaattggggggaggccctggagcgggatcactgcagcctttggcactggaaggctcccttcaaaagcgggggatcgtggagcaatgttgcacgtcaatctgctccctgtaccaactcgagaactactgcaat

SEQ ID NO: 110385 - DNA, 324 bp, Artificial Sequence
  derived and/or modified sequence
atggctctctggatgaggctgctgccactgcttgcactcttggcactctggggaccggacccagccgccgcattcgtaaatcagcacctctgcggaagccatcttgtcgaagccctgtacctggtgtgcggcgagcgcgggtttttctataccaagccgactgaagcggaagatcttcaagttggccaagtggaactgggaggtggccctggagccggttccctccagcccctggcgttggagggatctctgcagaagaggggaattgtcgagcagtgctgcactagcatctgtagcctttaccagttggagaactactgtaac

SEQ ID NO: 110386 - DNA, 324 bp, Artificial Sequence
  derived and/or modified sequence
atggctttgtggatgcgcctccttccactattagcactgttggccctttggggtccagaccccgctgccgcattcgtaaaccaacatctgtgcggctctcaccttgtagaggcactgtatttagtgtgtggggaacgtggtttcttctataccaaaccgaccgaggcagaagatctgcaggtgggccaagtggagctcggaggaggacccggagctggtagcctccagccgctggcattggagggtagtctccaaaagagggggattgtcgaacagtgctgtacttcgatatgttctctgtatcagctggaaaattactgtaac

SEQ ID NO: 110387 - DNA, 324 bp, Artificial Sequence
  derived and/or modified sequence
atggccctttggatgcggctgctcccgcttttggctttgttagctctttggggccctgatcccgctgccgcattcgttaatcaacacctgtgcggatcacacttggttgaagcattgtacttggtgtgtggagaaaggggttttttttatacaaagccaaccgaggctgaagacctgcaggtgggtcaggttgaattgggcggtgggccaggagcaggaagtctccagcccctggcgttggaagggagcctgcagaagagaggcatcgtggaacagtgttgcacttcaatctgttccttgtaccaactggagaactattgtaac

SEQ ID NO: 110388 - DNA, 324 bp, Artificial Sequence
  derived and/or modified sequence
atggcactttggatgcgtttgctccctctgctggcgctgctggcactctggggtccagaccccgccgcagcctttgtgaatcagcacctttgcggttcgcatcttgtggaagcactctacctggtctgtggtgaacgtggatttttctacactaagccaaccgaagcagaagatttgcaagtgggacaggtagagctgggcggagggccaggagcaggttcacttcaacctctcgcgttggagggatcacttcagaaacggggaattgtcgaacaatgttgtacctccatctgtagcttgtaccaactcgagaactattgcaac

SEQ ID NO: 110389 - DNA, 324 bp, Artificial Sequence
  derived and/or modified sequence
atggctctttggatgcgactactaccattactcgctttgttagctctttggggtccagaccccgcagccgcgttcgtgaaccagcacttgtgcggatcgcacctcgtggaagcgctgtatctcgtgtgcggtgaacgaggatttttctacacaaagccgacagaggccgaagacctccaggtaggtcaggttgagctgggcggcggccctggcgcaggaagcctccagcccctggctttggaaggatccctgcaaaagcgcggaatcgtggaacagtgctgtacctcaatatgttcgctgtaccagcttgaaaattactgtaat

SEQ ID NO: 110390 - DNA, 324 bp, Artificial Sequence
  derived and/or modified sequence
atggctctgtggatgaggcttctgcccctgctcgccctgcttgccttgtgggggccagaccccgccgctgcgtttgtgaatcagcacctgtgtggtagtcacctggtggaagccctctacctggtttgcggcgagcggggatttttttacacaaaaccaacagaggctgaggaccttcaagttggccaggtggagctaggcggagggcccggagcaggttctctacagcctctggcccttgaaggcagcctgcaaaaaagaggcattgttgagcagtgctgcacgtccatctgtagtttgtaccagttagaaaactactgtaat

SEQ ID NO: 110391 - DNA, 324 bp, Artificial Sequence
  derived and/or modified sequence
atggcgctatggatgcgtttattaccgctattagcgctactagcgctatggggtccggatccggcggcggcgtttgtaaatcaacatttatgtggttcgcatttagttgaagcgctatatctagtttgtggtgaacgtggttttttttatacgaaaccgacggaagcggaagatttacaagtaggtcaagtagaattaggtggtggtccgggtgcgggttcgttacaaccgttagcgctagaaggttcgctacaaaaacgaggtatagtagaacaatgttgtacgtcgatatgttcgctatatcaattagaaaattattgtaat

SEQ ID NO: 110392 - DNA, 324 bp, Artificial Sequence
  derived and/or modified sequence
atggccctttggatgaggttactccccctgctggcactcctggcactttgggggcctgatcctgctgcagcctttgtaaatcagcacttgtgtgggtcacacttagtagaggcactgtacctcgtgtgcggagaacgggggttcttctacacaaaaccaactgaagctgaagatctccaggttggacaggtggaacttggagggggacccggagccgggagtcttcaaccgctggctcttgaagggagtctacaaaaaagaggaatcgtggaacagtgttgtactagtatctgctcactttatcagctagagaattactgtaac

SEQ ID NO: 110393 - DNA, 324 bp, Artificial Sequence
  derived and/or modified sequence
atggccttgtggatgcgtctgttacccttgttggcccttttggcactgtggggaccagatcctgctgccgcattcgtgaatcaacacctatgcggctcacatctcgtggaggccctatatctcgtgtgcggcgaacgcggattcttttacacaaaaccaactgaggcagaagatctgcaagttgggcaggtggagctcggaggcggaccaggcgcagggtctctccaaccactagctttagaaggctccctgcagaagcggggcatcgtggagcagtgttgtacctcaatctgttccctgtatcagcttgaaaattactgtaat

SEQ ID NO: 110394 - DNA, 324 bp, Artificial Sequence
  derived and/or modified sequence
atggccctatggatgcgcctcttgccactacttgctttgctggctctgtgggggcccgatcctgctgctgcgttcgtgaatcagcatctctgcggctcccacctggtggaagccctgtatcttgtgtgtggtgagcggggcttcttttataccaaaccaacggaggcagaagatctgcaggtggggcaggtggaactgggaggaggccccggcgctgggtctctgcagccattggctctcgaaggctccctacagaaaagaggaatcgtggagcagtgttgtacctctatctgctccctttaccagctcgagaattactgcaac

SEQ ID NO: 110395 - DNA, 324 bp, Artificial Sequence
  derived and/or modified sequence
atggccctgtggatgaggctgctgccattgttggcactgctcgccctgtggggcccggatcctgccgctgcattcgtcaatcagcacctctgcggcagccacctcgtcgaagctctctacttggtgtgcggagagcgcggattcttctacaccaagccaaccgaagcggaggacctgcaagtgggacaggtcgagctgggcggcggaccgggcgccgggtcactgcaaccgctggcactggagggttcgctgcagaagcggggcattgtggaacagtgctgcacctccatctgctcgctttaccagctcgagaactactgtaat

SEQ ID NO: 110396 - DNA, 324 bp, Artificial Sequence
  derived and/or modified sequence
atggccctctggatgcgactgctaccgctgctggctctcctcgcactctgggggcccgaccctgcagctgcttttgtcaaccagcatctttgtggatcacacctagtggaagccttgtacctggtatgtggggagcggggattcttttatactaagcccacagaggccgaggatctccaggtaggtcaagttgaactgggaggcggcccaggcgccggctcactgcagccactcgctctggaaggtagtctgcagaaaaggggaatcgtcgaacagtgctgtacaagcatctgctccctctaccaacttgaaaactattgtaat

SEQ ID NO: 110397 - DNA, 324 bp, Artificial Sequence
  derived and/or modified sequence
atggctctgtggatgaggctcctcccactgctggctttgcttgcactctgggggccagaccctgcagcggcattcgtgaatcagcatctttgtgggtcacatttggtggaggcactctacctcgtgtgtggcgaacggggatttttctacaccaaaccaacggaagcagaggacctgcaagtgggccaagtggaacttggaggaggacctggcgcgggatccctccaacccctggccctggagggctcactccaaaagcgtggtattgtggaacagtgctgtacttcgatctgctccctttaccagcttgagaactactgtaac

SEQ ID NO: 110398 - DNA, 324 bp, Artificial Sequence
  derived and/or modified sequence
atggcgctttggatgcggctgctgccgctgttggcgctcctggccttgtggggaccagaccctgcagctgcctttgtgaaccagcacctttgcggaagccatctggtcgaggctctgtacctcgtttgcggagaaaggggattcttctacactaagcccaccgaagcagaagatctgcaggtgggacaggtcgaactgggaggaggaccgggagcaggctccctgcagccgctggccctggagggaagtctccaaaaaagagggatcgtcgaacaatgttgcacttccatctgttccctgtaccaactggaaaactactgcaat

SEQ ID NO: 110399 - DNA, 324 bp, Artificial Sequence
  derived and/or modified sequence
atggctctgtggatgcggctgttgccacttctggcactcctcgccctctggggtcccgaccccgccgctgcctttgtaaaccagcacctatgtggaagtcatctggtcgaagctttataccttgtgtgtggcgaacgggggttcttttacaccaagcctacagaagctgaagatctacaggtaggtcaggtggaattgggcggcgggcccggcgccgggtctcttcagccactggccttggagggcagcctccagaaacgcgggatcgtagagcagtgttgtacaagcatatgcagtctgtaccagcttgaaaattactgcaac

SEQ ID NO: 110400 - DNA, 324 bp, Artificial Sequence
  derived and/or modified sequence
atggcgctgtggatgcgactgttgccattgctggctctactcgccttgtggggaccggatccggccgccgcgttcgttaaccagcatttatgcggcagccacctggtcgaggccctatacctcgtctgcggtgaacgagggttcttctacaccaaacccactgaggccgaggacctccaggttggccaggtggaactcggcggagggcctggggccggctccctgcagcccctcgccctggagggctcgctacagaagcgtggtatcgtcgagcagtgttgcacttcaatatgttccctttaccagctggagaattattgcaat

SEQ ID NO: 110401 - DNA, 324 bp, Artificial Sequence
  derived and/or modified sequence
atggcactgtggatgaggctccttccattgctagctcttctggccctgtggggcccagacccagccgccgcatttgtgaaccaacacctgtgcggttcccatctggtggaagcgctttaccttgtgtgcggcgagcggggttttttttataccaaacccaccgaggctgaagatttgcaggtggggcaagtggagctggggggtggcccaggagccggatctctccaaccactggctctcgagggcagtcttcagaagcggggaatcgtggaacaatgctgcacatccatctgcagcttataccagctcgagaactattgtaat

SEQ ID NO: 110402 - DNA, 324 bp, Artificial Sequence
  derived and/or modified sequence
atggctctgtggatgcgactcctccctcttctcgccctcttggcactctggggcccagaccctgcagcggccttcgtcaaccagcatctttgcggatcccaccttgtcgaggctctgtacctcgtgtgtggggaacgggggttcttttacaccaagccaactgaagccgaagatctgcaagttggtcaggtggaactcggtggcggcccaggagcaggaagcctgcaacccctggctcttgagggatctttgcaaaaacgcgggatcgtggagcagtgttgtacctcgatttgctccctttaccagctggaaaactactgtaat

SEQ ID NO: 110403 - DNA, 324 bp, Artificial Sequence
  derived and/or modified sequence
atggcattatggatgagattgttacctttacttgcacttttagctttatggggacctgatccagcagccgcttttgttaaccaacacttatgtggttctcatcttgttgaggctttgtatcttgtttgtggagaaagaggatttttttatacaaaaccaactgaagctgaggaccttcaagttggacaagttgaacttggaggagggcctggagctggatcattacaaccacttgcattggaaggatccttacagaaaagaggaattgtggaacaatgttgcacatcaatttgttcattgtaccaacttgaaaattattgtaat

SEQ ID NO: 110404 - DNA, 324 bp, Artificial Sequence
  derived and/or modified sequence
atggccctgtggatgcggttacttccactactcgccctcctggcactctggggcccagaccccgccgcggccttcgtcaaccagcacctatgtggaagtcacctggtagaggcactgtacctagtgtgcggcgagcggggttttttctacaccaagcccaccgaagctgaggacctccaggtcggccaggtcgagctgggagggggccccggcgccggatctttgcagccgctggcacttgagggctcactgcaaaagcgtgggatcgtcgagcagtgctgcacttcgatctgttcactgtaccagcttgaaaattactgtaac

SEQ ID NO: 110405 - DNA, 324 bp, Artificial Sequence
  derived and/or modified sequence
atggctctgtggatgcggctgctgccactgttggccctgctggcactatggggtcctgacccggctgccgcattcgtcaaccaacatctgtgcggtagccatctagttgaggctctttacctggtgtgtggggaacgtgggtttttctacactaagccgaccgaggcggaggacctgcaggtgggtcaggtggagttgggtggtggtccaggagcagggtccctgcagccgttggctctggagggttccctgcaaaaacgcggtattgtcgaacagtgttgtactagcatttgtagcctgtatcagctggaaaattactgtaat

SEQ ID NO: 110406 - DNA, 324 bp, Artificial Sequence
  derived and/or modified sequence
atggcattgtggatgagactgctccctcttctagcactgctggcactgtgggggcccgacccagcagctgcattcgtcaaccagcacctgtgcggcagccacctggttgaggccctgtacctggtttgtggcgagcgtggttttttctatactaaacctaccgaggctgaggatttacaggtgggccaggtagagcttggcggaggaccaggggcaggatctctgcagcccctggctctggagggcagtctgcagaaacgaggcatagtggagcagtgctgcacttctatttgtagcctgtatcagctggaaaactactgcaat

SEQ ID NO: 110407 - DNA, 324 bp, Artificial Sequence
  derived and/or modified sequence
atggcgctgtggatgcgcctgctgccgctgttggccctgctcgccctgtgggggccggacccagctgccgccttcgtgaaccaacatctttgcggatcgcacctggtcgaggcactctacctcgtgtgtggagagcggggatttttctacactaaaccgaccgaagcagaagatctgcaggtcggccaagtggaactgggaggagggcctggagcgggttccttgcagcccctggctcttgagggcagcctccaaaagagaggcatcgtggagcagtgctgcacctcaatctgctcgctctaccagctcgaaaactactgtaat

SEQ ID NO: 110408 - DNA, 324 bp, Artificial Sequence
  derived and/or modified sequence
atggctctgtggatgcgcttgctccccttgctggccctgttggcactatggggtccggatccggcagcagcattcgttaaccaacacctgtgtgggtcacatctggtggaggctctgtacttggtgtgcggagagaggggatttttttacaccaaaccaacagaggccgaagacctccaggtgggacaggtcgagctcggcgggggcccaggagccggatccctgcaacctctggcgctggaaggctctcttcagaaacgcgggatcgtggagcagtgttgcacctccatctgttctttataccagttagaaaactactgcaac

SEQ ID NO: 110409 - DNA, 324 bp, Artificial Sequence
  derived and/or modified sequence
atggcactttggatgaggctacttcccctcctcgcactccttgcactgtggggaccggatccagcagcagcatttgtgaatcagcatctctgtgggtcccatctggtggaggcattatatctcgtgtgcggagaacgtggatttttttacacgaaaccaacagaggcggaggatctacaggtagggcaggtcgaactggggggaggacctggagccgggtcacttcagcctctcgcactagaggggtcacttcagaagcggggaattgttgaacagtgctgcacatcaatctgcagtctttatcagttggaaaactactgtaat

SEQ ID NO: 110410 - DNA, 324 bp, Artificial Sequence
  derived and/or modified sequence
atggcgctttggatgagactgctccctctccttgcgctgctcgcactgtgggggccagatcctgccgcagcattcgtcaaccagcatctgtgtggatcgcatttggtcgaagccctgtaccttgtgtgtggggagcggggttttttctacactaagccgacggaagcagaagatctgcaagtgggacaggtcgagctcggaggaggtcccggtgccggctccctgcaacccctcgcacttgagggaagcctgcaaaagcgcggtatagtcgagcagtgctgtacctccatttgcagcctctaccaactggagaattactgtaac

SEQ ID NO: 110411 - DNA, 324 bp, Artificial Sequence
  derived and/or modified sequence
atggccctatggatgaggttgttaccgcttctggctctcttggctctgtggggccccgacccagcagctgctttcgtcaatcaacacttatgtggctctcacttggtcgaagctctgtacctggtctgtggcgagcgtgggttcttctacaccaagccgacggaagcagaggacctccaagtcggtcaagtcgagctgggagggggtccaggagctggttcactgcaacctcttgctctcgagggatctttgcagaagcgtggtatcgtcgaacaatgctgcaccagtatctgtagtctgtatcaactcgagaattactgcaac

SEQ ID NO: 110412 - DNA, 324 bp, Artificial Sequence
  derived and/or modified sequence
atggccctgtggatgagattgctccctctgttggccctcctggctttgtggggaccagatccggccgctgcctttgtgaatcagcatctctgcggttcacatctggtcgaggccttgtaccttgtgtgcggagaacggggcttcttctacactaaacctacggaagccgaggacctgcaagtgggtcaggtggagctcggcgggggacctggtgcgggatcgctgcagccgctggcactggagggatcgctccagaagcgcggcatcgtggaacaatgttgcaccagcatttgctcgttgtaccaactggagaactactgcaac

SEQ ID NO: 110413 - DNA, 324 bp, Artificial Sequence
  derived and/or modified sequence
atggctctttggatgcggctacttccactgcttgcccttctagctctgtgggggccggaccccgcagccgcattcgtgaatcagcatctctgtggcagccacctggtggaagccctttacctggtgtgcggcgaacggggcttcttctacacaaagcctaccgaggcagaagaccttcaggtgggccaggtagaactgggaggcggccctggcgctgggtctctccaacccctggctctggaaggttcactccagaagaggggtatcgtggaacagtgctgcacaagtatctgttctttgtatcaattggagaattactgcaac

SEQ ID NO: 110414 - DNA, 324 bp, Artificial Sequence
  derived and/or modified sequence
atggcgctttggatgagactcctcccgctgctggcgctcctggcgctctggggaccagaccccgcagcggcattcgtcaatcaacatctctgcggctcacaccttgtggaggcgctctatcttgtgtgcggagaaagaggttttttctacactaagccaaccgaagccgaagatctgcaggtgggacaggtggagctgggtggaggaccgggtgccggctcactgcagccgctggcattggagggatccttgcaaaaacgcggaatcgtcgagcaatgctgtacctcgatctgctccctctaccagctggaaaactactgcaac

SEQ ID NO: 110415 - DNA, 324 bp, Artificial Sequence
  derived and/or modified sequence
atggccctgtggatgcgcctgctcccgctgctggcactcctggccctgtgggggcccgacccggcggctgcattcgtcaatcagcatctgtgcgggtcacacctggtggaagccttgtacctggtctgcggcgagcggggattcttctatactaaaccaactgaggcggaggatctgcaggttggacaggtggagctgggaggcggaccgggagccggctcgctgcaacccctggctcttgagggttcccttcaaaaacgcggaatcgtggaacagtgctgtacctccatctgctcactttaccaacttgaaaattactgcaac

SEQ ID NO: 110416 - DNA, 324 bp, Artificial Sequence
  derived and/or modified sequence
atggccctgtggatgaggctcctaccactgctggctctcctggctctgtggggaccagatcccgccgcggcttttgtgaatcagcatctgtgcgggagccacttggtggaggcactgtaccttgtctgcggagagagaggatttttttacacgaagcctacggaagcagaagacttgcaggtggggcaagttgagctgggcgggggccctggggccggctctctccagccactcgcgctggaggggagtctgcagaaaagaggcatagtggaacagtgctgcacctcaatttgtagcctgtatcagctagagaactattgtaac

SEQ ID NO: 110417 - DNA, 324 bp, Artificial Sequence
  derived and/or modified sequence
atggcgttatggatgaggctgcttcccctgctcgcactgcttgcactctgggggcctgatccggcggctgcttttgtcaatcagcacctgtgcggatcacatctggtggaggcactctacttagtttgcggcgagaggggattcttttatacgaagccaaccgaggctgaagatctgcaggtgggccaggtcgagctgggtgggggaccgggtgccggatctctccagcctctggctctggaaggctccctgcagaagcgcggtatcgtggaacagtgctgcactagcatatgctctctgtatcagctggaaaactattgcaac

SEQ ID NO: 110418 - DNA, 324 bp, Artificial Sequence
  derived and/or modified sequence
atggccctttggatgaggctgctcccactgttggcccttcttgccctgtggggcccagaccccgctgccgccttcgtgaatcagcatctgtgtgggtcccacttagtcgaggccctgtacttggtatgcggagaacgcggatttttttacacgaaacccacggaggccgaggaccttcaggtaggccaggtagagctgggaggtgggcctggagccgggagtttgcaaccacttgccctggaaggatctctacaaaagagaggtattgttgagcagtgctgtacctctatttgctctttataccaactggaaaattactgtaac

SEQ ID NO: 110419 - DNA, 324 bp, Artificial Sequence
  derived and/or modified sequence
atggctttgtggatgcgtctcctgcctctgctcgctttgctggcattgtggggcccagatcccgccgctgcctttgtgaatcagcatctgtgcggcagtcatttggtcgaagccctttacttggtatgtggcgaacgcggctttttctacaccaagcccaccgaggccgaggacctgcaggtgggtcaggtggaactgggaggtggccctggcgctggttcacttcagccactggctctggaaggttcccttcagaaacgtggtattgtggagcagtgctgcacatctatttgttccctgtatcagctggaaaactactgcaac

SEQ ID NO: 110420 - DNA, 324 bp, Artificial Sequence
  derived and/or modified sequence
atggcgctgtggatgaggcttctgccgctcctggccctgctggcgctgtgggggccggatccagctgccgctttcgtcaaccagcatttgtgcggttcacacctggtggaagccctttacctggtttgcggagagcgggggtttttctacactaagcctaccgaagccgaagatttgcaggtgggacaggtggagctggggggaggaccaggggcaggatccctgcagccactcgctctggaaggttccctccagaagagaggaatcgtcgaacagtgctgtactagcatttgctccctgtaccagctggagaactattgcaat

SEQ ID NO: 110421 - DNA, 324 bp, Artificial Sequence
  derived and/or modified sequence
atggcactgtggatgagattgctgcctctactcgcactgctggccttgtggggacccgatccggcggccgctttcgttaaccagcacctttgtggctcacatctggtggaggcgctctatctggtttgcggcgagcggggattcttctatacaaaacccactgaagccgaagaccttcaggttggccaggtggagttaggcggagggccaggcgcgggaagcctccaacccttggccctggaaggcagcctgcagaaaagagggatcgtcgagcaatgctgcacctccatttgctccctttatcagcttgagaattattgcaac

SEQ ID NO: 110422 - DNA, 324 bp, Artificial Sequence
  derived and/or modified sequence
atggctctctggatgcggttgcttcctctgcttgctctgttggcactgtggggccccgatcccgcggcggcctttgtcaaccagcatctctgtgggtcccatctcgtggaggcactctatctcgtgtgcggtgagcgcggttttttctacactaagccaacagaagctgaagacctccaggtgggacaggtggagttggggggtggcccgggggctggcagcctgcagccactggctctcgagggatctctgcagaagcggggtatcgtcgagcaatgttgcactagcatctgttctctgtaccagctggagaactattgcaac

SEQ ID NO: 110423 - DNA, 324 bp, Artificial Sequence
  derived and/or modified sequence
atggcgctctggatgcggcttctgccgctccttgcactgctggcgttgtggggtcctgatccagcagcagcatttgtcaaccagcatctgtgcgggtcccatctggttgaagcattgtacctcgtgtgcggagagagagggtttttctacactaaacctaccgaggccgaagatctgcaggtggggcaagtggagcttggaggtggaccgggcgcaggttctctgcaaccactcgcacttgaaggatcccttcagaaaagaggaattgtcgagcaatgttgtacttcaatttgtagcttgtaccagcttgaaaactactgtaac

SEQ ID NO: 110424 - DNA, 324 bp, Artificial Sequence
  derived and/or modified sequence
atggcactttggatgcggttgcttcctctgctcgcccttctggccctgtggggcccagatcccgccgcagcctttgtcaatcaacatctgtgtggttcgcatcttgtggaggctctttacctcgtgtgtggggaacgcgggttcttctatactaagcccactgaagcagaagatcttcaagtgggacaggtggaattgggcggcggaccaggtgccggatcgcttcaacctctggcactggaagggtcccttcagaagagaggcatcgtggagcaatgttgcacgtcgatctgttcactttaccaactggagaattactgtaac

SEQ ID NO: 110425 - DNA, 324 bp, Artificial Sequence
  derived and/or modified sequence
atggccttgtggatgagacttttgccgctgctggctttattggccctctggggaccggaccctgcagcagcgttcgtcaatcaacatctatgcggtagccatctcgtagaagccctgtacttagtttgtggcgaaagagggtttttctacactgataagactgaggccgaggatctgcaagtgggccaagtcgaactcggagggggcccaggtgccgggtcactgcagccacttgcccttgagggcagtttgcagaaaagaggaatagtcgagcaatgctgtacatccatttgtagcttgtaccagctcgaaaactattgcaat

SEQ ID NO: 110426 - DNA, 324 bp, Artificial Sequence
  derived and/or modified sequence
atggcactctggatgcgcctgcttccccttctagcgcttttggcactctggggtcccgacccagcggccgcctttgtcaatcagcacctatgcggatcccacctggtggaggcattatacttggtgtgtggagaacgcggattcttctacaccgacaagacggaagccgaagacctgcaggtggggcaggtggaacttggtggcggccccggtgccggtagcctacagcccttggcgctcgaaggctctttgcagaagcgcggcatcgtggaacagtgctgcacctccatctgctccttatatcagctggagaactactgcaat

SEQ ID NO: 110427 - DNA, 324 bp, Artificial Sequence
  derived and/or modified sequence
atggcactgtggatgagacttttaccactgttagccttactggctctgtggggcccggatccagccgcagcatttgtcaaccaacacttgtgcggttcccacctcgttgaggcactgtatctggtgtgcggagagagaggcttcttctacacggataagactgaggccgaagacctccaggtggggcaggtggaactggggggggggcctggggcgggatcccttcagccccttgcacttgagggcagcctacaaaagcggggcatcgtggagcagtgttgcacctccatatgctctctctaccaactggaaaattattgtaat

SEQ ID NO: 110428 - DNA, 324 bp, Artificial Sequence
  derived and/or modified sequence
atggctctctggatgagactgttgcccctcctggccctgctggccctgtggggccccgatcctgctgccgccttcgtgaatcaacacctgtgcggaagccaccttgtcgaggcactctatctggtgtgtggagagagaggattcttttacactgacaagaccgaggccgaggacctgcaggtgggccaggtggaactgggaggcggaccaggagcaggatccctccagccacttgcacttgaaggttccctgcagaagcgcggcatcgttgaacaatgctgcacttcaatctgctccctctatcagctggagaactactgcaac

SEQ ID NO: 110429 - DNA, 324 bp, Artificial Sequence
  derived and/or modified sequence
atggccctttggatgcgcttacttcctttgctggcgctgctggccctttggggccctgatccagcggctgcgtttgtgaaccagcatttgtgcggttcacacctggtagaggccctgtaccttgtttgcggtgagcgaggcttcttctacaccgataagactgaggccgaggacctgcaggttggccaagttgagctcggaggcggccccggagcgggctccctccaaccattagctctagagggttcactgcagaaacgggggatcgtagagcagtgttgcacctcgatctgctcactgtatcagctcgagaactattgcaac

SEQ ID NO: 110430 - DNA, 324 bp, Artificial Sequence
  derived and/or modified sequence
atggccctctggatgcgactcctacctttgctcgcactactggctctttggggacccgaccctgcggccgcattcgttaatcagcacctttgtgggtctcacctcgtggaagccctctacctggtgtgcggagaaagggggtttttttatactgataaaactgaagctgaagatttgcaggtggggcaagtcgagttaggagggggaccgggggctggatctttgcagccccttgcactggaaggaagtctccagaaaaggggaattgtggagcagtgttgcacatctatatgttccctctatcagctcgagaactattgtaat

SEQ ID NO: 110431 - DNA, 324 bp, Artificial Sequence
  derived and/or modified sequence
atggccctttggatgcggctcctgccgctgttggccctcctcgccctctggggcccagacccggcagccgcctttgtgaaccagcacctctgtgggtcgcatctcgtggaagcactgtacctcgtctgcggtgagcgcggcttcttctacactgacaagactgaagcggaggatctccaagtgggccaagttgagttgggaggtggaccaggagccggatcactgcagccactggcattggaaggttcgctccagaagaggggaatcgtggagcagtgctgtacttcgatctgctccctgtaccaacttgagaattactgcaac

SEQ ID NO: 110432 - DNA, 324 bp, Artificial Sequence
  derived and/or modified sequence
atggccttatggatgaggctacttccactgctggccttgttggctctctggggtcctgatcctgctgccgctttcgttaaccaacacctgtgcgggagtcacctagtggaggccctgtaccttgtgtgcggcgaacgaggctttttctacactgacaagacggaagcagaggacctgcaggtgggacaagtggagcttggcggtggaccaggggccggatccctgcagcccctcgccctggaagggagcctgcagaagagaggtatcgttgagcagtgttgcacgtctatttgctccctgtaccagttggaaaactactgtaac

SEQ ID NO: 110433 - DNA, 324 bp, Artificial Sequence
  derived and/or modified sequence
atggcactctggatgcgacttctgcctcttctagcactgctggccctctggggaccagatccagctgctgctttcgttaaccaacacctgtgcgggtctcacctggttgaggcactgtacctcgtgtgcggcgagcgtggtttcttctacaccgataagacggaagccgaggacttgcaggtaggacaggtcgaattaggaggtggcccaggagcaggatcattacagccactggccctggagggatccctgcagaagaggggcatagtcgagcagtgttgcacaagcatttgctccttgtaccaactagaaaattattgcaat

SEQ ID NO: 110434 - DNA, 324 bp, Artificial Sequence
  derived and/or modified sequence
atggctctgtggatgcggctgctgccactgttggcattgctggctctctggggacctgatccggcggctgccttcgtcaaccagcatctctgtgggagccacctggtggaggcactgtatcttgtgtgtggagaacggggtttcttctacaccgataagactgaagccgaggatctgcaggtgggacaagtggagctgggaggaggccctggagctggatcgctccagccgcttgccctggaaggctcgctccagaagcgggggatcgtcgagcaatgctgtaccagcatttgctcattgtaccagctcgaaaactactgcaac

SEQ ID NO: 110435 - DNA, 324 bp, Artificial Sequence
  derived and/or modified sequence
atggcactttggatgcggctccttcccctcttggcactgctggccctgtgggggccagacccagccgccgcctttgttaaccagcatctgtgcggctcacacttggttgaggccctgtacttggtgtgtggggagagaggattcttttacaccgataagacagaagctgaagaccttcaagtcgggcaggtcgaactgggaggtggtcccggagctggctccttgcaaccgctcgccctcgagggatcactgcaaaaaaggggtatcgtggagcagtgttgcaccagcatttgcagtctgtaccagctcgagaattattgcaac

SEQ ID NO: 110436 - DNA, 324 bp, Artificial Sequence
  derived and/or modified sequence
atggcgctgtggatgaggttgctgcctctgctggcactgctggccctgtggggaccggatccggccgctgcatttgttaaccagcatctgtgcggatcgcacttggtggaagccctctacctggtgtgcggagaacggggattcttctacactgacaagaccgaggctgaggacctgcaggttggacaggtggagttgggaggagggccaggggcgggcagcctgcaaccgctggcgctggaaggatcgctccagaagcgcggaatcgtggaacaatgctgcacctcgatctgctcattgtaccaacttgagaactactgtaat

SEQ ID NO: 110437 - DNA, 324 bp, Artificial Sequence
  derived and/or modified sequence
atggccctttggatgaggcttctaccattgcttgctcttctagcactgtggggaccagatccggccgcagcgttcgttaatcaacatctttgtggatcccatttagtagaagcgttatacctcgtatgcggcgaacgaggtttcttttacactgataagacagaagcggaagacctccaagttggacaagtggaactcggcggaggtccgggcgctggatctctccaaccccttgctctcgaagggagtttgcagaaacgaggaattgttgagcaatgttgcacttcaatttgtagtctttaccaactcgagaactattgcaac

SEQ ID NO: 110438 - DNA, 324 bp, Artificial Sequence
  derived and/or modified sequence
atggctctgtggatgagattgttaccactgctggcgctactcgccctgtggggccccgatcccgctgctgccttcgtgaatcagcacctgtgtggctcccacctcgtagaggctttgtatctcgtgtgcggggagcggggcttcttctatacagacaagactgaggccgaggatctgcaggtcgggcaagttgaactgggaggcggacctggtgccgggtccctacagccattagccttagaaggctctctgcagaaaagggggatcgtggagcagtgctgcacatcgatctgctcactgtatcagctggaaaactactgtaat

SEQ ID NO: 110439 - DNA, 324 bp, Artificial Sequence
  derived and/or modified sequence
atggctctctggatgaggctcctgcccctgttggcacttctggccctttggggtccagaccccgccgccgctttcgtgaaccagcacctttgcggaagtcacctcgtagaggcactgtacttagtgtgtggggagaggggctttttttataccgacaagaccgaagcggaggacctgcaggttggccaggtggagttgggcgggggcccgggagctggaagtttgcagcccttagctctcgaaggttcgctgcagaagaggggcattgtcgagcagtgctgcacatcgatttgttcgctttatcagctggaaaattattgcaat

SEQ ID NO: 110440 - DNA, 324 bp, Artificial Sequence
  derived and/or modified sequence
atggctctgtggatgcgcctgctgccactgttagccctgctagccctgtggggcccggatccggccgccgcgtttgtcaatcagcacctctgtggctcccacctggtggaggcgctctatctagtttgtggtgaaaggggttttttctatactgacaagacggaggcggaggaccttcaggtcggtcaagtggagctgggcgggggtcctggtgcaggcagcctgcaaccgctcgcgttggagggttccctgcaaaaacgtggcatcgtggagcagtgttgcactagcatatgctctttgtaccagttggaaaactactgtaat

SEQ ID NO: 110441 - DNA, 324 bp, Artificial Sequence
  derived and/or modified sequence
atggcactttggatgcggctgcttcctcttctggccctcctggctctttggggacctgatccggcagcagcatttgtgaatcagcatctttgtgggagccatcttgtcgaggccctttacctggtgtgcggtgaaagaggctttttctacactgacaagacggaggccgaggatcttcaagtcggacaggtggagctcggaggaggtcctggagcaggaagcctgcagccactggctttggagggttctcttcaaaagagaggaatagtggaacaatgctgtacttccatttgttcgctctaccaactcgaaaactactgcaat

SEQ ID NO: 110442 - DNA, 324 bp, Artificial Sequence
  derived and/or modified sequence
atggctctttggatgaggcttcttcccctgttggctcttctcgctttgtggggccctgatcccgcagcagcattcgtgaaccaacatttgtgtggatcacatctcgtggaggccttgtatctggtttgcggtgaacgcggtttcttttacaccgacaagactgaagccgaggatcttcaagttggacaggtcgaacttggaggcggccctggggcgggttcccttcaaccacttgcactggaaggtagccttcagaaaaggggcattgtggagcagtgttgtacctcgatctgttcgctgtaccagctggagaactactgcaat

SEQ ID NO: 110443 - DNA, 324 bp, Artificial Sequence
  derived and/or modified sequence
atggctctgtggatgaggttgcttccactgcttgcccttctggctctttggggaccggatccagcagcggcatttgtgaatcagcacctttgtggttctcatctcgtggaagccctgtacctggtgtgcggtgagagaggcttcttttacaccgacaagaccgaggccgaggatctgcaagtcggccaggtggaactgggtgggggacccggagcagggtcgttgcagcctcttgcacttgaaggtagcctccaaaaacgaggtatcgtcgaacagtgttgcacctcgatttgcagcctctaccaattggaaaactactgtaac

SEQ ID NO: 110444 - DNA, 324 bp, Artificial Sequence
  derived and/or modified sequence
atggcactgtggatgcggcttctgcccctgctggctctgttggccctctggggccccgaccccgctgctgcttttgtcaaccaacatctttgcggatcccacctggtagaggcactttacctggtttgcggtgagcgcggctttttctacacagacaaaaccgaagctgaggatttgcaggtgggacaggtcgagcttggtggagggcctggtgctggaagtctgcaacctcttgctctggaaggatcacttcagaagcggggaatagtggagcagtgctgcactagcatatgctctctatatcagttagagaactattgcaac

SEQ ID NO: 110445 - DNA, 324 bp, Artificial Sequence
  derived and/or modified sequence
atggccctttggatgcgactgctgcctctgcttgcacttctggctctgtggggtccagacccggcagcagcgtttgtgaatcagcatctttgcggttcgcacctggtcgaggcgctttaccttgtgtgtggagaacgtggtttcttttacacggataaaaccgaggcagaggacctgcaggtgggacaggtggagctgggtggtggccctggggcgggatcgcttcaacccctggcgctggaggggtcgcttcagaagagaggtattgtggaacaatgttgtacttccatttgttcactctaccaactggaaaactactgcaac

SEQ ID NO: 110446 - DNA, 324 bp, Artificial Sequence
  derived and/or modified sequence
atggccctgtggatgcggctgctcccactgcttgcactgctggcgctttggggccctgacccggctgccgcctttgtcaaccagcatctgtgcggatcccacctggtcgaggcgctctatctggtgtgcggtgaacggggtttcttctacactgacaagaccgaagcggaggacctgcaggtggggcaggtcgaactcggtgggggaccgggagcaggctcgctgcagccgctcgccttggaagggtcgttgcaaaagcgcgggatcgtggaacagtgctgcacctcgatctgttcgttgtaccagctcgagaattactgcaac

SEQ ID NO: 110447 - DNA, 324 bp, Artificial Sequence
  derived and/or modified sequence
atggcactgtggatgaggctccttcccctgttggctctgctggcgctgtggggccccgacccagctgctgctttcgtaaatcagcacctttgtggttcccatttggtcgaggctctgtacctcgtctgcggcgagcgcggattcttctacactgacaaaacagaagccgaggacctccaggtgggtcaagtagagctcggtggcggtccaggcgcaggctctctccaacccctggctctggaaggtagtctgcagaagagaggtattgtcgagcagtgctgcacgagcatctgttccttgtaccagctggagaattactgcaat

SEQ ID NO: 110448 - DNA, 324 bp, Artificial Sequence
  derived and/or modified sequence
atggcactgtggatgcggctgctccctctgctggccttgctggccctttggggacctgatcctgctgccgcttttgtgaatcagcacctctgtggctcccatttggtcgaggccctgtacctggtgtgtggtgaacggggattcttctacacagataagacagaagccgaagatctgcaggtggggcaggtagagctgggcggcggccctggcgcagggtccctgcagcccctggccctggagggctcactccagaagagaggcatcgtggaacaatgttgcactagcatctgcagtctttaccagcttgagaactattgcaat

SEQ ID NO: 110449 - DNA, 324 bp, Artificial Sequence
  derived and/or modified sequence
atggccctctggatgagactcctacccctgctcgccctgctcgccctgtggggccctgatccagccgccgctttcgttaatcagcatctgtgcgggtctcatctcgtcgaagcgctatatctagtttgcggagaacgtggctttttctatacagataagaccgaggccgaggatcttcaggtgggtcaggttgagctcggagggggccccggagcgggctcattgcagcccctggcgctggagggctccttacagaagcggggaatagtggaacagtgttgtacttctatctgtagcctttaccagctagagaattattgtaac

SEQ ID NO: 110450 - DNA, 324 bp, Artificial Sequence
  derived and/or modified sequence
atggcgctgtggatgcgactgcttcccctgctcgcactcttggcactttggggacctgatcccgcagcggcattcgtgaatcagcacttgtgtggctcacatctggtcgaggcactgtaccttgtgtgtggagaacgcggattcttttacaccgataagaccgaagcagaggacttgcaagtgggacaggtggaactcggagggggcccaggagcaggttcgcttcagcctctcgcccttgaaggatcccttcagaagagaggtattgtcgaacagtgttgcacttccatctgttcactctaccaactggagaattactgcaac

SEQ ID NO: 110451 - DNA, 324 bp, Artificial Sequence
  derived and/or modified sequence
atggccctctggatgcggcttctgcccctgttggcgcttctcgctctgtggggccctgatcctgccgcagctttcgtcaaccagcacctttgcgggtcacatctggtcgaagctctttacctggtctgcggcgaacgaggattcttttacactgataagaccgaagccgaggacctccaagtgggtcaagttgaactgggaggtggcccgggcgcgggatcgctgcagccgctcgcgctcgagggatcactgcaaaagaggggaattgttgagcagtgctgtacctcgatctgttccctctaccagctggagaattactgcaac

SEQ ID NO: 110452 - DNA, 324 bp, Artificial Sequence
  derived and/or modified sequence
atggccctgtggatgcggctgctgcctcttctcgctttactcgccctttggggaccggaccctgctgcggctttcgtaaatcagcacttatgcggaagccacctggtggaggctctgtatctggtgtgtggagaaagaggattcttttacacagacaagacagaagccgaggatctgcaggtgggccaggtggagctgggcgggggacccggagccggatccctccagccactggcgctggagggcagcctccaaaaacggggaatagtcgaacagtgttgcacctccatttgttcactttaccagcttgaaaattactgtaac

SEQ ID NO: 110453 - DNA, 324 bp, Artificial Sequence
  derived and/or modified sequence
atggctctgtggatgagactattgcccctgctggcactattagctctgtggggccctgacccagcagccgctttcgtgaaccaacacctgtgtgggagtcatttggtggaagcattgtacctggtctgcggcgagcggggtttcttttataccgataaaactgaggccgaagacctgcaggtgggacaggtggagttgggcggaggacctggagctggcagcctgcaacccctggcacttgaagggtctctccagaagcggggtattgtagagcagtgttgtaccagcatttgctcattgtatcaactcgagaactactgtaat

SEQ ID NO: 110454 - DNA, 324 bp, Artificial Sequence
  derived and/or modified sequence
atggcactttggatgcggctgctgcccctgcttgcgctgctggcactctggggacctgatccagcagcagcatttgtgaaccaacacctttgtggttcgcatctcgtggaggcactgtacttggtttgtggagaacggggcttcttttacacggataaaactgaggcagaggacctgcaggtggggcaggtggagcttggaggagggcctggggcaggcagccttcaaccactggctctcgaaggctccctgcaaaagaggggtattgtcgaacaatgctgtaccagcatttgtagcttgtaccagcttgaaaactattgtaac

SEQ ID NO: 110455 - DNA, 324 bp, Artificial Sequence
  derived and/or modified sequence
atggccttgtggatgaggctgctgcctcttctggcgctgctggcactttgggggcccgacccggccgcagcttttgtgaatcaacatttgtgtggctcacaccttgtggaggccctttaccttgtctgtggggaaagggggtttttctacactgataaaacggaagcggaagatctccaagtggggcaagttgaactgggtggcgggcctggagcaggaagcctccagcctcttgcactcgagggatcgctccagaagcgcggcattgtggagcagtgctgtacctcaatttgttcgctttaccaactggagaattactgtaat

SEQ ID NO: 110456 - DNA, 324 bp, Artificial Sequence
  derived and/or modified sequence
atggccctttggatgagactgctgccattgttggccctcttggcactctggggacctgatccagccgcggctttcgtcaatcagcatctctgtgggtcacacctcgtcgaggcgctgtacctcgtgtgtggagagcgcggattcttttacaccgacaaaaccgaggccgaagatctgcaagtggggcaagtggaactcgggggcggaccgggtgcaggctccctgcaacctttggcactggaaggttctctccagaagagaggcatcgtggaacagtgctgcacttcgatctgttccctgtaccagctggagaactattgtaac

SEQ ID NO: 110457 - DNA, 324 bp, Artificial Sequence
  derived and/or modified sequence
atggcactctggatgaggctgttgccactgctcgctttgctagcgctgtgggggccggacccagcggctgcatttgttaaccagcatctgtgtggaagtcatctggtggaagctctttaccttgtctgcggcgagcggggatttttttataccgataagacagaggctgaagatctgcaagtaggacaggttgagctgggtgggggtcctggggccggatctctgcagcctcttgctctcgaaggatctctgcagaaaagggggattgtggagcaatgctgtacatctatttgtagcctgtaccagctagaaaattactgcaac

SEQ ID NO: 110458 - DNA, 324 bp, Artificial Sequence
  derived and/or modified sequence
atggctttgtggatgcggttgttgccactgttggccttattggccttgtggggacccgatccagccgcagcattcgtaaatcagcatttatgtggttctcatctagtagaagctttgtatttagtctgcggggaaagggggtttttctacactgataagaccgaggcagaagacttgcaagttggccaggtcgagcttggaggtggcccaggtgcaggcagccttcagccgcttgctctggagggatcattacagaaacgaggaatagtggagcaatgctgtacttcaatatgttctttgtatcagctcgaaaactattgtaac

SEQ ID NO: 110459 - DNA, 324 bp, Artificial Sequence
  derived and/or modified sequence
atggcactttggatgcgactgctgccactgctggccttgctagccctgtggggaccagacccggctgctgccttcgtcaaccagcacctgtgcgggtcccacttggttgaagcgctctatctggtgtgcggagaaagggggtttttctacactgacaagactgaagccgaggacttacaagttggccaggtggagttgggcggcgggccgggcgccggcagcctacagcctcttgctctcgaaggcagtctacagaaacgcggcatcgtggaacaatgttgcacatccatatgctctctgtaccagctcgagaactactgcaac

SEQ ID NO: 110460 - DNA, 324 bp, Artificial Sequence
  derived and/or modified sequence
atggccctatggatgcgcctgctgcctttacttgccctccttgctttgtggggaccggaccccgccgcagctttcgtgaatcaacatctctgtggctctcatctggtcgaagctctctatctggtttgcggggagagaggcttcttttataccgataagactgaagctgaagacttgcaagtagggcaggtagagttgggaggagggcccggcgccgggtctctacagccactcgcactagaggggtccctgcagaaaagaggaattgtcgagcaatgttgtacctcgatttgttcactttaccagctggaaaactactgcaac

SEQ ID NO: 110461 - DNA, 324 bp, Artificial Sequence
  derived and/or modified sequence
atggcgctctggatgcggctgctcccattgctggctcttttggcgttgtggggccctgatccggcagccgcctttgtgaatcagcatctctgcggaagccacctggtggaggcgctgtacctggtgtgcggagaaagaggattcttttacactgacaagaccgaagccgaagatttgcaagtggggcaagtggaacttgggggcggaccgggcgcgggcagcctgcagccattggctctggagggcagcttgcagaagcggggtatcgtggagcagtgttgtacttcgatttgctcgctctatcagctggagaactactgcaac

SEQ ID NO: 110462 - DNA, 324 bp, Artificial Sequence
  derived and/or modified sequence
atggcactgtggatgcggctgttgccgttgctcgcattgttggcgctgtggggacctgacccagccgccgcatttgtcaatcagcacttgtgtggatcgcaccttgtcgaagcactgtacctggtgtgcggtgaacgaggttttttctacaccgataaaactgaagcagaagatctccaggtgggacaagtggagctgggaggaggtcctggagcgggaagcctgcagccactcgccctcgaaggctccctgcagaagagaggtatcgtggaacaatgttgtacttccatttgttccctgtaccaactcgagaactactgtaac

SEQ ID NO: 110463 - DNA, 324 bp, Artificial Sequence
  derived and/or modified sequence
atggccctctggatgaggctgctcccacttttggctctgttggccctgtggggccccgaccccgccgcagccttcgtcaatcaacacctttgcggatctcatctagtagaagcactgtatctggtgtgcggagaaagaggcttcttctatacggataagactgaagctgaggatctgcaagtcggtcaggtagagctgggcggagggcccggtgctggcagcttacagccactcgccctggagggttcactccagaagagaggaattgtggagcagtgttgcactagcatatgctcattgtaccagctcgagaactactgcaac

SEQ ID NO: 110464 - DNA, 324 bp, Artificial Sequence
  derived and/or modified sequence
atggctctgtggatgcgtctgctccctctgctggcactcctggctctctggggccccgaccctgccgctgccttcgtgaatcagcatctgtgcggaagccacctggtcgaagcactctacctggtctgcggtgagagaggcttcttctacacagacaaaactgaagccgaggacttgcaggtgggacaggtagaactcggtggaggccctggcgctggctcccttcagcccctcgctcttgaaggtagtttgcagaagagaggcatcgttgagcagtgctgcacatcaatctgcagcttgtaccagctggaaaattattgtaac

SEQ ID NO: 110465 - DNA, 324 bp, Artificial Sequence
  derived and/or modified sequence
atggctctgtggatgcgtctcttgccgttactggcgctcctcgccttgtggggtcccgaccctgcggccgcgttcgtgaaccagcatctgtgcgggagccaccttgttgaggcgctttacctggtctgcggcgagcgcggtttcttctatactgacaagaccgaggccgaggacttgcaggtcggtcaagtggagctgggtggaggtcccggcgccggttctctccagcctttggcgcttgagggcagcctccagaagcgcggtattgttgaacaatgctgcacgtctatctgcagtctgtaccagctggagaactattgtaac

SEQ ID NO: 110466 - DNA, 324 bp, Artificial Sequence
  derived and/or modified sequence
atggccctgtggatgaggctgttacctctgctggccttgctggcgctgtggggcccagatccagcggcggctttcgttaatcagcatctgtgcgggtcacacctagtggaagccttatacctggtgtgcggagaacgaggatttttttataccgataaaactgaagctgaggatctccaggtcggacaagtggagctcggtggagggccaggagctgggtctctgcaaccactcgccctggaaggcagtttgcagaagagggggatcgtcgagcagtgttgcacatccatttgctcgctctaccaattggaaaattattgcaat

SEQ ID NO: 110467 - DNA, 324 bp, Artificial Sequence
  derived and/or modified sequence
atggccttgtggatgaggctgcttccacttcttgcgctgttggcactctggggtccagatccagccgccgcatttgtcaatcagcatctgtgtggatcacatcttgtggaggcactctacctcgtgtgtggcgagcggggcttcttttacaccgataagaccgaagctgaagatttgcaggtcggtcaagtggagctgggtggagggccgggagcagggtcgcttcaaccactggcactggaaggttccctgcagaagcggggaatagtggaacaatgttgtacttcaatttgttcgctgtaccagcttgagaattactgcaat

SEQ ID NO: 110468 - DNA, 324 bp, Artificial Sequence
  derived and/or modified sequence
atggcactgtggatgcgcctgctgcccctgttagcactcctggctctctggggacccgatcctgccgccgcatttgtcaatcagcacctgtgcggcagccacttggtggaagcactttaccttgtgtgcggtgaacgcggattcttttacacggacaaaactgaggccgaggaccttcaggtcggccaagttgaactgggtggcggaccgggcgctggatccctgcagccccttgccctcgaagggtcccttcagaaacggggaatcgttgagcagtgctgtacatctatttgctccctgtatcagctggagaactattgtaac

SEQ ID NO: 110469 - DNA, 324 bp, Artificial Sequence
  derived and/or modified sequence
atggccctttggatgcgtctattgccattacttgcacttcttgccctttggggcccagaccctgcggcagcatttgtgaaccaacacctgtgcggctcccatttggttgaggcattgtatcttgtgtgtggtgagcgaggctttttttatactgacaaaactgaagctgaggacttacaggtcggacaggttgaacttggaggtggcccaggagctggttcactgcaacctttggccctggaaggctctttacagaaacggggaatcgttgaacagtgctgcacatccatttgctctctgtatcaattagaaaattattgcaac

SEQ ID NO: 110470 - DNA, 324 bp, Artificial Sequence
  derived and/or modified sequence
atggccctgtggatgaggctgcttccattattagcgctgctggccctttggggacccgaccctgccgcagcatttgtaaatcaacacctctgtgggtcgcacctagtggaagccctgtacctggtatgcggtgaaaggggctttttctacacagacaaaacggaagccgaagacctgcaggtcggccaggtcgagctgggaggtggtcccggcgcaggctctctccagcctctggcgctggagggctccctgcagaaaagaggaatagttgaacagtgttgtacctctatttgttcattgtatcagctggagaattactgtaat

SEQ ID NO: 110471 - DNA, 324 bp, Artificial Sequence
  derived and/or modified sequence
atggccctttggatgcggctcttaccactgctcgctttgctggcgctctggggccctgaccccgctgcagcattcgtcaaccagcatctgtgtgggtcccatcttgtggaggctctgtacctagtgtgcggcgaacgggggttcttctatacagataaaacggaggccgaggacctgcaagtcgggcaggtggagctcggcgggggccctggagccggcagcctccagcctctggctctggagggatctctgcagaagcgggggattgtcgagcaatgttgcaccagcatatgttctttgtaccagctggagaactattgcaac

SEQ ID NO: 110472 - DNA, 324 bp, Artificial Sequence
  derived and/or modified sequence
atggctctctggatgaggttgctgccactgctggctctgcttgcgctttggggccccgaccccgctgctgccttcgtgaatcagcacctatgcggatcccacctggttgaagcgctctacctggtctgtggtgagcgtgggttcttctacacagataaaaccgaggccgaggacctccaggtaggccaggtggagctgggtgggggccctggcgccggcagcctgcagccgctggcattggagggttcgttacagaaacgcggcattgtggagcaatgctgtacctccatttgcagtctatatcagttagagaactactgtaac

SEQ ID NO: 110473 - DNA, 324 bp, Artificial Sequence
  derived and/or modified sequence
atggcactgtggatgcgactgctcccgctgcttgccttgctggcgctttggggcccagaccctgcagcagccttcgtgaaccagcatttgtgtgggtcccacctggtggaagccctttaccttgtttgcggtgaacgcgggtttttctacactgataagacggaggcagaggacctgcaagtcggacaagtggagctgggtggcggacccggtgcgggatccttgcagcctctggcactggaaggatccctgcagaaacgcggcatagtggaacagtgttgcacctctatctgtagcctctaccaactcgaaaactattgtaac

SEQ ID NO: 110474 - DNA, 324 bp, Artificial Sequence
  derived and/or modified sequence
atggctctgtggatgcggcttctgcctcttttggcccttttggcactctggggcccagacccggcagctgcgtttgtgaatcagcacctctgtgggtcccatttggtggaggccctgtaccttgtgtgtggagaaagaggattcttttacactgataagactgaagccgaagatctccaggtgggccaggtagagctgggtggcggaccgggagcgggttcgctgcaacccttggcactcgaagggagccttcaaaagcgcggcatcgtcgagcaatgctgtaccagtatttgctcgctgtaccaacttgaaaactactgcaac

SEQ ID NO: 110475 - DNA, 324 bp, Artificial Sequence
  derived and/or modified sequence
atggctctctggatgagacttctgcccctcttggccctactggcgctatgggggcctgatcccgccgcggcctttgtgaaccagcatctatgtggctcccatctggtggaagcgctgtatctggtttgtggcgagcgtggattcttctataccgataagaccgaggctgaggacctgcaggtcggacaggttgagttgggtggaggacccggcgcaggcagcttgcagccacttgccttagaaggctccctgcagaaacgcggaatagtcgagcagtgctgtacgtccatctgctccttataccagcttgaaaattactgtaat

SEQ ID NO: 110476 - DNA, 324 bp, Artificial Sequence
  derived and/or modified sequence
atggcactctggatgagactgttgcctctgcttgccttgttagccctgtggggccctgacccagccgccgctttcgtgaaccagcatctctgcgggagccatctggtcgaggcactttatctggtgtgcggcgagaggggtttcttctatactgacaagactgaagcggaagatttgcaggtgggacaggtagaacttggtggggggcctggcgcaggctcactacagccactagccttagagggttccctgcagaaaagaggtattgtggaacagtgttgcacatccatctgtagtctgtatcagctcgaaaactattgtaat

SEQ ID NO: 110477 - DNA, 324 bp, Artificial Sequence
  derived and/or modified sequence
atggcgctgtggatgagactgcttcccctgctggcactgcttgccctgtggggccctgacccagcagcagcatttgtgaaccaacatctttgcggtagccatctggtggaggccctgtacctggtctgtggagaaaggggattcttttacaccgataaaacggaggcagaggatctccaagtcgggcaagtcgagcttggaggcgggccgggagcaggctctcttcaacctttggcactggaaggctccctgcaaaagcgagggatcgtggagcaatgctgcacttcgatttgttcactgtaccagctggagaactattgtaat

SEQ ID NO: 110478 - DNA, 324 bp, Artificial Sequence
  derived and/or modified sequence
atggctctgtggatgaggctcctgccgctgctggccctgttggcgctgtgggggccggatcctgcggcagcctttgtcaatcagcatctgtgtgggagccacctggtggaggccctgtacctggtgtgcggtgagcgcggcttcttctacaccgacaaaacggaagcagaggatttgcaagtgggacaggtggaactgggaggcggaccgggagcgggaagcctgcaacctcttgcattggaaggctccctccaaaagcgggggatcgtcgaacagtgttgcacctcaatttgctcactttatcagctggagaactactgcaat

SEQ ID NO: 110479 - DNA, 324 bp, Artificial Sequence
  derived and/or modified sequence
atggcgctttggatgcgcctgcttcccctgcttgcactcctcgcactgtggggaccagacccggcagcagctttcgtcaaccaacacctgtgcggatcgcatcttgtggaggcactgtacctcgtgtgtggcgagcgagggtttttctacacggataaaaccgaggcggaggatctgcaagtcggacaggtggaacttgggggcggtccaggtgcaggatcgcttcaaccacttgcactcgagggatcgctccagaagaggggcatcgtggaacagtgttgcacctcaatctgtagcctgtaccagctcgaaaactattgtaac

SEQ ID NO: 110480 - DNA, 324 bp, Artificial Sequence
  derived and/or modified sequence
atggcactgtggatgcggctgcttcccctcctggcgcttctggcgctctggggccccgatccagcagcggcatttgtcaaccaacacctgtgtggttcacatcttgtggaagccttgtacctcgtgtgtggagaaagaggtttcttttacactgataagacggaagcagaagatctccaagttgggcaggtggaacttggtggaggccctggcgccggtagcctgcagccactggctctggaagggtcactgcaaaagaggggcatagtggagcaatgctgcactagcatctgctcgctgtaccaactcgagaattactgtaac

SEQ ID NO: 110481 - DNA, 324 bp, Artificial Sequence
  derived and/or modified sequence
atggcactttggatgagattgttaccactacttgcattattagcattatggggacctgatcctgctgctgcttttgtaaatcaacatttatgtggaagtcatcttgttgaagcactttatttagtctgtggtgaaagaggatttttctatacagataagactgaagcagaagatcttcaagttggacaagtcgaattaggaggaggaccaggtgcaggttcattacaacctttggcacttgaagggtctttacaaaagagaggtattgtagaacaatgctgtacttcaatttgttcattatatcaattagaaaattattgtaat

SEQ ID NO: 110482 - DNA, 324 bp, Artificial Sequence
  derived and/or modified sequence
atggcgctctggatgaggctgctcccacttcttgctctcctggcactgtgggggcccgatcccgcagcggccttcgtcaaccaacacctctgcggcagccatcttgtcgaagccctgtacctcgtgtgcggagaacgcggattcttttacactgataagacggaggccgaggatttgcaggtgggacaggtggaacttggaggcgggcctggagccggcagcctccagcctctcgctctcgaaggcagtttgcagaagcgtggaattgttgaacagtgctgcaccagcatctgcagcctgtaccagctcgaaaactactgtaac

SEQ ID NO: 110483 - DNA, 324 bp, Artificial Sequence
  derived and/or modified sequence
atggctctctggatgcggctccttccgctgctcgctctcctggccctctggggacccgacccggccgctgcattcgtgaaccaacatttgtgcgggtcccaccttgttgaggcactgtatctcgtgtgtggcgaaagaggatttttctacacggacaaaaccgaagccgaagatctgcaggtggggcaggtggagctcggcggaggcccaggcgccggctcgctccagccgctcgcgcttgaaggctctctgcaaaagcggggtatcgtggagcagtgctgcactagcatctgttccctgtaccaactcgagaactattgcaac

SEQ ID NO: 110484 - DNA, 324 bp, Artificial Sequence
  derived and/or modified sequence
atggctttgtggatgagactccttccgcttctagccctcctggcactgtgggggccagatcctgcagccgcgttcgttaatcagcacctctgcggatctcatctggtggaggcactgtatttggtgtgtggggagcgaggtttcttttacactgacaagacggaagctgaggatttgcaggtggggcaggtggaactcggaggggggcctggcgctggatctttacagcctctagccctcgagggttcactgcagaagagagggatcgtcgagcagtgctgtacatctatctgttcattgtaccagctggaaaactattgcaac

SEQ ID NO: 110485 - DNA, 324 bp, Artificial Sequence
  derived and/or modified sequence
atggccttgtggatgagacttctgccacttctggcactgctggctctgtggggccctgacccagccgcagcattcgtgaaccaacacctgtgcgggtcccatctggtcgaagcgctctaccttgtgtgtggggaaagaggctttttctacactgataagaccgaagcggaggatcttcaagtgggccaagtcgaactggggggaggcccgggcgcaggctcccttcagccactggcgcttgaaggatcgctccagaaacggggaattgtggaacaatgttgtacttcaatttgctcgctgtaccaattggaaaactactgtaac

SEQ ID NO: 110486 - DNA, 324 bp, Artificial Sequence
  derived and/or modified sequence
atggctttgtggatgcgcttgctgcccctcctcgcactcctggcactttggggcccagatccggcggcggccttcgtgaatcaacacctgtgcgggtcccacctggtggaagcgctctacctggtgtgcggagagcggggcttcttttacacggacaaaaccgaggcagaagatctgcaggtgggtcaggtggagttgggaggaggcccgggagccggcagcctccagccgctcgccctcgagggtagcctgcagaagcgcggcattgtcgaacaatgctgcacttcgatctgcagcctctaccagttggagaattactgcaat

SEQ ID NO: 110487 - DNA, 324 bp, Artificial Sequence
  derived and/or modified sequence
atggccctgtggatgcggctgttgcccctcctggcacttttggctctctggggacctgacccggcggcggcctttgtcaaccaacatctctgcggttcgcacctcgtggaagccctgtacctggtgtgtggcgaaagagggttcttctacaccgacaagactgaagctgaggatctgcaggtgggccaagtggagctcggaggaggaccaggcgccggatccctgcagccgctggcactggaagggtcacttcaaaaacgcggaatcgtcgagcagtgctgtaccagcatctgctcgctctaccagctggagaactactgcaat

SEQ ID NO: 110488 - DNA, 324 bp, Artificial Sequence
  derived and/or modified sequence
atggcactgtggatgcggctacttccccttctggcactgctggccctgtgggggcctgatccagctgccgcgttcgtcaatcagcacctctgtggatctcatctggtcgaggccctatatctcgtgtgtggggaacgggggttcttttacacagataaaacagaggcagaagatctccaggtaggacaggttgaattagggggagggcccggggctgggtctctgcagccactggcactggaagggtctctccaaaagaggggaattgtagaacagtgctgtacaagtatttgcagtctgtatcagctcgagaactattgcaac

SEQ ID NO: 110489 - DNA, 324 bp, Artificial Sequence
  derived and/or modified sequence
atggccctgtggatgcggcttttaccactgctcgccctgctcgccctgtggggcccagacccagccgccgcatttgtgaatcagcacctttgcggaagtcacctagtcgaagccctgtacctcgtgtgcggtgaacgcggcttcttctacaccgacaaaactgaagctgaagatctgcaggtcggacaggtggaactcggcggtggacccggcgccggctccctccagcccctcgccctagagggttctctgcagaaacgggggatcgttgagcagtgttgcactagtatctgctcactctaccaactcgagaattattgtaat

SEQ ID NO: 110490 - DNA, 324 bp, Artificial Sequence
  derived and/or modified sequence
atggccctgtggatgcggcttctacctctgctggcgctgttggcgctctggggcccagaccctgctgccgcattcgtgaaccagcatctgtgcggaagtcaccttgtcgaggctctgtacctggtgtgtggcgagagaggcttcttttatactgataagactgaggcagaggacctgcaggtgggacaagtcgaactgggcggtggacccggagcgggaagcctacagcctctagctctggaaggaagtctccagaagaggggcatcgtcgagcagtgctgcaccagcatttgttcgctttatcagctcgaaaactattgtaac

SEQ ID NO: 110491 - DNA, 324 bp, Artificial Sequence
  derived and/or modified sequence
atggcactatggatgagacttctccccctgttagccctgctggccctgtggggtcccgacccagcagccgcattcgttaaccagcacctctgcggcagccacttagtagaagccctgtacctcgtctgcggcgagcggggattcttctataccgataagacagaggcagaagacctacaggtgggccaagtcgaactcggaggcggccctggtgctggatcgctacagccactggcgttggagggtagcttacagaaaagggggatcgttgagcagtgttgcactagcatttgttctttatatcagttggaaaattactgtaac

SEQ ID NO: 110492 - DNA, 324 bp, Artificial Sequence
  derived and/or modified sequence
atggcgttatggatgcgtttattaccgttattagcgctattagcgttatggggtccggatccggcggcggcgtttgttaatcaacatctatgtggttcgcatctagttgaagcgctatatttagtatgtggtgaacgaggttttttttatacggataaaacggaagcggaagatttacaagtaggtcaagttgaactaggtggtggtccgggtgcgggttcgttacaaccgctagcgctagaaggttcgttacaaaaacgtggtatagttgaacaatgttgtacgtcgatatgttcgctatatcaattagaaaattattgtaat

SEQ ID NO: 110493 - DNA, 324 bp, Artificial Sequence
  derived and/or modified sequence
atggcactttggatgcgacttctccctcttctcgcactccttgcactgtggggtcctgaccctgcagcggcatttgtgaatcagcatctttgcggaagccatcttgtcgaagccctctacctggtctgcggggaaagaggattcttttacactgataagaccgaagctgaggaccttcaggtcgggcaagtggaactgggcggtggtccaggtgcgggatcgttgcaaccccttgcgctggagggctcgcttcagaagcggggaattgtggaacaatgctgtacctccatttgttcactgtaccaactcgaaaactactgtaac

SEQ ID NO: 110494 - DNA, 324 bp, Artificial Sequence
  derived and/or modified sequence
atggccttgtggatgcggcttctccccctgcttgctctcctggccctctgggggccggacccagcagcagcgttcgtcaatcagcacttgtgcggatcccatctggtggaagccctttacctggtgtgcggcgaacgtggatttttctacacggacaaaactgaagcggaggatctgcaagtcggacaggtggagttgggcggagggccaggggcaggatcgctgcagccgctcgcgctcgagggtagcttgcagaagagaggaatcgtcgagcaatgttgtacctccatctgctcattgtatcaactggaaaactactgcaac

SEQ ID NO: 110495 - DNA, 324 bp, Artificial Sequence
  derived and/or modified sequence
atggcgctgtggatgagattgctccctctgttggcgctgctggccctttggggaccagacccagcagccgcctttgtgaatcaacatctgtgtggatcgcacttggttgaagcactctatctggtttgcggagaacggggattcttttacactgataagactgaagcggaggacttgcaggtgggacaggtggagctcggcggaggccctggggcggggtcccttcagccgttggctctcgaaggaagtctgcagaagcgaggaatcgtcgagcaatgttgcacctcgatctgctccctttaccaactggagaactactgcaac

SEQ ID NO: 110496 - DNA, 324 bp, Artificial Sequence
  derived and/or modified sequence
atggctctctggatgaggctcctgcctctgctggctcttctggccctctggggacctgacccagctgctgcctttgtcaatcagcatctgtgtggtagtcatctagtggaggccttgtacctggtgtgcggcgagcgcggattcttctataccgataaaaccgaagctgaagacctccaggtgggccaagtggaactgggcggaggtcccggggctggctccctgcagccactggcactggagggaagtcttcaaaagcggggaatcgtggagcagtgctgtacttctatctgttctctgtaccagctcgagaactactgcaac

SEQ ID NO: 110497 - DNA, 324 bp, Artificial Sequence
  derived and/or modified sequence
atggcgttgtggatgcgattgctgcccttgctggccctcctcgccctctggggaccggacccggcagctgcgtttgtgaatcagcacttgtgcggatcccatcttgtggaggcactgtacctggtgtgcggggagcgcggattcttttacaccgataagactgaagccgaggacctgcaggtggggcaggtggaactgggcggaggtccgggggctggctccctccagcctcttgcgctcgaaggttctctgcagaagagaggaattgtggagcagtgttgtacctcgatctgctcgctctaccaattggaaaactactgcaac

SEQ ID NO: 110498 - DNA, 324 bp, Artificial Sequence
  derived and/or modified sequence
atggccctttggatgagactattgcccttgctggccctattagctctctggggccccgaccccgccgccgccttcgtgaatcagcacctgtgcggttcacatctggtggaggccttgtacctggtgtgtggcgagcgtggattcttctacaccgataagacagaagcggaggacctacaggtgggacaggtagaattgggcggtgggccgggcgccggctcactccagcccttggccctggagggtagtctccaaaagaggggaatcgttgagcaatgttgtacatcaatttgtagcctctatcagctggaaaactactgcaac

SEQ ID NO: 110499 - DNA, 324 bp, Artificial Sequence
  derived and/or modified sequence
atggctctttggatgcggctgctgcctctcctcgcactccttgcgctgtggggaccagatccggcggccgcgtttgtcaaccaacatctctgtgggtcccacttggtggaagccctgtacctcgtttgtggcgagagggggttcttctacaccgacaaaactgaggctgaagatctgcaagtcggacaagtggagcttggaggtggaccgggagccggctcgctgcaaccgctcgcgcttgaggggtcccttcagaagcgcgggatcgtggaacagtgctgcaccagcatttgctcgctctaccagctggagaattactgcaac

SEQ ID NO: 110500 - DNA, 324 bp, Artificial Sequence
  derived and/or modified sequence
atggccctctggatgaggctgctgcctctgctggcgctgctggcgctttggggcccggacccggcggccgcatttgtgaaccagcatctctgcggctcacatctggtggaggctctctacctggtctgtggagaaagaggattcttctacaccgacaagaccgaagcagaagatctccaggtcggacaggtggagctggggggaggaccgggagcggggtcgctgcagcccctcgcgcttgaaggatcactgcagaagagaggaatcgtcgaacaatgctgcactagcatttgctccctgtaccaactcgagaattactgcaac

SEQ ID NO: 110501 - DNA, 324 bp, Artificial Sequence
  derived and/or modified sequence
atggcactctggatgaggcttctgcccttactggcactcctggcactttgggggcccgacccagcagccgctttcgtaaaccaacatctgtgtggatcacatctggtagaagctctgtatctcgtttgcggggagcgaggtttcttttatactgataagacagaggctgaagatctccaggtcggccaggtggagctaggaggcggtcctggcgctgggagtctgcagcccctcgcactggagggcagtctccaaaagcgaggcatagtcgagcagtgctgcacctctatatgttctctctaccagttggaaaactattgcaat

SEQ ID NO: 110502 - DNA, 324 bp, Artificial Sequence
  derived and/or modified sequence
atggcattgtggatgcgcctgctgccactccttgctctgctggccctctggggaccagaccccgccgcagcatttgtgaatcagcacttgtgcgggtcccacctcgtggaggcactgtatctggtttgcggggaacgggggttcttctacacggacaagacagaggcggaggacctccaggttggccaggtggaactcggtggagggccaggcgctggaagcctgcaaccactggccttggagggttccctgcagaagcgcggtattgtggagcagtgctgtacctctatatgctccctttaccagctggaaaactactgcaat

SEQ ID NO: 110503 - DNA, 324 bp, Artificial Sequence
  derived and/or modified sequence
atggctctttggatgcgcttgttgcctctgctggctctgttggccctttggggcccagatcctgcggccgcattcgtcaatcagcatctttgcggaagccacctggtcgaagcgttataccttgtgtgtggggagcgtgggttcttttataccgataaaactgaagctgaggacctacaggtaggccaggtcgagttggggggcgggcctggagctgggagcttgcagcccctcgccttggagggctctcttcagaagcgcggaatcgtggaacagtgctgcactagcatttgctcgctgtaccagctggagaattattgcaac

SEQ ID NO: 110504 - DNA, 324 bp, Artificial Sequence
  derived and/or modified sequence
atggctctgtggatgagactgttgcccctgctggccctccttgctctctggggcccggaccctgcggcggccttcgtgaaccagcatctctgcggatcacacctcgtggaggccctgtacctcgtgtgcggagaacgcggattcttctacactgataagacggaagctgaggacctgcaagtgggacaggttgagctcgggggtggacccggcgctggctccttgcagccgctggcgctcgagggctcgctgcagaagcggggaatcgtggaacagtgctgcacgagcatctgcagcctctaccaactcgaaaactactgcaat

SEQ ID NO: 110505 - DNA, 324 bp, Artificial Sequence
  derived and/or modified sequence
atggccctgtggatgcggctgcttccactccttgcgctgctggccctctggggacctgacccggccgcggccttcgttaaccaacatttgtgcggaagtcacctcgtagaagccctctaccttgtgtgcggtgagagaggattcttttacactgacaaaaccgaggcggaagatttgcaggtcggacaagtcgaactgggaggcggcccgggggctgggtccttgcaacccctggccttggaggggtccctgcagaagaggggcatcgtggaacagtgttgcacttcaatctgttcactgtaccagcttgagaattactgtaac

SEQ ID NO: 110506 - DNA, 324 bp, Artificial Sequence
  derived and/or modified sequence
atggccctgtggatgcgactgctgccactactggccctgctggctctgtggggacctgatcctgctgcagcctttgtcaaccagcacttgtgtggcagccacctcgtcgaggcactctatttggtgtgtggcgaaagggggttcttctacacagataaaaccgaagctgaggacctccaggtggggcaggtggagctaggaggtggcccaggagcgggatccttgcagccgctggcactggaagggagtcttcagaaaaggggaatagtggaacagtgttgtacatccatctgctcactgtaccaactggaaaattattgtaac

SEQ ID NO: 110507 - DNA, 324 bp, Artificial Sequence
  derived and/or modified sequence
atggccctatggatgcgactgctacctctcctggccctcctcgccctctggggtccggaccccgccgcagcattcgtcaaccagcatctctgtggatcacatctggttgaagctctctacctggtgtgcggggagcgtggcttcttctatacagataagactgaagcagaggatctacaggtgggacaagtcgagctgggcggcggaccaggcgctggaagcctgcagcccctggccctggagggcagtctgcagaagcgcgggatcgtcgaacagtgttgtaccagcatctgctccctgtatcaactggaaaactattgcaat

SEQ ID NO: 110508 - DNA, 324 bp, Artificial Sequence
  derived and/or modified sequence
atggcattgtggatgcgcctgctgcccttgctggccctgctggcactgtggggtccagatcccgccgctgcatttgtcaaccagcatctgtgcggatcacatctcgtggaggcactctatctcgtatgcggagaacggggcttcttttacacggataaaacagaagccgaagatttgcaggtgggacaggtggagctgggcggaggccctggagccggtagtttgcagccgcttgccctggagggctctcttcagaaacgaggaattgtggagcagtgttgcacttcaatctgtagcttgtaccagttggagaattactgcaac

SEQ ID NO: 110509 - DNA, 324 bp, Artificial Sequence
  derived and/or modified sequence
atggcactctggatgaggctgttgccactcctggcacttctggctctttggggcccggatccagcagcagcctttgtgaaccaacacttgtgtggctcccacctcgttgaagcactctatcttgtctgtggagaacggggcttcttctacactgataagactgaggccgaggacctccaggtggggcaggtcgaacttggcggtggacccggtgcagggtcactgcaaccgctcgcgctggaaggtagcctgcaaaagcgcggaatcgtggagcagtgctgtacttcgatttgttccctgtaccagctcgagaattactgcaac

SEQ ID NO: 110510 - DNA, 324 bp, Artificial Sequence
  derived and/or modified sequence
atggcactgtggatgcgactgcttcctctcctggcattgctcgcactttggggcccggatcccgctgcggcttttgtaaaccagcatttgtgcggatcgcatctcgttgaggctttgtacctcgtgtgtggggagcgcggtttcttttacacggataagaccgaggctgaagaccttcaggtggggcaggtcgagctaggcggtggaccaggagctgggtctctgcagccgctggcgctagaaggtagcctccagaagcgcggcatcgtcgaacaatgctgtactagcatctgctcgttgtaccaacttgagaattattgtaat

SEQ ID NO: 110511 - DNA, 330 bp, Artificial Sequence
  derived and/or modified sequence
atggctctgtggatgaggctgctgccactgctggccctgctcgctctgtggggacccgaccctgcagccgcatttgtgaatcagcacttgtgtggcagtcatctggtggaggccttgtatttggtgtgcggagagagagggtttttctacacacctaagacaagacgtgaggcagaggatctgcaggtggggcaggtggagcttggtggcgggccaggcgcagggagtctccagccgttggcgttagaaggcagcttgcaaaagagaggtatcgtcgaacagtgttgtactagcatctgttctctttatcagctggaaaactattgtaac

SEQ ID NO: 110512 - DNA, 330 bp, Artificial Sequence
  derived and/or modified sequence
atggcgctgtggatgagacttctacccctgctcgccctgcttgcactgtggggcccagatccagccgctgccttcgtgaatcagcacctgtgtgggtctcacttggtggaagccttgtatcttgtgtgtggcgagaggggattcttttacactcccaaaactcgacgcgaagccgaggacctgcaggttggacaggtggagctgggaggggggccaggagctgggagtttacagcctttggcgttagaagggtcgttgcagaagagagggatcgttgagcagtgctgcacatcaatttgctcactgtatcagttagagaactattgtaat

SEQ ID NO: 110513 - DNA, 330 bp, Artificial Sequence
  derived and/or modified sequence
atggcgctctggatgcgcttgctgcccttgcttgcgctgctggcactttggggacctgaccccgccgctgcctttgtgaatcaacacctgtgcgggagccatctggtggaagcactctacttggtctgcggtgaaaggggctttttctacaccccaaagactagaagagaagctgaggaccttcaggtgggacaggtggaactcggcggaggaccaggagccgggagcctgcaaccgctggcccttgaaggatccctccaaaagagaggaatcgtcgaacagtgttgtacttcgatctgctccttgtaccagctggagaattactgcaat

SEQ ID NO: 110514 - DNA, 330 bp, Artificial Sequence
  derived and/or modified sequence
atggcgctctggatgcgcctgctgccgctcctcgcgctgctggcattgtggggcccagacccggcggctgcctttgtcaatcagcatctgtgcggatcccatctggtggaagcactctacctggtttgcggggagcggggcttcttctacactcctaagaccagacgcgaggccgaggatcttcaagtcggacaggtggagctgggcggaggtccaggggcgggaagcctccaacctttggcgctggagggttcactccaaaagcgcggaatcgtcgaacaatgctgtacttctatctgctcgctgtaccagcttgagaattactgcaac

SEQ ID NO: 110515 - DNA, 330 bp, Artificial Sequence
  derived and/or modified sequence
atggccctctggatgagactcctccctttgcttgcacttctggcactgtggggacccgatcccgccgcagcatttgtgaatcaacatctgtgtggctcgcatctggttgaggcactctacttggtgtgcggtgagcggggattcttttacaccccgaaaacgcggagggaagcggaagatctgcaagtcggacaggtggagctcggtggtggccccggagcaggatcacttcagccactggcactggagggctcgctccagaagcgaggcattgtggagcaatgctgtactagcatttgttcactgtatcaactggagaactactgcaac

SEQ ID NO: 110516 - DNA, 330 bp, Artificial Sequence
  derived and/or modified sequence
atggcactttggatgcgactgttgccgctgctggcacttcttgcactgtggggacctgatcccgccgcagcatttgttaaccagcatctgtgcggatcacacctggtggaagccctttacctggtgtgcggcgagcgcggattcttttacacgcctaagactcgccgagaggcagaggatttgcaggtgggtcaagtggaacttggtggaggacctggtgcgggttcgctgcagcccctggcactcgaaggttcgcttcaaaagcgcgggatcgtcgaacaatgttgcaccagcatttgtagcctttatcaacttgagaactactgcaat

SEQ ID NO: 110517 - DNA, 330 bp, Artificial Sequence
  derived and/or modified sequence
atggctctttggatgcggctgctgccgcttctggcgctcctggcactgtggggtcccgaccctgcggcagcgttcgtgaaccaacatctgtgtggatcgcacctcgtggaagcactctacctcgtctgcggcgaaaggggcttcttttacacccccaagactaggcgcgaggccgaggatctgcaggtgggccaggtggagctgggaggaggaccaggagcgggcagtctgcagcctctggccctcgaagggtcattgcagaaacggggaatcgtggaacagtgctgtactagcatctgctccctttaccagctggagaattactgtaac

SEQ ID NO: 110518 - DNA, 330 bp, Artificial Sequence
  derived and/or modified sequence
atggccctgtggatgcggctgctgcctctgctggctctgttggcattgtggggacccgacccagccgctgcgttcgtaaatcagcatctatgcggctcccatctggttgaggcgttgtacctcgtttgtggagaaagaggattcttttacacaccaaaaacgcgacgggaagctgaagacttgcaagtgggacaggtggagctggggggaggcccaggagccgggagtttgcaacctctcgcattggagggcagtctgcaaaagcgtggaatagtggagcagtgctgcaccagcatctgctccctgtaccagctggagaactactgcaat

SEQ ID NO: 110519 - DNA, 330 bp, Artificial Sequence
  derived and/or modified sequence
atggcactctggatgcgcctccttcccctacttgctctacttgcactgtggggccccgatcccgcagcagcctttgtgaatcagcacctttgcggatcccacttggtcgaggccctgtacctggtgtgtggagagagaggctttttctacacacccaaaacaagaagagaagctgaggacctccaggtgggccaggtggaactcggaggcggccctggtgcggggagcctacagcccctggcgttggaaggatcactccagaagagaggaatcgttgaacaatgctgcacgtctatctgctcactgtatcagctcgaaaattattgcaat

SEQ ID NO: 110520 - DNA, 330 bp, Artificial Sequence
  derived and/or modified sequence
atggcactctggatgaggttgttacccctgctagcccttctggctctgtggggcccagatcccgctgcagctttcgtcaaccaacacctctgtggaagtcacttggtggaagccctctatcttgtgtgcggcgagagaggatttttttacaccccaaagacacggcgggaggctgaggacctgcaagtggggcaagtggagcttggcggcggccctggtgctggtagcctgcaaccactagccttagagggctctctgcagaagcggggcatcgttgagcagtgctgcacctctatctgctcgctgtatcagcttgaaaactattgcaat

SEQ ID NO: 110521 - DNA, 330 bp, Artificial Sequence
  derived and/or modified sequence
atggctctctggatgcgactcctgcccctgctagcccttctggccttgtggggccctgaccccgctgcagcgttcgtgaaccagcacctctgcggctcacacctagtggaggctctttacctcgtctgcggtgagcgcggtttcttttatacacctaagactagacgggaggctgaggacctgcaggtgggtcaggttgaactcgggggcggtcccggagccgggtcactccagccactcgcactggagggatccctgcagaaacgcgggatcgtggagcagtgctgtacttccatctgtagtctctatcaactcgaaaattactgcaac

SEQ ID NO: 110522 - DNA, 330 bp, Artificial Sequence
  derived and/or modified sequence
atggctttgtggatgagactgctccccctcctggccctcctggctctgtggggccccgaccccgctgcggcctttgtgaaccagcatctctgcggctcacacttagtcgaggccttgtatctggtttgcggcgagcggggttttttttacactcctaaaactcgccgggaagccgaggacctccaagtgggtcaggtggaactcggtgggggccccggggcgggctccttgcagcctttggctctcgaggggagtctgcagaagcgcggaattgtcgagcagtgctgcacaagcatatgctccctatatcagttagagaattactgcaac

SEQ ID NO: 110523 - DNA, 330 bp, Artificial Sequence
  derived and/or modified sequence
atggccctctggatgcggttgctgccgctcttggcacttctcgccctctggggcccggacccagcagcggccttcgtgaaccagcatctgtgcggatcacatctggtcgaggcgctgtacctggtgtgcggggagcgcggattcttctacacccctaagactcgcagggaagcagaggacctgcaggtgggtcaggtggagctggggggcggacctggagcgggatcactccaacctcttgccttggagggatctcttcagaagcggggaatcgtggaacaatgctgcacttcgatttgctccctttaccaactggaaaactactgcaat

SEQ ID NO: 110524 - DNA, 330 bp, Artificial Sequence
  derived and/or modified sequence
atggccctttggatgcgcctgcttccacttctggcgctcctggcactgtgggggccagaccctgccgccgcatttgtgaaccagcatctctgcgggtcccacctggtcgaagccctttacctggtgtgtggagagcggggtttcttttacacgcccaaaactcgtagggaagcagaggatctgcaagtcggacaggtggaactcggtggaggcccgggtgcaggtagtttgcaacctttggcgctggaaggctccctccagaagcgaggaatcgttgaacaatgctgtacctctatttgcagcctctaccaattggagaactactgtaat

SEQ ID NO: 110525 - DNA, 330 bp, Artificial Sequence
  derived and/or modified sequence
atggccctgtggatgcgcctgctgcccctgttagctctgttagccctctgggggccagaccccgcagccgcatttgtaaaccagcacctgtgcggttcacatcttgtggaagcactctatctggtatgcggagagcgaggcttcttttacactccaaagacgcggcgggaggctgaggacctgcaagtaggccaagtcgaactcggtggcgggcccggggccggtagcttacagccactcgctctagaagggtctctacagaaacgaggcattgtggaacaatgctgtacgtccatctgcagcctctatcaactcgagaattactgtaac

SEQ ID NO: 110526 - DNA, 330 bp, Artificial Sequence
  derived and/or modified sequence
atggctctgtggatgcgccttctccctctcctcgctttgcttgctctctggggccccgatccagccgccgcttttgtcaaccaacacctgtgcggctcccatctggtggaagctttgtatctcgtatgcggcgaacgtgggttcttttatactcccaaaacacggcgtgaggctgaggacttgcaggtcggacaggtcgagctcggtggggggccgggggccggttccctgcagccgctggccctcgaggggtccctgcagaagaggggaatcgtggagcagtgttgtaccagtatatgttcactataccagctggaaaattactgcaac

SEQ ID NO: 110527 - DNA, 330 bp, Artificial Sequence
  derived and/or modified sequence
atggccctgtggatgcgtctgctgccgcttctcgcactcctggcactgtggggtccagaccctgcagcagccttcgttaatcagcatctgtgcgggtcccacctggtggaagcattgtatctcgtgtgtggagaacgaggttttttctacaccccaaagactcggcgcgaggcggaggacctgcaggtgggtcaggtcgaacttgggggtggcccgggagccggttcacttcagcccctggcgttggagggatcccttcaaaagaggggcattgtggagcaatgctgtacttcgatttgcagcctttaccagcttgagaattactgcaat

SEQ ID NO: 110528 - DNA, 330 bp, Artificial Sequence
  derived and/or modified sequence
atggccctttggatgcgtttgcttccgctgctggctctcctcgcattgtggggacccgatccggcggccgcttttgtaaaccaacatctctgtggttctcatctagtggaagcgctgtatcttgtctgtggtgagagaggtttcttttatacacctaagacaagacgagaagcggaagatctccaagtaggtcaggttgaactcggtgggggcccgggagctgggagcttgcaacctttggccctagaaggctcactacaaaaacgcggtatcgtagaacagtgctgtacaagcatttgttcattgtaccaactggaaaactattgtaac

SEQ ID NO: 110529 - DNA, 330 bp, Artificial Sequence
  derived and/or modified sequence
atggccttgtggatgcgactgcttcccctgctggcacttctcgcgctatggggacctgacccggccgccgctttcgttaaccagcatctgtgtggtagtcaccttgttgaagccctttacctcgtgtgtggtgagcgcggttttttctacactcctaagacccgcagggaggccgaggacctgcaggtgggtcaggtcgagctcggcggaggccctggtgccggctccttgcagcccctggcccttgagggttcgctgcagaagcggggtattgttgaacaatgctgcacttcgatctgcagcctgtatcagctcgagaactactgtaac

SEQ ID NO: 110530 - DNA, 330 bp, Artificial Sequence
  derived and/or modified sequence
atggctttgtggatgaggctcttgccgctgctggcgctcttggccctgtggggacccgatccagcggcggccttcgttaaccagcatctgtgcggctcccacctagttgaagcgttgtaccttgtttgtggcgagcgcggcttcttttacacccccaagacccgccgggaagcggaagatctccaggtaggacaggtggaacttggcggaggcccgggagcgggcagccttcagccactggccctggagggctcccttcagaaacggggaatcgtcgagcagtgttgtacgtctatatgtagtctgtaccagctggaaaactactgcaac

SEQ ID NO: 110531 - DNA, 330 bp, Artificial Sequence
  derived and/or modified sequence
atggccctttggatgcgccttctgccgcttttggcacttctggcactgtggggtccagatcccgcagcagcgtttgtgaatcaacacctgtgtggatcacacctcgtggaagcactgtacctcgtgtgtggggaacgaggctttttctatacccctaaaactagaagagaagcagaggacctccaggtcggccaggtggaactcggagggggaccaggagcaggatcccttcagcctctcgccctggaggggtccctgcaaaagagaggcatagtggaacagtgttgtacttcgatctgtagcttgtaccagctcgaaaactactgtaac

SEQ ID NO: 110532 - DNA, 330 bp, Artificial Sequence
  derived and/or modified sequence
atggcactctggatgcggctgttgcctctgctggccctgcttgccttgtgggggcccgacccggcggctgccttcgtgaatcagcatctgtgcggatcccatctggtggaggccctctacctggtgtgcggagaaaggggcttcttttacaccccaaagactagaagagaagcggaggatctccaagtcggacaggttgagctgggcggaggcccgggggccggatcattgcagccgctggctttggaaggttcactccaaaagcggggcatcgtcgaacaatgctgcacttcgatctgctccctttaccaattggaaaactactgcaac

SEQ ID NO: 110533 - DNA, 330 bp, Artificial Sequence
  derived and/or modified sequence
atggccttgtggatgagactgctccccctccttgctcttctggcgctctggggacccgaccctgccgcagcatttgtgaaccagcatctctgtggctctcacttggtggaggccctctatcttgtgtgtggtgaacggggcttcttctacacaccaaagaccaggcgcgaagcagaggatctgcaagtgggccaagttgaacttggtgggggacccggcgccggcagtctgcagcccctcgcgctggagggcagtcttcaaaaacgcgggattgtagagcaatgctgtacgagtatctgcagtctctaccagctggaaaactattgcaat

SEQ ID NO: 110534 - DNA, 330 bp, Artificial Sequence
  derived and/or modified sequence
atggcgctgtggatgaggctgctgccccttctggccctcctcgctctgtggggtccagaccccgcagccgcgttcgttaaccagcatttgtgcggctcccacttggtcgaagcactgtacctggtctgcggggaacgggggttcttctatacacccaaaacaagacgggaagctgaggacctgcaggtggggcaagtggagctgggcggaggaccgggagctggatcactgcaacccctggccctcgaaggaagtctgcaaaaaagaggtattgtggagcagtgctgcacaagtatctgctccctgtaccagctcgaaaactactgcaac

SEQ ID NO: 110535 - DNA, 330 bp, Artificial Sequence
  derived and/or modified sequence
atggccctttggatgagactgctgcctttgctagccttgctggctctctggggccctgacccggccgcagccttcgtaaaccaacacttatgtggatctcatcttgtggaggcactgtacctagtatgtggcgaacgaggattcttctatacacccaagactagacgagaagctgaggacctgcaggtcggccaggtggagctcggggggggacccggagcaggaagtctgcagcccctcgctctagaaggctctctccaaaagcggggcatcgtggagcagtgttgtaccagtatctgttcgttgtaccagttggagaattattgcaac

SEQ ID NO: 110536 - DNA, 330 bp, Artificial Sequence
  derived and/or modified sequence
atggctttgtggatgcggctcttgcccctgctcgcactgctcgccctgtggggacctgacccagctgctgctttcgttaatcagcacctttgtgggtcccacctcgtggaggcactttatctcgtgtgcggggaacgcgggttcttctacacacctaaaactcggagggaggccgaggacctgcaagtgggtcaggtggaacttgggggaggaccgggcgcagggagccttcagcccctcgcattagaaggaagcctgcagaagcggggaatcgtcgagcagtgctgcacctccatctgcagtttatatcagctggaaaattattgcaac

SEQ ID NO: 110537 - DNA, 330 bp, Artificial Sequence
  derived and/or modified sequence
atggcactctggatgcgcctgctgccgctcttggccctgctcgccctctggggtccagatccggcagcagcatttgttaatcaacacctctgcggatcgcatctggtggaagcgctttacctggtctgcggagagaggggattcttttacactcccaagacgcgcagagaggcggaggacctccaggtgggacaagtggaactggggggtggcccgggagcgggctcgcttcagccactggcactggaaggtagcttgcaaaagcgaggaattgtggaacagtgctgcaccagcatctgctcactgtaccagctcgagaattactgcaac

SEQ ID NO: 110538 - DNA, 330 bp, Artificial Sequence
  derived and/or modified sequence
atggccctttggatgcgtctcttgccacttctggcgttgcttgcactgtggggaccggaccctgcagcagccttcgtgaaccagcatttgtgtggttcccacctggtggaggcactctaccttgtgtgcggagaacgcggttttttctacactccaaaaaccaggcgcgaagccgaagatctgcaggtgggacaggtggaactgggtggtgggcccggtgcggggtcactgcaacctctcgccctggaagggtcacttcaaaagaggggtattgtcgaacaatgttgtacttcaatttgctcgctgtaccagctggagaattactgcaac

SEQ ID NO: 110539 - DNA, 330 bp, Artificial Sequence
  derived and/or modified sequence
atggccctgtggatgcgacttctgccactgctggccctgctggccctgtggggtcccgatcccgccgctgccttcgtcaatcagcatctttgcggttcccatctcgtagaagccctctatctggtttgcggagagcgcgggtttttctatacccccaagactcggcgggaggccgaggatctgcaggtggggcaggtagaactcggtggcggaccgggcgccggatccctgcagcctctggcattggaggggagcttgcagaagagggggatcgtggaacaatgctgcacctctatctgcagcttgtatcagctggaaaactattgtaac

SEQ ID NO: 110540 - DNA, 330 bp, Artificial Sequence
  derived and/or modified sequence
atggcactttggatgcgcctgcttcctctgctcgcactccttgccttgtggggtccagacccggcggcagcttttgtgaatcagcatctttgcggttcacacctcgtcgaggcactttatctggtctgtggtgaaagaggatttttctacacccccaagactagaagggaagcagaagatctccaagttggacaagtggaattgggcggagggccaggtgcaggatcgttgcagcctcttgcactggaggggtccttgcaaaaaaggggcatcgtggagcaatgctgtacgtcgatttgtagcctttaccagttggaaaactactgtaac

SEQ ID NO: 110541 - DNA, 330 bp, Artificial Sequence
  derived and/or modified sequence
atggctctgtggatgcggttattgcccctcttagcattgttggctctgtggggacccgatccggccgcggcttttgtaaaccagcacctgtgtgggtcgcacttggtcgaggctctttacctcgtgtgcggcgaaagaggattcttttataccccaaagaccaggagggaagctgaagatctgcaggttggtcaggtggagcttggaggaggtcctggcgccggcagtctgcagcctctcgcattggaagggagcctccagaaacgcgggatcgtggagcagtgttgtaccagtatatgctctttgtaccagctcgaaaattattgcaat

SEQ ID NO: 110542 - DNA, 330 bp, Artificial Sequence
  derived and/or modified sequence
atggcactgtggatgagactgctgcccctattggccctgctggccctctggggaccagaccccgcagccgcttttgtgaaccagcacctgtgtgggtcccatctggtggaagccctgtatctcgtgtgcggcgaaagggggtttttttatacacccaagactaggagagaggcagaggatctgcaagtgggccaggtggagctaggagggggtcctggagccggctccttgcaacctctcgctttggagggtagcctgcagaagcgaggaatcgttgaacagtgttgcacttccatctgcagcctataccagctggagaactattgcaac

SEQ ID NO: 110543 - DNA, 330 bp, Artificial Sequence
  derived and/or modified sequence
atggccctgtggatgagactgctgcctctgctggcgctcctcgctctgtggggtccggaccccgcagctgcctttgttaatcagcacctctgtgggagtcacctggttgaggctctgtacttggtctgcggtgagagggggttcttttacacgcctaaaaccaggcgtgaagccgaggatctacaggtgggtcaggtagagctcggtggtggtccgggggccggtagcctgcagccactggccctggaaggcagcctgcagaagcgtggcattgttgagcagtgctgtaccagcatctgcagcctatatcaactagagaattactgcaac

SEQ ID NO: 110544 - DNA, 330 bp, Artificial Sequence
  derived and/or modified sequence
atggcattatggatgcgacttttaccattacttgctttacttgcattatggggtccagatccagcagcagcatttgttaatcagcatctttgtggtagtcatcttgttgaagcactttatttagtttgtggagaacgaggttttttttacacaccaaaaactagaagagaagctgaagatcttcaagtcggacaagttgaattaggtggtggtcctggagctggttcattacaacctttagctttagaaggatctcttcaaaagcgtggaattgtagaacaatgttgtactagtatttgtagtttatatcaattagaaaattattgcaat

SEQ ID NO: 110545 - DNA, 330 bp, Artificial Sequence
  derived and/or modified sequence
atggccctgtggatgcggttgctgcctctgctggcgctgctggcactctgggggcctgaccctgcagccgcgttcgtaaatcagcacctctgcggcagccatttggttgaagctctttacttggtgtgtggggaacggggcttcttttatacacctaagaccagaagggaggctgaggatctccaggtgggacaggtggagctaggaggcggtccgggtgcaggatcactccaacccctagctctcgagggctccctgcagaaacgaggcattgtcgaacagtgttgcacgtccatctgttcgttatatcagctcgagaattactgtaat

SEQ ID NO: 110546 - DNA, 330 bp, Artificial Sequence
  derived and/or modified sequence
atggctctgtggatgcgactgctgcctttgcttgcgctgctcgcgctctggggaccggatccggcagccgcattcgtgaaccagcatctgtgtgggagccatctcgtggaagcgctctacctggtctgtggagaacgcggatttttctacacgcctaagactagacgggaagctgaagatctccaggtgggacaagtggaactcggaggcgggccaggagctggcagcctccagccgctggcgcttgagggatccttgcagaaacggggtatcgtcgaacagtgctgcacctcgatctgctcgctgtaccaactggagaattactgcaat

SEQ ID NO: 110547 - DNA, 330 bp, Artificial Sequence
  derived and/or modified sequence
atggcgttgtggatgagactgcttccccttctcgcgttgctggcattgtgggggccggatcccgcggccgcgttcgtcaaccagcacctgtgcggttcccacttggtggaagcgctgtacctggtgtgtggcgagcggggcttcttctacaccccaaaaactcgcagagaggctgaggacctgcaggtgggccaggtggagctgggtggagggccaggagcgggatcattgcaacctctggccctggagggctcgcttcaaaagcggggcatcgtcgaacagtgttgcacttcgatctgtagcctgtaccaacttgagaattactgcaat

SEQ ID NO: 110548 - DNA, 330 bp, Artificial Sequence
  derived and/or modified sequence
atggccctttggatgcggctccttcccctcctggccttactcgctctgtggggacctgatccagccgcagccttcgtcaatcaacacctgtgcggctcccatctggtggaggctttatatcttgtatgcggcgaaagaggatttttttacacccctaagacgcggcgcgaagccgaggacctgcaggtcggtcaggtggaattaggcggcggtccaggtgccggctccctgcagcccctcgcactcgaagggtcgctgcagaagagaggcattgtggaacagtgctgcacatcaatttgctctctgtaccagttggaaaattattgtaat

SEQ ID NO: 110549 - DNA, 330 bp, Artificial Sequence
  derived and/or modified sequence
atggcactgtggatgagactacttccacttttggctcttctagccttgtgggggcctgacccagctgctgccttcgtgaaccagcacctctgtggtagccacctggtagaagccctataccttgtttgcggtgagcgggggttcttctatacacccaaaactcggcgcgaggccgaagacctacaagtcggccaggtggaacttggcgggggtccaggggctggctcccttcagccgttagctctggaagggagcttgcagaagcgcggcatcgtcgagcagtgctgtacaagtatttgcagcctgtaccagctcgagaactattgtaac

SEQ ID NO: 110550 - DNA, 330 bp, Artificial Sequence
  derived and/or modified sequence
atggcactctggatgagactgctgcctctcttagccctgttagccctgtgggggcctgaccccgctgccgcctttgttaatcagcacctatgtggctcccatttagtcgaagcgctatatctggtgtgtggtgagagaggctttttttatacccccaagactagacgtgaggccgaagacttgcaggtggggcaggtagagttaggcggaggacctggggccggttctctccagccactcgcactggaggggtccctgcaaaaaagaggcatagttgaacaatgttgcacttcaatatgtagcttgtatcaacttgagaattattgcaat

SEQ ID NO: 110551 - DNA, 330 bp, Artificial Sequence
  derived and/or modified sequence
atggccctttggatgcgcttgctgcccttgctggctctcctggccctgtggggaccagacccggccgcggcgttcgtgaaccagcacctgtgtggaagccacctggtggaggctctttacctcgtgtgcggcgaacggggctttttctacactccaaagactcggcgggaagccgaggatctgcaggtgggccaagtggagctgggaggaggaccgggcgcaggctcactgcagccgctcgccctggagggctcgcttcagaagaggggcatcgtggaacagtgttgcacttcaatctgctccctttaccaactggagaactactgcaac

SEQ ID NO: 110552 - DNA, 330 bp, Artificial Sequence
  derived and/or modified sequence
atggctctctggatgcgtcttctgccattgctggcattgttggccctgtggggacccgatcccgccgcagcatttgtaaaccaacatttgtgcggctctcacctggtcgaagccctgtatttggtgtgtggggaaaggggttttttctatacgcccaagactcgcagagaggccgaggatctgcaagtgggccaggtcgagctgggcggggggccgggagctggcagtctgcagccactggcattggaggggtccctccagaagaggggcatcgtcgaacagtgttgcactagtatttgcagcctttatcagttggagaattactgcaac

SEQ ID NO: 110553 - DNA, 330 bp, Artificial Sequence
  derived and/or modified sequence
atggcactgtggatgcggctactcccattgctcgctctcctagcactgtggggacccgaccccgcagccgcgtttgtgaaccagcacctatgtggatcccatctcgtagaggctctataccttgtatgcggcgaaagaggatttttctacacccccaaaactaggcgcgaggcagaggacctgcaggtcggccaggtggaactcggaggtgggccgggggcaggttccctgcagccgttagctctggaaggctcactccagaagcggggcatcgttgaacagtgctgcacctcaatctgtagcctctaccagttagagaactactgcaat

SEQ ID NO: 110554 - DNA, 330 bp, Artificial Sequence
  derived and/or modified sequence
atggccctctggatgcggctcctgccgctgctggccctgctcgcactgtggggaccggaccccgcggcggcgttcgtgaaccaacacctctgcggatcacatctggtggaagctctttacctcgtctgtggagaacggggatttttctacaccccaaaaacccggagagaagccgaagatctccaggtcggccaagtggaactgggcggcggaccgggggcggggtccctccagccacttgcgcttgaaggatcgctgcagaaacgcgggatcgtggaacagtgttgcacctcgatctgctcgttgtaccaacttgaaaactactgtaat

SEQ ID NO: 110555 - DNA, 330 bp, Artificial Sequence
  derived and/or modified sequence
atggccttatggatgcggctcctgcccctgctggcattattggccctttggggccctgacccagcggctgctttcgtgaaccagcacctgtgcgggagtcacttggtggaagcactttacctggtgtgtggagaacgcgggttcttctacactccaaagaccagacgcgaagccgaggaccttcaggtgggacaggttgagctcgggggtggccccggcgccgggtcacttcagcccctggccctggagggctctcttcagaaaaggggcatagtagagcagtgctgtacatctatctgctcgctgtaccagctggagaactactgcaac

SEQ ID NO: 110556 - DNA, 330 bp, Artificial Sequence
  derived and/or modified sequence
atggcgctctggatgaggctgctgccccttctggctctgctggccctttgggggcccgaccccgccgcagcatttgtgaaccagcacctgtgtggatcccacctggtggaggctctatacctggtttgtggagagcgggggtttttttacacccccaaaactcgccgcgaggcagaggatctacaagttggccaggtggaactcggtgggggccccggcgccgggtcactgcagcctctggcgctggagggctccctgcaaaagagagggatcgtcgagcagtgctgcacctctatctgtagcctgtatcagttggaaaactattgtaat

SEQ ID NO: 110557 - DNA, 330 bp, Artificial Sequence
  derived and/or modified sequence
atggcgttgtggatgcgcctcctgccactgctggccctgctcgcgctctggggacccgatccggctgcagcctttgtgaatcaacacctgtgcggatcacaccttgtcgaagccctctatctggtctgcggtgagcggggattcttctacactcccaagactcgccgcgaagccgaggatctccaggtgggacaggtggaactggggggaggcccgggcgcaggatccctgcagcccctggcgttggaagggtccctgcagaaaagaggaatcgtggagcaatgttgcacctcaatctgctccttgtaccaactggagaattactgcaac

SEQ ID NO: 110558 - DNA, 330 bp, Artificial Sequence
  derived and/or modified sequence
atggcactgtggatgcggctgttgccgctcctcgctctcctggctctgtggggaccagatccggctgcggcgttcgtgaaccaacacttgtgcggctcacacctggtggaggccctgtatctggtgtgcggggaacgcggattcttttacactccaaaaacccgacgggaagccgaggaccttcaggtcgggcaggtggaactgggcgggggcccaggagccggatcgttgcagccacttgcgctggagggatcactccagaagaggggtatcgtggagcaatgttgtacctccatctgttccctttaccaactggaaaactattgcaat

SEQ ID NO: 110559 - DNA, 330 bp, Artificial Sequence
  derived and/or modified sequence
atggcgctttggatgagacttctgcctctgcttgcccttcttgcactttggggccctgatcccgcagcagcatttgtgaaccaacatctttgtgggtcgcatcttgtcgaagcactttaccttgtgtgtggagaacggggcttcttttacacccccaagacccgacgcgaagcagaagatcttcaggtggggcaggtcgaactcggcgggggtccaggagcagggtccctgcagcctctggccctcgaaggctccctgcaaaagagaggtattgtggagcagtgctgtacctccatctgtagcctctaccaactggaaaactactgtaat

SEQ ID NO: 110560 - DNA, 330 bp, Artificial Sequence
  derived and/or modified sequence
atggctctgtggatgaggctgttgcccctgttggcactactggcgctctggggtcctgatccagccgctgcatttgtaaaccagcacctctgtgggtcccacctcgtggaagccttgtacctggtctgcggggagcgcgggttcttttatacccctaaaacccggagggaagctgaagatttacaggtgggccaggtggagctgggaggtgggccaggcgctggcagcttgcagcctttagccttggagggatctctgcagaagcgcggtatcgtcgagcagtgctgcacctctatctgcagtctataccagctggaaaattactgtaac

SEQ ID NO: 110561 - DNA, 330 bp, Artificial Sequence
  derived and/or modified sequence
atggcactgtggatgagactgcttcctctgctggcactccttgcactgtggggaccagatccggcagcggcgttcgttaaccagcatctctgcgggtcccatctcgtcgaggcactgtaccttgtgtgcggagagaggggctttttctacactcctaaaaccagaagagaggcagaagatctgcaagtggggcaagtcgagcttggcggcggtcctggtgctggcagcctgcagccccttgcactcgaaggatcgctgcagaaacgtggaattgtcgaacaatgttgtacctccatttgttcgctttaccagctggaaaactattgtaac

SEQ ID NO: 110562 - DNA, 330 bp, Artificial Sequence
  derived and/or modified sequence
atggccttgtggatgaggctgcttcctttgctagcattgctcgcactctggggccccgatccagccgcagcctttgtgaaccaacacctgtgcgggagccacctcgtcgaggcactttacctggtctgtggtgagagggggtttttctatactccaaaaacaagacgtgaggccgaggatctgcaggtgggccaagtcgaactggggggaggtccaggcgctgggtcccttcagcctctggcacttgagggctcactgcagaaaagaggtattgtggagcaatgctgtacttcaatctgtagtctatatcagctcgagaactactgtaat

SEQ ID NO: 110563 - DNA, 330 bp, Artificial Sequence
  derived and/or modified sequence
atggctctgtggatgagactgctgccgcttcttgcattgcttgccctgtggggaccagaccctgccgcagcgttcgtcaaccagcatctgtgcggatcgcatctggtggaggccctgtacttggtttgtggagaacggggattcttttacaccccgaaaacccgcagagaagcggaggacctgcaagtgggacaagtggagctgggaggcggacctggtgctggctcactccagcccctcgctctggagggttccctgcagaagagaggaatcgtcgaacagtgctgtactagcatctgctcgctttaccaactggagaattactgcaac

SEQ ID NO: 110564 - DNA, 330 bp, Artificial Sequence
  derived and/or modified sequence
atggccttatggatgcggctccttccccttttggcccttctagccctatggggacctgatcctgctgctgcttttgtaaatcagcatctctgtgggtctcatcttgttgaagctctgtaccttgtatgtggagaaagagggtttttctatacacctaagacacggcgggaagcagaagatttacaggtcggacaggtagagcttggaggaggaccgggggccggatctttgcagccactggcccttgaagggtccctccaaaaaagaggaatagttgagcagtgttgtacttcaatctgctctctctatcagttggaaaattattgcaac

SEQ ID NO: 110565 - DNA, 330 bp, Artificial Sequence
  derived and/or modified sequence
atggcactctggatgaggttgttgccactgctcgcgctgctagcattgtggggcccggaccctgccgcagcatttgtgaatcagcatctgtgtggcagccatctggttgaagctttatatttggtttgtggggagagaggattcttctatacaccgaagacccgccgcgaggctgaggatttgcaagtgggccaggtagaactgggagggggccctggagcgggaagtctgcagcctctcgctctcgaaggatccctgcagaagagggggattgtagaacagtgctgcaccagtatctgttcactctaccagttggagaactattgcaat

SEQ ID NO: 110566 - DNA, 330 bp, Artificial Sequence
  derived and/or modified sequence
atggccctatggatgcgtttgttgcctctgctggccctcttggcactttggggtccggaccctgctgctgccttcgtgaaccagcatctgtgtggctcacatctagttgaagctctctacttagtgtgtggcgaaaggggtttcttttataccccgaagacaaggcgagaggcagaggatctgcaggtgggtcaggtcgagctcggtggtggccccggcgcaggttcgttacagccgctggctcttgaaggtagcttgcagaaacgaggaatagtagaacagtgttgtacaagcatttgtagtctttaccagttggaaaactattgcaac

SEQ ID NO: 110567 - DNA, 330 bp, Artificial Sequence
  derived and/or modified sequence
atggctctgtggatgcggctgcttcctctgctcgccctgctggcgctctgggggccagatccggccgcggcattcgtgaaccaacacctttgcgggtcacatcttgtggaagcactctacctcgtgtgtggagagcgcggatttttctacactcccaagacgaggcgggaggcggaggacctgcaggttggtcaagtggagttgggaggagggcctggcgccggaagcctgcaaccgctcgctctggaaggcagcttgcaaaagcggggcatcgtagaacaatgctgcacctccatctgctctctctaccagttggagaactactgtaat

SEQ ID NO: 110568 - DNA, 330 bp, Artificial Sequence
  derived and/or modified sequence
atggccctttggatgcgcctgcttcccttgctggctctactggccctgtgggggcctgaccccgctgccgccttcgtgaatcagcacttgtgcggtagtcatctggtggaagcactatatctggtctgcggcgagagaggcttcttctacacccctaagacacggagggaggcagaggacttgcaggtgggacaggtggagctaggcggtgggccaggggctggttctcttcagcccctcgcccttgagggaagcctccagaagcgcgggatcgtggagcagtgctgtacctcaatatgctccctgtatcaactcgagaattactgcaac

SEQ ID NO: 110569 - DNA, 330 bp, Artificial Sequence
  derived and/or modified sequence
atggcgctatggatgcgactattaccgctattagcgctactagcgttatggggtccggatccggcggcggcgtttgttaatcaacatttatgtggttcgcatttagttgaagcgctatatctagtttgtggtgaacgtggttttttttatacgccgaaaacgcgacgagaagcggaagatttacaagtaggtcaagtagaattaggtggtggtccgggtgcgggttcgttacaaccgctagcgctagaaggttcgctacaaaaacgaggtatagttgaacaatgttgtacgtcgatatgttcgctatatcaattagaaaattattgtaat

SEQ ID NO: 110570 - DNA, 330 bp, Artificial Sequence
  derived and/or modified sequence
atggctctgtggatgaggcttctgccgctgttggccttactggctctgtggggccccgaccccgctgccgcattcgtgaatcagcatttatgcggctctcacctggtggaggccctgtatcttgtgtgtggtgagcggggcttcttctacacccccaagactcggcgtgaggcagaagacctgcaagtgggccaggtggaactgggtggaggccccggagctggatccctacagcccctggccttagagggcagccttcagaagcgcggcatcgtggagcagtgttgtaccagtatttgctccctataccaattggagaactactgcaac

SEQ ID NO: 110571 - DNA, 330 bp, Artificial Sequence
  derived and/or modified sequence
atggctctttggatgaggctgcttccactcctggctcttttggcgttgtggggacccgacccagccgcagcctttgtaaaccagcacctatgtgggtcccacctggtggaggctctgtatctggtgtgtggtgaaagaggctttttttacacccccaagacacggcgtgaagcagaagatctccaggttggccaagtcgagctgggcggtggaccaggagccggatcgctccagccactagccctggaaggcagtctccagaaacgtggaatcgttgagcaatgttgcacttcgatctgctccctgtaccaattagaaaactattgcaac

SEQ ID NO: 110572 - DNA, 330 bp, Artificial Sequence
  derived and/or modified sequence
atggcactgtggatgcggctgctgccgctgctggcgttgcttgcgctttggggccctgatcctgccgcagcttttgtgaatcagcatctctgcggttcgcacttggtggaagctctttacctcgtctgcggcgaaagaggattcttctacactcctaagaccaggcgcgaagcagaggacctccaagtcggccaagtggaactcggtgggggaccaggggccggatcgctgcagccactggcccttgagggttccctgcaaaaacgcggtatcgtagagcagtgctgtaccagcatctgttccctctaccagctggaaaactattgtaac

SEQ ID NO: 110573 - DNA, 330 bp, Artificial Sequence
  derived and/or modified sequence
atggctctgtggatgagacttctgccgctgctggcactgctcgcgctgtggggtcccgatcctgcagcagccttcgtgaatcaacacttgtgtggttcacatctggttgaggccttgtacctggtgtgcggagagaggggctttttctacacgcctaaaaccaggcgtgaagcagaagatttgcaggtcggtcaagtggaacttggtggtggaccaggtgcaggcagccttcaacctcttgcactggagggctcccttcagaagaggggcatagtggagcaatgttgtacttcaatttgctcgctttaccaactcgagaactactgtaac

SEQ ID NO: 110574 - DNA, 330 bp, Artificial Sequence
  derived and/or modified sequence
atggccctgtggatgcgtctgctgccactgctggccctcctggccttatggggacccgatcctgcagccgcctttgtgaaccaacatttgtgcgggtcacacctcgtggaggctctataccttgtgtgtggcgagagagggttcttctatacgccgaaaaccaggagagaggctgaggatcttcaggtgggacaggtggaacttggtggaggcccaggcgccgggagtctccagccactagctctggaaggctctctgcagaaacggggcatcgtcgagcagtgctgtacctcaatttgttccctttatcaattagagaactattgtaat

SEQ ID NO: 110575 - DNA, 330 bp, Artificial Sequence
  derived and/or modified sequence
atggctctgtggatgagactgctgcctctgctcgcactgctcgccctttgggggccggacccagcggcggcattcgtgaaccagcatctctgcgggtcccatttggtcgaggccctgtacttggtgtgcggagaacgaggcttcttttacaccccgaaaaccaggcgggaagcagaagatttgcaagtcggacaggtggaactcggaggcggcccgggagcaggatcgctccagcccctggctttggagggatctctccaaaagcgcggcatcgtggaacagtgctgcacgagcatctgttcactgtaccaactggagaactactgcaat

SEQ ID NO: 110576 - DNA, 330 bp, Artificial Sequence
  derived and/or modified sequence
atggctttgtggatgagacttctccccctcttggctctgctggcattgtggggacccgaccccgctgcagcttttgtcaaccaacatctgtgcggctcacacctcgttgaggccctgtatcttgtgtgcggtgagcgtggttttttttatactcccaaaacccgtagagaggccgaggatttgcaggtgggtcaagtggaactgggtggcggacctggtgctggctctttgcagccactggcactggagggtagtctgcaaaaaagaggcatcgttgagcagtgttgcacaagcatttgcagtttgtatcagcttgagaattattgcaac

SEQ ID NO: 110577 - DNA, 330 bp, Artificial Sequence
  derived and/or modified sequence
atggccctctggatgcgcttgcttcccctcctggcacttcttgccctgtggggacccgatcctgctgccgcatttgtaaaccaacacctctgtggatcgcatctcgtcgaagcgctgtaccttgtttgcggagaaagaggtttcttttacactccaaaaaccagacgcgaagcggaagatcttcaagtcggacaggtggagctcgggggtggacccggtgcaggttcattgcaacctctggcacttgaaggatccctgcagaagcggggcatcgtggagcaatgttgcacgagcatttgttctctctaccagctcgaaaactactgtaat

SEQ ID NO: 110578 - DNA, 330 bp, Artificial Sequence
  derived and/or modified sequence
atggccctgtggatgagactcctccctctgttggcacttctggccctctggggccctgatcccgcagctgcttttgttaaccagcacctgtgcgggtcccacctggtcgaggctctttatctcgtttgcggggaacggggcttcttttatacacccaagaccagacgggaagccgaagacctccaagtcggtcaggtcgagctaggcggcggccccggcgctggcagtctgcaaccacttgctctggaaggctcacttcagaagcgcggaatcgtggagcagtgctgtaccagcatctgttcgctgtaccagctcgaaaactattgtaac

SEQ ID NO: 110579 - DNA, 330 bp, Artificial Sequence
  derived and/or modified sequence
atggcgctgtggatgaggctgcttccgttgcttgcacttttggcattgtgggggcctgatcctgcggccgcatttgtcaatcagcatctctgtggctctcacctcgtcgaagcactttacctggtgtgtggagaacgcgggttcttctatactcccaagaccaggagagaggccgaggatcttcaggtgggacaagtggaactcggaggcggtccaggagcggggtcgcttcaaccactcgcactcgaaggatcactgcaaaaacggggtatcgtcgagcagtgctgcacttctatttgctccctttaccaacttgaaaactactgtaac

SEQ ID NO: 110580 - DNA, 330 bp, Artificial Sequence
  derived and/or modified sequence
atggccctttggatgaggctactgccgctcctagcactcctggctttgtggggacctgaccccgcagccgcgtttgtcaaccaacacctttgcggcagccacctcgttgaggcgctgtatttggtgtgtggagagagagggttcttctatactccaaagaccaggagagaggcagaagacctgcaggtaggacaggtggagcttgggggaggcccgggcgcagggtcactacagcctttggcactggagggcagcctgcagaaaagggggattgtcgagcagtgctgcacgagcatttgtagtctgtatcagctggagaattattgcaac

SEQ ID NO: 110581 - DNA, 330 bp, Artificial Sequence
  derived and/or modified sequence
atggcgctgtggatgaggcttctcccgctgctggcattgctggccctctggggaccggacccagcagccgcattcgtgaatcaacatctctgcggttcccacttggttgaggccctttaccttgtctgtggagaacgtggctttttctatacccctaaaactaggcgtgaggccgaggatttgcaggtaggccaagtcgaactcggaggtggtcccggagcaggctccctgcagcctctggccctcgagggatcgctccaaaagagaggtattgtggaacagtgttgcacctcgatctgtagcctgtaccagcttgaaaactactgtaac

SEQ ID NO: 110582 - DNA, 330 bp, Artificial Sequence
  derived and/or modified sequence
atggcgctgtggatgagactgctgccactgctcgccctgctggcgctgtggggaccagacccagcagccgcattcgtgaaccagcatttgtgcggatcgcacctcgtggaagcactttatctggtgtgcggggagcggggattcttctacactccgaaaactaggagagaagccgaagacctccaagtcggacaggtggagttgggaggcggccctggggccggttcactccaaccactcgcgctggagggttctttgcagaagagaggcatcgtcgagcaatgctgcacttcaatttgctccttgtaccagctcgagaactactgtaat

SEQ ID NO: 110583 - DNA, 330 bp, Artificial Sequence
  derived and/or modified sequence
atggcattatggatgcggctgttaccgctgttggccctgctggctctgtggggaccagacccagccgctgctttcgtgaatcaacacctctgcggctctcacttagtagaagcactgtatttagtttgcggagaaaggggattcttctacacaccaaagactcgtagagaggccgaagatctgcaggtgggtcaggtggagttaggaggtggcccaggtgctggttccctccagccattggctctggaggggtccctacagaagcgtgggattgtagaacagtgctgcacctcaatttgttctctgtatcagctagagaactactgcaat

SEQ ID NO: 110584 - DNA, 330 bp, Artificial Sequence
  derived and/or modified sequence
atggcgctctggatgcgccttctcccgctgcttgcgttgctcgcattgtggggacctgacccggccgcagcttttgtcaaccaacatctttgcggatctcacctcgtggaggccttgtacctggtgtgtggcgaaagaggttttttctataccccaaagactagaagggaagcagaagatctccaagtgggtcaagtggaactgggaggcgggccgggagcaggatccctgcagccacttgccctcgaaggctcgcttcagaagcggggaattgtcgagcagtgctgtacctcgatctgttccttgtaccaactcgagaattactgcaac

SEQ ID NO: 110585 - DNA, 330 bp, Artificial Sequence
  derived and/or modified sequence
atggcgctgtggatgcggctactgccactcctggcccttcttgcactgtggggtcccgacccagcggcagcattcgtgaaccaacacctatgcgggtcgcacttagttgaagcactatatctggtgtgcggcgaacggggcttcttctatactcctaaaacaaggcgagaggcggaagaccttcaggtgggacaagtggaacttggaggtggtccaggcgccggtagtcttcagccattagcgctagaaggttcacttcagaagcgtgggatcgtcgaacagtgctgcaccagtatctgctcactgtatcagttggagaattactgcaat

SEQ ID NO: 110586 - DNA, 330 bp, Artificial Sequence
  derived and/or modified sequence
atggcgctctggatgcggctgcttcctcttctcgcactcctcgcgctttggggaccggacccagcagctgccttcgtcaaccagcatctgtgtggttcccacctggtggaagctctctatctggtgtgtggggaacgggggtttttctacactcccaagacccgaagggaagctgaggatttgcaagtgggccaagtcgagctgggaggtggtcctggagcaggttcgcttcaacccctcgcactggagggatctttgcagaaacgcgggatcgtggaacaatgctgtacgagcatttgctcactttaccagcttgaaaactactgtaac

SEQ ID NO: 110587 - DNA, 330 bp, Artificial Sequence
  derived and/or modified sequence
atggcactgtggatgaggctgctgcctcttctcgccctcctggctctctggggtccggaccccgcagccgcctttgtgaaccagcatctttgtggctctcatttggtcgaggcgctttacctcgtgtgtggcgaacgaggattcttctatacccccaaaacaaggagggaagctgaggacctccaggtcggtcaagtagagcttgggggtgggccaggcgccgggagcttacagccactggctttagagggatccctgcaaaaaagaggaatcgtggaacagtgttgcacgtccatatgttcactgtatcagttagaaaattactgtaac

SEQ ID NO: 110588 - DNA, 330 bp, Artificial Sequence
  derived and/or modified sequence
atggcactgtggatgcgcctcctgccgcttctcgcactgctggcactttggggacccgatcctgcagcagcctttgtgaaccaacacctctgtggatcacaccttgtggaggcgctctaccttgtctgtggtgaacggggattcttctacacccctaagacccgacgggaagcggaagatttgcaagtcggacaagtggaacttgggggcggtccaggcgctggaagcctgcaacctcttgcattggagggatcactccagaagagaggtatcgtcgaacaatgctgtaccagcatctgctccctgtaccaacttgaaaactactgtaac

SEQ ID NO: 110589 - DNA, 330 bp, Artificial Sequence
  derived and/or modified sequence
atggcattgtggatgaggcttttgcctctgctcgccctcttagcgctctggggccctgatcctgctgctgctttcgttaatcagcacttgtgcggctcccatctcgtcgaggctctgtaccttgtgtgtggggagcggggcttcttttatacgccaaaaacaagacgggaggcagaggacttacaagttggccaggtagagctcggaggcggacccggggccggtagtctacagcctctggccctggagggctccctccagaaacgcgggatcgttgagcagtgttgcacatcgatatgctcactctatcagctagagaattactgcaac

SEQ ID NO: 110590 - DNA, 330 bp, Artificial Sequence
  derived and/or modified sequence
atggcactgtggatgcgtttactaccacttcttgcgcttttggcgctctggggaccagatccagctgctgcctttgtaaaccagcatctctgtggatcacatctagtcgaagctctttatttagtctgtggagagagaggatttttttatacaccgaaaacacgtagagaagcagaagatttacaggttggacaagttgagttaggagggggaccgggagctggaagtttgcaaccgcttgccttagaaggatctcttcagaaacgcggaattgttgaacagtgctgcacgtcaatttgttcgttgtaccagctcgagaattattgcaac

SEQ ID NO: 110591 - DNA, 330 bp, Artificial Sequence
  derived and/or modified sequence
atggcactgtggatgcgtctccttccgttgcttgcactgctggcgctctgggggccagacccagcagctgcattcgttaaccagcatctctgcggcagtcatctcgttgaggctctctatttggtgtgtggcgaaagaggattcttctatactccaaaaactcgtagagaagcggaggatctgcaggtggggcaggtcgagcttggaggcggtcccggagctggatcacttcagccattggcgttggaaggttcgctacaaaagaggggaattgtggagcaatgctgtacttctatatgttcactttaccaattggagaattactgcaat

SEQ ID NO: 110592 - DNA, 330 bp, Artificial Sequence
  derived and/or modified sequence
atggccctgtggatgagacttctccctcttctggctctgctggctttgtggggacccgaccctgcagctgcttttgtaaaccaacacctgtgtggatctcacctcgtcgaggcactgtatcttgtttgcggagagagaggcttcttttacacccctaagacgaggagagaggctgaggatttgcaggtgggtcaagtagaattgggaggcggtcccggcgccggctccctgcagccactggcattggaaggttctctccagaaacgcggcattgtggagcagtgctgtacttctatctgttctttgtaccagcttgaaaattactgcaac

SEQ ID NO: 110593 - DNA, 330 bp, Artificial Sequence
  derived and/or modified sequence
atggccttgtggatgaggttgcttcccctgctggctctcctggcactctgggggcctgatccggccgcggcatttgtgaaccagcacctgtgtggatcccatctggtggaagccctctacctggtctgcggcgagagagggttcttctacaccccaaaaacccgccgcgaggccgaggaccttcaggtgggacaggtggagctgggaggtggaccgggcgcgggaagcctccaaccgctggctctggaaggttcgctccaaaagcggggcatcgtcgaacaatgctgcacttcgatctgttcactgtaccagctcgaaaattactgcaac

SEQ ID NO: 110594 - DNA, 330 bp, Artificial Sequence
  derived and/or modified sequence
atggccctctggatgcggctgctccccctcctggcactgttggctctctggggcccggatcctgcagcagcgttcgtgaatcaacacctgtgtggatcacatcttgtggaagccctttacctggtctgcggcgaacggggattcttctacactcctaaaacccggcgcgaggccgaggatctgcaagtcggacaggtggagttggggggtggtccgggcgccggatcccttcagccattggccctcgaaggaagccttcaaaagcgcggaatcgttgaacagtgctgcacctcgatctgcagcctgtaccagcttgagaactactgcaac

SEQ ID NO: 110595 - DNA, 330 bp, Artificial Sequence
  derived and/or modified sequence
atggcgctgtggatgcgacttctcccactgctcgcacttttggctctttggggtcctgatcctgcggctgcatttgtcaaccaacacctgtgcggctcccatctggtggaagcactctacctcgtctgtggagaaaggggctttttctacacgcctaagactaggagagaagccgaggatctgcaggtgggtcaggtggaactggggggagggccgggggcaggaagcctccaacctttggcactggaagggtcactgcaaaagcggggaattgtcgaacaatgctgtacttcgatatgctccctttaccaactggaaaactactgtaat

SEQ ID NO: 110596 - DNA, 330 bp, Artificial Sequence
  derived and/or modified sequence
atggcactgtggatgaggctgcttcccttgcttgcactccttgccctctggggacccgacccagccgcagctttcgtgaaccagcatctatgtggatcacatttagtagaggctctgtatctagtatgtggagagcgagggtttttctatacgcccaaaactaggagggaggccgaagatctgcaggtcgggcaggtagagctgggggggggaccaggggccggatctctccagcccctcgcactggaaggaagtctccagaaaagaggaattgtggaacagtgctgcacatcaatctgttctctctatcagttggaaaactattgtaac

SEQ ID NO: 110597 - DNA, 476 bp, Artificial Sequence
  derived and/or modified sequence
gggaaataagagagaaaagaagagtaagaagaaatataagagccaccatggctctctggatgcggcttcttccactgctcgccctcttggcgttgtggggacccgaccctgcagcagcgtttgtgaatcagcacctctgcgggtcccatctggtcgaagccctttaccttgtgtgtggcgagcgcgggttcttctacacgcccaagacaaggcgcgaggcggaggatctccaagtagggcaggtggaattgggagggggaccgggagccggttcactccagcccctggcgttggaggggtcgctgcagaaaagaggtattgtcgaacagtgttgcactagcatctgctcgctgtatcaacttgagaactattgtaactgaagcgctgccttctgcggggcttgccttctggccatgcccttcttctctcccttgcacctgtacctcttggtctttgaataaagcctgagtaggaag

SEQ ID NO: 110598 - DNA, 333 bp, Artificial Sequence
  derived and/or modified sequence
atggccctgtggatgagactgctgcccctgctggccctgctggccctgtggggccccgaccccgccgccgccttcgtgaaccagcacctgtgcggcagccacctggtggaggccctgtacctggtgtgcggcgagagaggcttcttctacacccccaagaccagaagagaggccgaggacctgcaggtgggccaggtggagctgggcggcggccccggcgccggcagcctgcagcccctggccctggagggcagcctgcagaagagaggcatcgtggagcagtgctgcaccagcatctgcagcctgtaccagctggagaactactgcaactag

SEQ ID NO: 110599 - DNA, 297 bp, Artificial Sequence
  derived and/or modified sequence
atggccctgtggatgagactgctgcccctgctggccctgctggccctgtggggccccgaccccgccgccgccttcgtgaaccagcacctgtgcggcagccacctggtggaggccctgtacctggtgtgcggcgagagaggcttcttctacacccccaagaccagaagagaggccgaggacctgcagggcagcctgcagcccctggccctggagggcagcctgcagaagagaggcatcgtggagcagtgctgcaccagcatctgcagcctgtaccagctggagaactactgcaactag

SEQ ID NO: 110600 - DNA, 333 bp, Artificial Sequence
  derived and/or modified sequence
atggccctgtggatgagactgctgcccctgctggccctgctggccctgtggggccccgaccccgccgccgccttcgtgaaccagcacctgtgcggcagccacctggtggaggccctgtacctggtgtgcggcgagagaggcttcttctacaccgacaagaccagaagagaggccgaggacctgcaggtgggccaggtggagctgggcggcggccccggcgccggcagcctgcagcccctggccctggagggcagcctgcagaagagaggcatcgtggagcagtgctgcaccagcatctgcagcctgtaccagctggagaactactgcaactag

SEQ ID NO: 110601 - DNA, 333 bp, Artificial Sequence
  derived and/or modified sequence
atggccctgtggatgagactgctgcccctgctggccctgctggccctgtggggccccgaccccgccgccgccttcgtgaaccagcacctgtgcggcagccacctggtggaggccctgtacctggtgtgcggcgagagaggcttcttctacacccccaagaccagaagagaggccgaggacctgcaggtgggccaggtggagctgggcggcggccccggcgccggcagcctgcagcccctggccctggagggcagcctgcagaagagaggcatcgtggagcagtgctgcaccagcatctgcagcctgtaccagctggagaactactgcggctag

SEQ ID NO: 110602 - DNA, 333 bp, Artificial Sequence
  derived and/or modified sequence
atggccctgtggatgagactgctgcccctgctggccctgctggccctgtggggccccgaccccgccgccgccttcgtgaagcagcacctgtgcggcagccacctggtggaggccctgtacctggtgtgcggcgagagaggcttcttctacacccccgagaccagaagagaggccgaggacctgcaggtgggccaggtggagctgggcggcggccccggcgccggcagcctgcagcccctggccctggagggcagcctgcagaagagaggcatcgtggagcagtgctgcaccagcatctgcagcctgtaccagctggagaactactgcaactag

SEQ ID NO: 110603 - DNA, 333 bp, Artificial Sequence
  derived and/or modified sequence
atggccctgtggatgagactgctgcccctgctggccctgctggccctgtggggccccgaccccgccgccgccttcgtgaaccagcacctgtgcggcagccacctggtggaggccctgtacctggtgtgcggcgagagaggcttcttctacaccaagcccaccagaagagaggccgaggacctgcaggtgggccaggtggagctgggcggcggccccggcgccggcagcctgcagcccctggccctggagggcagcctgcagaagagaggcatcgtggagcagtgctgcaccagcatctgcagcctgtaccagctggagaactactgcaactag

SEQ ID NO: 110604 - DNA, 476 bp, Artificial Sequence
  derived and/or modified sequence
gggaaataagagagaaaagaagagtaagaagaaatataagagccaccatggcgctctggatgcgattgcttcctctcctggctttgcttgcactgtggggtccagacccggcagccgcgttcgtgaatcagcatttgtgcggaagccaccttgtcgaagcgttgtatctggtctgcggggagagggggttcttttacacacccaagacccgcagagaggccgaggatttgcaagtaggccaggtggaactcggtgggggacccggagccggatcgctccaaccgctcgcgctggaagggtcactgcagaaacggggaatcgtggagcagtgttgtacgtccatttgctcgctttaccagcttgagaactattgtggctgataagctgccttctgcggggcttgccttctggccatgcccttcttctctcccttgcacctgtacctcttggtctttgaataaagcctgagtaggaag

SEQ ID NO: 110605 - DNA, 470 bp, Artificial Sequence
  derived and/or modified sequence
gggaaataagagagaaaagaagagtaagaagaaatataagagccaccatggccctttggatgagattgcttcctcttctcgcgctcctcgcgctgtggggtccagaccccgcagctgcctttgtgaatcagcatctgtgcggaagccacttggtcgaagccctgtacttggtatgcggggagcgggggttcttctacaccgacaaaacagaagcggaagatttgcaagtcggacaggtggagttgggtgggggtcccggagcaggctcgcttcaaccgctggcgctcgagggatcacttcagaagagggggatcgtggagcagtgttgcacgtccatttgttcgctgtatcagctcgagaactattgtaactgataagctgccttctgcggggcttgccttctggccatgcccttcttctctcccttgcacctgtacctcttggtctttgaataaagcctgagtaggaag

SEQ ID NO: 110606 - DNA, 470 bp, Artificial Sequence
  derived and/or modified sequence
gggaaataagagagaaaagaagagtaagaagaaatataagagccaccatggccctctggatgagactgttgccgctcctggcacttcttgcgctctgggggcctgaccccgcagcggccttcgtgaatcagcatttgtgtggatcgcacctggtagaagcgctttacttggtctgcggtgagcgggggtttttctataccaagccgacagaggccgaagatttgcaagtgggccaggtcgagctcggtgggggtcccggagctggatcgctccagccactggcgcttgagggatcactgcagaaaagggggattgtggagcagtgttgcacgagcatctgctccctttatcaattggaaaactactgtaactgataagctgccttctgcggggcttgccttctggccatgcccttcttctctcccttgcacctgtacctcttggtctttgaataaagcctgagtaggaag

SEQ ID NO: 110607 - DNA, 470 bp, Artificial Sequence
  derived and/or modified sequence
gggaaataagagagaaaagaagagtaagaagaaatataagagccaccatggcgctgtggatgcggcttctccctcttctcgcgttgttggcactttggggacccgacccagctgccgcctttgtcaaacagcacctctgtgggtcgcatctggtagaggccctgtatttggtgtgcggggaaaggggtttcttctacacaccggaaaccgaggcggaagatttgcaagtcggacaggtggagcttggtggcggaccgggagcggggagcctgcagccccttgcattggaagggtcgctgcagaagcgcggaattgtggagcagtgctgtacgtcaatctgctccctctaccaactcgagaactattgtaattgataagctgccttctgcggggcttgccttctggccatgcccttcttctctcccttgcacctgtacctcttggtctttgaataaagcctgagtaggaag

SEQ ID NO: 110608 - DNA, 333 bp, Artificial Sequence
  derived and/or modified sequence
atggctctgtggatgcggctcctgccgttgttggctctgctggccctttggggccctgaccctgctgccgcgttcgtaaaccaacacctgtgcggttcacatctcgtcgaggccctgtatttggtgtgcggcgaaaggggttttttctacacgccaaaaacacggcgcgaggctgaagatctgcaggtggggcaagtcgagctaggaggcgggccaggggctggctccctgcagcccttggctctggagggctccttgcagaagcgaggaattgtggaacagtgctgtacatcaatctgttcactctatcagcttgagaactactgcaactag

SEQ ID NO: 110609 - DNA, 333 bp, Artificial Sequence
  derived and/or modified sequence
atggccctctggatgcgtcttttacccctgcttgctctcctagcactctggggtcctgatcccgctgctgcgtttgtgaatcagcacctgtgtggctcccacctggtcgaggccttatatcttgtgtgtggcgagcggggttttttttataccccaaagacccggcgcgaggccgaggacctgcaggttggacaggtggagctgggcggggggccgggagctggaagcctgcaaccactggcactagaggggtctttgcagaaacgcggaatagtggagcagtgctgcaccagcatctgctcgctgtatcaactggagaactactgcaactag

SEQ ID NO: 110610 - DNA, 333 bp, Artificial Sequence
  derived and/or modified sequence
atggccctgtggatgaggctcctaccccttctcgcactactggccctgtggggccccgatccggccgctgcgttcgttaatcagcacctgtgtgggtctcacctcgtcgaggccttgtacctggtctgtggcgaacgcggtttcttttacacgccaaaaacacgccgcgaagccgaagatcttcaggtggggcaggtggagttggggggcggccccggagctggcagcctccagccacttgcccttgaaggatccctccaaaagcgaggaatcgttgaacagtgctgtacgagcatctgctcattgtaccagcttgagaattactgtaactag

SEQ ID NO: 110611 - DNA, 297 bp, Artificial Sequence
  derived and/or modified sequence
atggccctgtggatgagactactgcccctgctagcgttattagccctatggggacctgaccccgctgcggcctttgttaaccagcacctgtgtggatcgcatctcgtcgaggctctgtacctggtgtgcggggaaagggggtttttttacacacctaaaactcggagagaggcagaagatctgcagggctcccttcagcccttggctctcgagggaagcctgcagaaaagggggatagtcgaacagtgttgcacttctatctgttccctgtaccagctggagaattactgtaattag

SEQ ID NO: 110612 - DNA, 333 bp, Artificial Sequence
  derived and/or modified sequence
atggctctctggatgcggctactgcctctccttgctctgctggccctgtggggccccgaccccgccgctgcatttgtcaatcagcatctgtgcgggtcacatctcgttgaggcgttgtacctggtgtgcggcgaaagaggctttttttacaccgataaaacccgcagggaagctgaagaccttcaagtggggcaagttgagctcggcggcggccctggggccgggagtctacagccacttgcgctcgaaggttctctacagaagaggggcatagtggagcagtgctgtacttcgatttgttccctgtatcagctggagaattactgcaactag

SEQ ID NO: 110613 - DNA, 333 bp, Artificial Sequence
  derived and/or modified sequence
atggccctttggatgcggctgctccccctgctggccttgttagccctgtggggcccagacccagccgccgcgtttgtaaatcagcacctctgcggaagtcatttggtggaggcactctatctcgtgtgtggcgaaaggggctttttctatacccccaaaacccgtcgggaggccgaagatctgcaagtcggccaggtcgaactcgggggaggaccaggagcgggctcactgcaacctctagccctggaggggtctctgcagaagcggggcattgtcgagcagtgctgtacatccatttgtagcttgtatcaactggagaactattgtggatag

SEQ ID NO: 110614 - DNA, 333 bp, Artificial Sequence
  derived and/or modified sequence
atggccctctggatgaggctcctgcctctactggctttgttggccctatgggggcccgacccagctgctgctttcgttaaacagcacctttgcggaagccacctcgtggaggctctttacttggtgtgcggcgagcgcggttttttctacacgcccgagactcgacgtgaggccgaggacctgcaagtaggacaggtggagctcgggggggggccaggagccggctccctccagccattagccctcgaaggcagcctgcagaagcgcggcatcgtagagcagtgctgcaccagcatatgtagtttgtaccagctagagaactactgtaattag

SEQ ID NO: 110615 - DNA, 333 bp, Artificial Sequence
  derived and/or modified sequence
atggctttatggatgcgacttctgccccttctggcgcttctcgccctttggggtcctgacccagctgcggcttttgtcaaccaacatctctgtggcagtcacctggttgaagcactgtacttagtgtgcggggaaagaggcttcttctacactaaacccactcgtagagaggcagaggatttgcaggtcggccaagttgagctggggggaggcccaggggccgggagtctgcagcctctcgcactcgaaggctccctgcagaagcgcggcatagtcgaacagtgttgcacttctatctgttccctatatcaactggaaaactactgtaattag

SEQ ID NO: 110616 - DNA, 333 bp, Artificial Sequence
  derived and/or modified sequence
atggccctgtggatgaggctgctgcccctgctggccctgctggccctgtggggccctgaccctgctgctgcctttgtgaaccagcacctgtgtggcagccacctggtggaggccctgtacctggtgtgtggggagcggggcttcttctacacccccaagacccggcgggaggccgaggacctgcaggtgggccaggtggagctgggcggcggccctggggccggcagcctgcagcccctggccctggagggcagcctgcagaagaggggcatcgtggagcagtgctgcaccagcatctgcagcctgtaccagctggagaactactgcaactag

SEQ ID NO: 110617 - DNA, 297 bp, Artificial Sequence
  derived and/or modified sequence
atggccctgtggatgaggctgctgcccctgctggccctgctggccctgtggggccctgaccctgctgctgcctttgtgaaccagcacctgtgtggcagccacctggtggaggccctgtacctggtgtgtggggagcggggcttcttctacacccccaagacccggcgggaggccgaggacctgcagggcagcctgcagcccctggccctggagggcagcctgcagaagaggggcatcgtggagcagtgctgcaccagcatctgcagcctgtaccagctggagaactactgcaactag

SEQ ID NO: 110618 - DNA, 333 bp, Artificial Sequence
  derived and/or modified sequence
atggccctgtggatgaggctgctgcccctgctggccctgctggccctgtggggccctgaccctgctgctgcctttgtgaaccagcacctgtgtggcagccacctggtggaggccctgtacctggtgtgtggggagcggggcttcttctacacagacaagacccggcgggaggccgaggacctgcaggtgggccaggtggagctgggcggcggccctggggccggcagcctgcagcccctggccctggagggcagcctgcagaagaggggcatcgtggagcagtgctgcaccagcatctgcagcctgtaccagctggagaactactgcaactag

SEQ ID NO: 110619 - DNA, 333 bp, Artificial Sequence
  derived and/or modified sequence
atggccctgtggatgaggctgctgcccctgctggccctgctggccctgtggggccctgaccctgctgctgcctttgtgaaccagcacctgtgtggcagccacctggtggaggccctgtacctggtgtgtggggagcggggcttcttctacacccccaagacccggcgggaggccgaggacctgcaggtgggccaggtggagctgggcggcggccctggggccggcagcctgcagcccctggccctggagggcagcctgcagaagaggggcatcgtggagcagtgctgcaccagcatctgcagcctgtaccagctggagaactactgcggctag

SEQ ID NO: 110620 - DNA, 333 bp, Artificial Sequence
  derived and/or modified sequence
atggccctgtggatgaggctgctgcccctgctggccctgctggccctgtggggccctgaccctgctgctgcctttgtgaagcagcacctgtgtggcagccacctggtggaggccctgtacctggtgtgtggggagcggggcttcttctacaccccagagacccggcgggaggccgaggacctgcaggtgggccaggtggagctgggcggcggccctggggccggcagcctgcagcccctggccctggagggcagcctgcagaagaggggcatcgtggagcagtgctgcaccagcatctgcagcctgtaccagctggagaactactgcaactag

SEQ ID NO: 110621 - DNA, 333 bp, Artificial Sequence
  derived and/or modified sequence
atggccctgtggatgaggctgctgcccctgctggccctgctggccctgtggggccctgaccctgctgctgcctttgtgaaccagcacctgtgtggcagccacctggtggaggccctgtacctggtgtgtggggagcggggcttcttctacaccaagcccacccggcgggaggccgaggacctgcaggtgggccaggtggagctgggcggcggccctggggccggcagcctgcagcccctggccctggagggcagcctgcagaagaggggcatcgtggagcagtgctgcaccagcatctgcagcctgtaccagctggagaactactgcaactag

SEQ ID NO: 110622 - DNA, 333 bp, Artificial Sequence
  derived and/or modified sequence
atggccctgtggatgcggctgctgcccctgctggccctgctggccctttggggtcccgaccctgccgcagcctttgttaaccagcatctgtgcggcagtcacctagttgaagcgctgtacttggtctgtggggagagggggttcttctatactcctaagacccgcagggaagcagaggacctgcaagtgggtcaggtggagctgggggggggacccggggctggaagccttcaacctttagccctggaaggcagcttacagaaacgcgggattgttgagcagtgctgtacttctatttgttccctctatcagttggagaactactgtaactag

SEQ ID NO: 110623 - DNA, 333 bp, Artificial Sequence
  derived and/or modified sequence
atggccctgtggatgcggctgctgcccctgctggccctgctggccctgtggggcccagacccggctgccgctttcgtgaaccagcacctctgcggcagccatctggtagaagccctttacctggtttgtggagaacgagggttcttttatactcctaagacccggcgggaagcagaggatctgcaggtcggacaggtggagctgggcggtgggcccggtgctggaagtcttcagcccctggccctggaaggcagcctgcagaagcgcggcatcgtggagcagtgttgcacctctatctgctcgctataccaactcgaaaactattgtaactag

SEQ ID NO: 110624 - DNA, 333 bp, Artificial Sequence
  derived and/or modified sequence
atggccctgtggatgcggctgctgcccctgctggccctgctggccttatgggggccagatcccgcagctgccttcgtaaatcaacacctttgtgggagccacctggtagaggcactctatctggtatgcggcgaaaggggattcttctacacccccaaaaccagacgcgaagcagaagacctgcaggtagggcaggtggaactgggtggcggccctggtgctggtagccttcagccactggccttagaggggtctctccagaaaagggggatcgtggagcaatgctgtacctctatttgctctctgtatcagctcgaaaactattgcaattag

SEQ ID NO: 110625 - DNA, 297 bp, Artificial Sequence
  derived and/or modified sequence
atggccctgtggatgcggctgctgcccctgctggccctgctggccctctggggacccgaccccgcagcggcattcgtgaatcaacatctgtgcggtagccatttggtggaagcactgtatctagtgtgtggcgagagaggcttcttctacaccccaaagacacggcgggaagccgaagatttacaggggtcactccaaccactggctcttgaaggatccctccagaaacgaggaatcgttgagcaatgttgcacctccatatgctccctgtaccagctggagaactattgtaattag

SEQ ID NO: 110626 - DNA, 333 bp, Artificial Sequence
  derived and/or modified sequence
atggccctgtggatgcggctgctgcccctgctggccctgctggccctgtggggccctgacccagccgccgctttcgtcaatcaacacctttgtggctcacacctggtagaagcactgtacctggtttgtggcgagcgagggttcttttacacagataagactcggcgtgaggctgaggatttacaagtcgggcaagtagaactaggcgggggaccaggagccggatcactccagccactcgcactagagggatcccttcaaaagcggggaatcgtggagcagtgctgcacctctatctgctccttatatcagctcgagaactactgcaattag

SEQ ID NO: 110627 - DNA, 333 bp, Artificial Sequence
  derived and/or modified sequence
atggccctgtggatgcggctgctgcccctgctggccctgctggccctgtggggcccagaccctgcagcagctttcgtcaatcagcatctgtgtggatctcacctagtggaggcgctatacctggtatgtggcgaacgcgggttcttctacaccccgaaaactcgccgggaagcggaggacttgcaggtcggacaagtggaattgggcgggggccccggagctggctctcttcagccccttgccctcgagggatctctgcagaaaagaggaattgtggaacagtgctgcacatcgatctgcagcctgtatcagttagagaactattgcgggtag

SEQ ID NO: 110628 - DNA, 333 bp, Artificial Sequence
  derived and/or modified sequence
atggccctgtggatgcggctgctgcccctgctggccctgctggccctatggggtcctgaccctgcggctgccttcgtgaagcagcacctttgcgggtcccacctcgtggaggcattgtatctggtctgcggggaacgtggattcttctacacaccggagacccgccgggaggccgaagacttgcaggtgggccaggtggagctggggggaggcccaggggccggttccctgcagcctctggcactggagggctcactgcaaaaaaggggcatcgtagagcagtgctgcaccagcatctgcagtctgtaccagctggaaaattactgcaattag

SEQ ID NO: 110629 - DNA, 333 bp, Artificial Sequence
  derived and/or modified sequence
atggccctgtggatgcggctgctgcccctgctggccctgctggccctgtggggccccgaccctgctgctgcatttgtgaaccagcacctctgcggttcccatctggtcgaagccctgtatttggtatgtggagaaagggggttcttttacacaaaacccactcgcagggaggcggaggacctccaggttggccaggtggaactgggagggggcccaggggccggctcactgcagcccctagcactcgagggttcccttcagaaacgcggtattgtcgagcagtgctgcacatcaatttgctccctgtatcagctggagaactattgtaattag

SEQ ID NO: 110630 - DNA, 333 bp, Artificial Sequence
  derived and/or modified sequence
atggccttgtggatgcgcctactgccgcttcttgcacttctggccctgtggggcccagatcctgctgctgcgttcgtgaatcagcatctctgcggtagtcacctcgttgaagcattatatctcgtatgcggagagcggggattcttctatacaccgaagacacgcagagaggccgaagatctccaggtgggtcaggtggaactaggaggcggaccgggagccggatcgttacagccactggctctggagggttcactgcagaagagaggcatcgtcgagcagtgttgtacgtctatctgcagcctgtatcagcttgaaaattactgtaactag

SEQ ID NO: 110631 - DNA, 333 bp, Artificial Sequence
  derived and/or modified sequence
atggcactctggatgagattgttgcccttgctggctctgctggctctttgggggccagacccagccgctgccttcgtgaaccaacacttgtgcggatcccacctggtcgaggccttgtatctcgtttgtggagaaaggggctttttctacacgcctaagactcgacgggaggcggaggatctgcaagtgggccaggtggaactgggtgggggtcctggcgcaggttctctgcagccactggcgctggaaggatcgttacagaaaagaggaatagtggaacaatgttgcaccagtatctgttctctgtaccagctggagaactactgcaactag

SEQ ID NO: 110632 - DNA, 333 bp, Artificial Sequence
  derived and/or modified sequence
atggctctgtggatgagacttttgccgctgttggccctactggccctctggggtcctgacccagccgcagcttttgtgaaccagcacctctgcgggtcacatttggtggaggccctctacctggtttgtggggaaaggggattcttctatacgccaaaaaccaggcgagaggctgaagacttgcaggttggccaggtagaactgggcggtggaccgggagccggaagcctgcagcccttggccctggaggggagcttacagaaacgagggatcgtggaacagtgctgtaccagtatctgttctctatatcagcttgaaaattattgtaactag

SEQ ID NO: 110633 - DNA, 297 bp, Artificial Sequence
  derived and/or modified sequence
atggctctttggatgcgacttctaccgctgttggcactgttggctctctggggcccagaccctgcagccgctttcgtgaatcaacacctgtgcggcagtcatttggtggaagcgctatacttggtgtgtggcgaacgtgggttcttttatacgcctaagactcgcagggaagcggaggatctgcagggaagcctccaaccactcgccctggaaggttcattgcagaaaaggggaattgttgagcagtgctgtacgtccatctgttctttgtaccagctagaaaattactgtaattag

SEQ ID NO: 110634 - DNA, 333 bp, Artificial Sequence
  derived and/or modified sequence
atggcactttggatgcggctcctgcctctgcttgccttgttagcgttgtgggggcctgaccctgcagctgcattcgtgaaccaacatttatgcggctcccatctcgtggaagctttgtacctggtttgcggagaacggggtttcttctataccgacaagacacgccgagaggcagaagaccttcaagtaggtcaggttgagttggggggaggaccgggagccggatccctccagccactggcccttgaagggagcctgcagaagaggggaatcgttgaacagtgctgtacttcaatttgcagcctgtatcagctggaaaattactgcaactag

SEQ ID NO: 110635 - DNA, 333 bp, Artificial Sequence
  derived and/or modified sequence
atggcgctatggatgcgactgctgcctctgctggcactgcttgccttgtggggtccggatcctgccgcagccttcgtcaaccaacatctttgtggatcgcacttggtggaggccctgtatctggtgtgtggggagcgtggctttttctatacccctaagacccgcagggaagctgaggatcttcaagtggggcaggtcgaattggggggaggccctggtgcgggttcactacagccactcgccctcgaaggaagcttgcagaaacgcggtattgttgagcagtgttgcacatcaatatgcagtctctaccaactggaaaattactgcggttag

SEQ ID NO: 110636 - DNA, 333 bp, Artificial Sequence
  derived and/or modified sequence
atggccctttggatgagactgttacctctactggccttactggccctctggggccctgaccccgcagccgcattcgtgaagcaacacctctgcgggtcccatctggtggaggctctgtatctcgtgtgcggtgagcggggattcttttatactcctgaaaccaggagggaggccgaggatctccaggtcggccaggttgagctagggggaggcccaggcgcaggatctctccagccattagcactggagggatctctgcagaagcgaggcatcgttgaacagtgttgtaccagcatctgtagtctctatcagttggagaattattgcaactag

SEQ ID NO: 110637 - DNA, 333 bp, Artificial Sequence
  derived and/or modified sequence
atggcactgtggatgcgcctgttaccactgctggccttgcttgctttatggggccctgatccagccgctgccttcgttaaccaacacctgtgcggaagtcacctggtggaggccctttatttggtgtgcggtgagaggggatttttctacacgaaaccaacgcgcagagaggctgaagacttgcaggttggccaggttgagttggggggtggtccgggagctggatccctgcagcccctggcactggagggctcccttcaaaaaaggggcattgttgagcagtgttgtacctccatatgctccctatatcagctggagaattattgtaattag

SEQ ID NO: 110638 - DNA, 503 bp, Artificial Sequence
  derived and/or modified sequence
ccagcagccctcagccctccaggacaggctgcatcagaagaggccatcaagcaggtctgttccaagggcctttgcgtcagatcactgtccttctgccatggccctgtggatgcgcctcctgcccctgctggcgctgctggccctctggggacctgacccagccgcagcctttgtgaaccaacacctgtgcggctcacacctggtggaagctctctacctagtgtgcggggaacgaggcttcttctacacacccaagacccgccgggaggcagaggacctgcaggtggggcaggtggagctgggcgggggccctggtgcaggcagcctgcagcccttggccctggaggggtccctgcagaagcgtggcattgtggaacaatgctgtaccagcatctgctccctctaccagctggagaactactgcaactagacgcagcccgcaggcagccccacacccgccgcctcctgcaccgagagagatggaataaagcccttgaaccagc

SEQ ID NO: 110639 - DNA, 597 bp, Artificial Sequence
  derived and/or modified sequence
aaattgcagcctcagcccccagccatctgccgacccccccaccccaggccctaatgggccaggcggcaggggttgagaggtaggggagatgggctctgagactataaagccagcgggggcccagcagccctcagccctccaggacaggctgcatcagaagaggccatcaagcagatcactgtccttctgccatggccctgtggatgcgcctcctgcccctgctggcgctgctggccctctggggacctgacccagccgcagcctttgtgaaccaacacctgtgcggctcacacctggtggaagctctctacctagtgtgcggggaacgaggcttcttctacacacccaagacccgccgggaggcagaggacctgcaggtggggcaggtggagctgggcgggggccctggtgcaggcagcctgcagcccttggccctggaggggtccctgcagaagcgtggcattgtggaacaatgctgtaccagcatctgctccctctaccagctggagaactactgcaactagacgcagcccgcaggcagccccacacccgccgcctcctgcaccgagagagatggaataaagcccttgaaccagc

SEQ ID NO: 110640 - DNA, 639 bp, Artificial Sequence
  derived and/or modified sequence
tccaggacaggctgcatcagaagaggccatcaagcaggtctgttccaagggcctttgcgtcaggtgggctcaggattccagggtggctggaccccaggccccagctctgcagcagggaggacgtggctgggctcgtgaagcatgtgggggtgagcccaggggccccaaggcagggcacctggccttcagcctgcctcagccctgcctgtctcccagatcactgtccttctgccatggccctgtggatgcgcctcctgcccctgctggcgctgctggccctctggggacctgacccagccgcagcctttgtgaaccaacacctgtgcggctcacacctggtggaagctctctacctagtgtgcggggaacgaggcttcttctacacacccaagacccgccgggaggcagaggacctgcaggtggggcaggtggagctgggcgggggccctggtgcaggcagcctgcagcccttggccctggaggggtccctgcagaagcgtggcattgtggaacaatgctgtaccagcatctgctccctctaccagctggagaactactgcaactagacgcagcccgcaggcagccccacacccgccgcctcctgcaccgagagagatggaataaagcccttgaaccagc

SEQ ID NO: 110641 - DNA, 297 bp, Artificial Sequence
  derived and/or modified sequence
atggccctgtggatgcgcctcctgcccctgctggcgctgctggccctctggggacctgacccagccgcagcctttgtgaaccaacacctgtgcggctcacacctggtggaagctctctacctagtgtgcggggaacgaggcttcttctacacacccaagacccgccgggaggcagaggacctgcagggcagcctgcagcccttggccctggaggggtccctgcagaagcgtggcattgtggaacaatgctgtaccagcatctgctccctctaccagctggagaactactgcaactag

SEQ ID NO: 110642 - DNA, 333 bp, Artificial Sequence
  derived and/or modified sequence
atggctctgtggatgagactgttgccgctgctggctctcctcgctttgtggggcccggatcccgctgcagctttcgttaaccagcatttatgtggatcacacctggtggaggccctttaccttgtctgcggggaacgtggattcttttatacaccaaaaactagacgagaggctgaggatctgcaggtgggacaggtagaactgggcggaggtccaggcgcaggctccttgcaaccgctggctctggaaggttcactacagaagaggggcatcgtagagcagtgctgtacttcgatatgttcactctatcagctggaaaactattgcaattag

SEQ ID NO: 110643 - DNA, 333 bp, Artificial Sequence
  derived and/or modified sequence
atggccctttggatgcgcctgttgccgctgctggcacttttagctctgtggggacctgatccagccgcagcgtttgttaatcagcacctgtgcggcagccatttggtggaagccctttacctcgtatgcggcgagcgtggatttttttacacacctaaaaccaggagggaggccgaggacttacaggtaggccaggtcgaactcggaggcggcccaggggcaggtagtctgcagccactcgccctcgaaggaagtttacagaaaagagggatcgtcgaacagtgttgtacctccatctgtagcctgtaccaactggaaaattactgtaactag

SEQ ID NO: 110644 - DNA, 333 bp, Artificial Sequence
  derived and/or modified sequence
atggccctttggatgagactgctgccgttgttggctttactcgctttgtgggggcccgatcctgccgcggcttttgtcaaccaacacctttgtggaagtcacctggtcgaggccttatacttggtgtgtggcgagagaggatttttctatacccccaagacaaggcgggaggctgaagatctgcaagtgggacaagtggaattggggggcggacctggggcaggcagccttcagccactggccctggaagggagcttacaaaagagaggtatcgtcgagcagtgctgcacatcaatctgttctttatatcagctcgaaaattactgtaattag

SEQ ID NO: 110645 - DNA, 297 bp, Artificial Sequence
  derived and/or modified sequence
atggcattgtggatgcgcttgctacccctcctcgccctcctcgctctgtgggggcccgatcctgccgcagcgtttgtcaaccaacatctgtgcggcagtcatctcgtcgaggcactctatctggtctgcggtgaacgagggtttttctacactcccaagacacgacgtgaggccgaggatttacaggggtcactgcagccactggctctggaaggaagcctgcaaaaaagagggatcgtggaacaatgttgtacaagtatttgctcactttaccagctggagaattattgtaactag

SEQ ID NO: 110646 - DNA, 333 bp, Artificial Sequence
  derived and/or modified sequence
atggcactttggatgcggctacttccgttactggccttactagctctttggggaccagatccagccgcggccttcgttaaccaacatctgtgtggctcacacctagtcgaagccctttatctggtgtgcggggaaagaggattcttttatactgataaaacccggagagaagccgaggacctgcaggtaggacaagtggagctgggcggaggccccggagcagggtccctacagcctctggccttagaggggtcgttgcaaaagagaggcatagtggaacagtgttgcactagcatatgttctctttatcagctggaaaattactgcaactag

SEQ ID NO: 110647 - DNA, 333 bp, Artificial Sequence
  derived and/or modified sequence
atggccctatggatgcggttactgccacttcttgcccttttagccctttggggaccagatcccgccgcagcgtttgtaaatcagcacctgtgcggcagccaccttgtggaagcactttatctcgtgtgcggcgaacgcggatttttctacactcctaaaactcgcagagaggccgaagacctccaggtgggacaggtagagctgggcggtgggcctggagctggcagtctccagcccttagcactggaaggtagtctgcaaaaacgtggcattgtggagcagtgttgcacatctatttgcagtttgtatcagctcgagaattactgtggatag

SEQ ID NO: 110648 - DNA, 333 bp, Artificial Sequence
  derived and/or modified sequence
atggcactgtggatgagattactccccttgctggcacttctggccttgtggggtccggaccctgctgccgcttttgtcaaacagcacttatgtggctctcatcttgttgaagctctgtacttggtatgcggcgaacgcggattcttctacacccctgaaactagacgtgaagcggaagacttgcaggtgggccaagtggagctgggtggtggcccgggggccggcagcctacagccgttggcgctggagggctcactgcagaaacgcggaatcgtggaacagtgctgcacaagcatatgctcattataccaactcgagaactactgtaactag

SEQ ID NO: 110649 - DNA, 333 bp, Artificial Sequence
  derived and/or modified sequence
atggccctctggatgcgcctgcttcccttgcttgctttgttagcactgtggggaccagatcccgccgccgcattcgttaaccagcacctatgtggttcacatctggtggaagccctctatcttgtctgcggggagaggggctttttctatacgaagccaaccagaagagaagcagaggacttacaggtgggtcaggtcgaattgggtggcggcccaggcgccggttctttgcaaccgcttgcactcgaaggctctctccaaaagcgaggaatcgtggaacagtgctgtacatctatatgttcactctatcagctggaaaactactgcaactag

SEQ ID NO: 110650 - DNA, 333 bp, Artificial Sequence
  derived and/or modified sequence
atggctctgtggatgagactgttgccgctgctggctctcctcgctttgtggggcccggatcccgctgcagctttcgttaaccagcatttatgtggatcacacctggtggaggccctttaccttgtctgcggggaacgtggattcttttatacaccaaaaactagacgagaggctgaggatctgcaggtgggacaggtagaactgggcggaggtccaggcgcaggctccttgcaaccgctggctctggaaggttcactacagaagaggggcatcgtagagcagtgctgtacttcgatatgttccctgtatcagcttgaaaattattgtaattag

SEQ ID NO: 110651 - DNA, 333 bp, Artificial Sequence
  derived and/or modified sequence
atggccctttggatgcgcctgttgccgctgctggcacttttagctctgtggggacctgatccagccgcagcgtttgttaatcagcacctgtgcggcagccatttggtggaagccctttacctcgtatgcggcgagcgtggatttttttacacacctaaaaccaggagggaggccgaggacttacaggtaggccaggtcgaactcggaggcggcccaggggcaggtagtctgcagccactcgccctcgaaggaagtttacagaaaagagggatcgtcgaacagtgttgtacctccatctgttctctgtatcagctcgaaaactactgtaattag

SEQ ID NO: 110652 - DNA, 333 bp, Artificial Sequence
  derived and/or modified sequence
atggcactttggatgcggctacttccgttactggccttactagctctttggggaccagatccagccgcggccttcgttaaccaacatctgtgtggctcacacctagtcgaagccctttatctggtgtgcggggaaagaggattcttttatactgataaaacccggagagaagccgaggacctgcaggtaggacaagtggagctgggcggaggccccggagcagggtccctacagcctctggccttagaggggtcgttgcaaaagagaggcatagtggaacagtgttgcactagcatatgttctctctatcagctcgaaaactactgtaactag

SEQ ID NO: 110653 - DNA, 333 bp, Artificial Sequence
  derived and/or modified sequence
atggccctatggatgaggctgctcccactcctcgccctacttgcactttggggaccagatccagccgccgccttcgttaatcagcacctgtgcggctctcacctcgttgaagctctctatctcgtgtgcggggaacgtggttttttctatactccaaagacacgtcgggaagccgaagatctgcaggtcggtcaagtagaactgggcgggggaccaggggccggaagtctgcagcctcttgccctagagggaagcttgcagaagagaggcatagtggaacagtgttgcaccagtatctgttcgttataccaactcgagaactattgcggatag

SEQ ID NO: 110654 - DNA, 333 bp, Artificial Sequence
  derived and/or modified sequence
atggcactttggatgaggctgctcccattactggctctactggccttgtggggacccgatcccgcagccgcatttgtgaagcagcatctgtgtgggagtcacttggttgaggccctgtatctcgtgtgcggcgaaaggggattcttctatacccccgaaacccgaagggaggcagaagacttgcaggtcggacaggttgagttgggaggtggacccggtgctggatccctgcaacccttggccctggaaggaagcctgcaaaagagggggattgtggagcagtgctgcacctcgatttgtagtctctaccagctcgaaaactattgtaattag

SEQ ID NO: 110655 - DNA, 333 bp, Artificial Sequence
  derived and/or modified sequence
atggccctctggatgcgcctgcttcccttgcttgctttgttagcactgtggggaccagatcccgccgccgcattcgttaaccagcacctatgtggttcacatctggtggaagccctctatcttgtctgcggggagaggggctttttctatacgaagccaaccagaagagaagcagaggacttacaggtgggtcaggtcgaattgggtggcggcccaggcgccggttctttgcaaccgcttgcactcgaaggctctctccaaaagcgaggaatcgtggaacagtgctgtacatctatatgttccctgtatcagctcgagaattattgtaattag

SEQ ID NO: 110656 - RNA, 563 nt, Artificial Sequence
  derived and/or modified sequence
agcuuuuggacccucguacagaagcuaauacgacucacuauagggaaauaagagagaaaagaagaguaagaagaaauauaagagccaccauggcgcucuggugagguuucugccuuuguuggccuugcuguuccucugggagucccaccccacacaggcguuugugaagcagcacuugugcgggucgcaucugguggaggcacuuuaucucgucugcggcgagcgaggauucuucuacaccccgaugagcagacgcgaaguggaagauccgcaagucgcgcagcucgaacuuggggguggucccggagccggagacuugcaaacucucgcucucgagguagcgcagcagaaacgggguaucguagaccaguguugcacgucgaucuguucacuuuaucaacuugagaacuacuguaauugaagcgcugccuucugcggggcuugccuucuggccaugcccuucuucucucccuugcaccuguaccucuuggucuuugaauaaagccugaguaggaaggcggccgcucgagcaugcaucuagagggcccaauucgcccuauucg

SEQ ID NO: 110657 - RNA, 567 nt, Artificial Sequence
  derived and/or modified sequence
agcuuuuggacccucguacagaagcuaauacgacucacuauagggaaauaagagagaaaagaagaguaagaagaaauauaagagccaccauggcucucuggaugcggcuucuuccacugcucgcccucuuggcguuguggggacccgacccugcagcagcguuugugaaucagcaccucugcgggucccaucuggucgaagcccuuuaccuuguguguggcgagcgcggguucuucuacacgcccaagacaaggcgcgaggcggaggaucuccaaguagggcagguggaauugggagggggaccgggagccgguucacuccagccccuggcguuggaggggucgcugcagaaaagagguauugucgaacaguguugcacuagcaucugcucgcuguaucaacuugagaacuauuguaacugaagcgcugccuucugcggggcuugccuucuggccaugcccuucuucucucccuugcaccuguaccucuuggucuuugaauaaagccugaguaggaaggcggccgcucgagcaugcaucuagagggcccaauucgcccuauucgaag

SEQ ID NO: 110658 - RNA, 476 nt, Artificial Sequence
  derived and/or modified sequence
gggaaauaagagagaaaagaagaguaagaagaaauauaagagccaccauggcucucuggaugcggcuucuuccacugcucgcccucuuggcguuguggggacccgacccugcagcagcguuugugaaucagcaccucugcgggucccaucuggucgaagcccuuuaccuuguguguggcgagcgcggguucuucuacacgcccaagacaaggcgcgaggcggaggaucuccaaguagggcagguggaauugggagggggaccgggagccgguucacuccagccccuggcguuggaggggucgcugcagaaaagagguauugucgaacaguguugcacuagcaucugcucgcuguaucaacuugagaacuauuguaacugaagcgcugccuucugcggggcuugccuucuggccaugcccuucuucucucccuugcaccuguaccucuuggucuuugaauaaagccugaguaggaag

SEQ ID NO: 110659 - RNA, 476 nt, Artificial Sequence
  derived and/or modified sequence
gggaaauaagagagaaaagaagaguaagaagaaauauaagagccaccauggcgcucuggaugcgauugcuuccucuccuggcuuugcuugcacugugggguccagacccggcagccgcguucgugaaucagcauuugugcggaagccaccuugucgaagcguuguaucuggucugcggggagaggggguucuuuuacacacccaagacccgcagagaggccgaggauuugcaaguaggccagguggaacucggugggggacccggagccggaucgcuccaaccgcucgcgcuggaagggucacugcagaaacggggaaucguggagcaguguuguacguccauuugcucgcuuuaccagcuugagaacuauuguggcugauaagcugccuucugcggggcuugccuucuggccaugcccuucuucucucccuugcaccuguaccucuuggucuuugaauaaagccugaguaggaag

SEQ ID NO: 110660 - RNA, 470 nt, Artificial Sequence
  derived and/or modified sequence
gggaaauaagagagaaaagaagaguaagaagaaauauaagagccaccauggcccuuuggaugagauugcuuccucuucucgcgcuccucgcgcugugggguccagaccccgcagcugccuuugugaaucagcaucugugcggaagccacuuggucgaagcccuguacuugguaugcggggagcggggguucuucuacaccgacaaaacagaagcggaagauuugcaagucggacagguggaguugggugggggucccggagcaggcucgcuucaaccgcuggcgcucgagggaucacuucagaagagggggaucguggagcaguguugcacguccauuuguucgcuguaucagcucgagaacuauuguaacugauaagcugccuucugcggggcuugccuucuggccaugcccuucuucucucccuugcaccuguaccucuuggucuuugaauaaagccugaguaggaag

SEQ ID NO: 110661 - RNA, 470 nt, Artificial Sequence
  derived and/or modified sequence
gggaaauaagagagaaaagaagaguaagaagaaauauaagagccaccauggcccucuggaugagacuguugccgcuccuggcacuucuugcgcucugggggccugaccccgcagcggccuucgugaaucagcauuuguguggaucgcaccugguagaagcgcuuuacuuggucugcggugagcggggguuuuucuauaccaagccgacagaggccgaagauuugcaagugggccaggucgagcucggugggggucccggagcuggaucgcuccagccacuggcgcuugagggaucacugcagaaaagggggauuguggagcaguguugcacgagcaucugcucccuuuaucaauuggaaaacuacuguaacugauaagcugccuucugcggggcuugccuucuggccaugcccuucuucucucccuugcaccuguaccucuuggucuuugaauaaagccugaguaggaag

SEQ ID NO: 110662 - RNA, 470 nt, Artificial Sequence
  derived and/or modified sequence
gggaaauaagagagaaaagaagaguaagaagaaauauaagagccaccauggcgcuguggaugcggcuucucccucuucucgcguuguuggcacuuuggggacccgacccagcugccgccuuugucaaacagcaccucugugggucgcaucugguagaggcccuguauuuggugugcggggaaagggguuucuucuacacaccggaaaccgaggcggaagauuugcaagucggacagguggagcuugguggcggaccgggagcggggagccugcagccccuugcauuggaagggucgcugcagaagcgcggaauuguggagcagugcuguacgucaaucugcucccucuaccaacucgagaacuauuguaauugauaagcugccuucugcggggcuugccuucuggccaugcccuucuucucucccuugcaccuguaccucuuggucuuugaauaaagccugaguaggaag

SEQ ID NO: 110663 - RNA, 333 nt, Artificial Sequence
  derived and/or modified sequence
auggcucuguggaugagacuguugccgcugcuggcucuccucgcuuuguggggcccggaucccgcugcagcuuucguuaaccagcauuuauguggaucacaccugguggaggcccuuuaccuugucugcggggaacguggauucuuuuauacaccaaaaacuagacgagaggcugaggaucugcaggugggacagguagaacugggcggagguccaggcgcaggcuccuugcaaccgcuggcucuggaagguucacuacagaagaggggcaucguagagcagugcuguacuucgauauguucacucuaucagcuggaaaacuauugcaauuag

SEQ ID NO: 110664 - RNA, 333 nt, Artificial Sequence
  derived and/or modified sequence
auggcccuuuggaugcgccuguugccgcugcuggcacuuuuagcucuguggggaccugauccagccgcagcguuuguuaaucagcaccugugcggcagccauuugguggaagcccuuuaccucguaugcggcgagcguggauuuuuuuacacaccuaaaaccaggagggaggccgaggacuuacagguaggccaggucgaacucggaggcggcccaggggcagguagucugcagccacucgcccucgaaggaaguuuacagaaaagagggaucgucgaacaguguuguaccuccaucuguagccuguaccaacuggaaaauuacuguaacuag

SEQ ID NO: 110665 - RNA, 333 nt, Artificial Sequence
  derived and/or modified sequence
auggcccuuuggaugagacugcugccguuguuggcuuuacucgcuuugugggggcccgauccugccgcggcuuuugucaaccaacaccuuuguggaagucaccuggucgaggccuuauacuugguguguggcgagagaggauuuuucuauacccccaagacaaggcgggaggcugaagaucugcaagugggacaaguggaauuggggggcggaccuggggcaggcagccuucagccacuggcccuggaagggagcuuacaaaagagagguaucgucgagcagugcugcacaucaaucuguucuuuauaucagcucgaaaauuacuguaauuag

SEQ ID NO: 110666 - RNA, 297 nt, Artificial Sequence
  derived and/or modified sequence
auggcauuguggaugcgcuugcuaccccuccucgcccuccucgcucugugggggcccgauccugccgcagcguuugucaaccaacaucugugcggcagucaucucgucgaggcacucuaucuggucugcggugaacgaggguuuuucuacacucccaagacacgacgugaggccgaggauuuacaggggucacugcagccacuggcucuggaaggaagccugcaaaaaagagggaucguggaacaauguuguacaaguauuugcucacuuuaccagcuggagaauuauuguaacuag

SEQ ID NO: 110667 - RNA, 333 nt, Artificial Sequence
  derived and/or modified sequence
auggcacuuuggaugcggcuacuuccguuacuggccuuacuagcucuuuggggaccagauccagccgcggccuucguuaaccaacaucuguguggcucacaccuagucgaagcccuuuaucuggugugcggggaaagaggauucuuuuauacugauaaaacccggagagaagccgaggaccugcagguaggacaaguggagcugggcggaggccccggagcagggucccuacagccucuggccuuagaggggucguugcaaaagagaggcauaguggaacaguguugcacuagcauauguucucuuuaucagcuggaaaauuacugcaacuag

SEQ ID NO: 110668 - RNA, 333 nt, Artificial Sequence
  derived and/or modified sequence
auggcccuauggaugcgguuacugccacuucuugcccuuuuagcccuuuggggaccagaucccgccgcagcguuuguaaaucagcaccugugcggcagccaccuuguggaagcacuuuaucucgugugcggcgaacgcggauuuuucuacacuccuaaaacucgcagagaggccgaagaccuccaggugggacagguagagcugggcggugggccuggagcuggcagucuccagcccuuagcacuggaagguagucugcaaaaacguggcauuguggagcaguguugcacaucuauuugcaguuuguaucagcucgagaauuacuguggauag

SEQ ID NO: 110669 - RNA, 333 nt, Artificial Sequence
  derived and/or modified sequence
auggcacuguggaugagauuacuccccuugcuggcacuucuggccuugugggguccggacccugcugccgcuuuugucaaacagcacuuauguggcucucaucuuguugaagcucuguacuugguaugcggcgaacgcggauucuucuacaccccugaaacuagacgugaagcggaagacuugcaggugggccaaguggagcugggugguggcccgggggccggcagccuacagccguuggcgcuggagggcucacugcagaaacgcggaaucguggaacagugcugcacaagcauaugcucauuauaccaacucgagaacuacuguaacuag

SEQ ID NO: 110670 - RNA, 333 nt, Artificial Sequence
  derived and/or modified sequence
auggcccucuggaugcgccugcuucccuugcuugcuuuguuagcacuguggggaccagaucccgccgccgcauucguuaaccagcaccuaugugguucacaucugguggaagcccucuaucuugucugcggggagaggggcuuuuucuauacgaagccaaccagaagagaagcagaggacuuacaggugggucaggucgaauuggguggcggcccaggcgccgguucuuugcaaccgcuugcacucgaaggcucucuccaaaagcgaggaaucguggaacagugcuguacaucuauauguucacucuaucagcuggaaaacuacugcaacuag

SEQ ID NO: 110671 - RNA, 333 nt, Artificial Sequence
  derived and/or modified sequence
auggcucuguggaugagacuguugccgcugcuggcucuccucgcuuuguggggcccggaucccgcugcagcuuucguuaaccagcauuuauguggaucacaccugguggaggcccuuuaccuugucugcggggaacguggauucuuuuauacaccaaaaacuagacgagaggcugaggaucugcaggugggacagguagaacugggcggagguccaggcgcaggcuccuugcaaccgcuggcucuggaagguucacuacagaagaggggcaucguagagcagugcuguacuucgauauguucccuguaucagcuugaaaauuauuguaauuag

SEQ ID NO: 110672 - RNA, 333 nt, Artificial Sequence
  derived and/or modified sequence
auggcccuuuggaugcgccuguugccgcugcuggcacuuuuagcucuguggggaccugauccagccgcagcguuuguuaaucagcaccugugcggcagccauuugguggaagcccuuuaccucguaugcggcgagcguggauuuuuuuacacaccuaaaaccaggagggaggccgaggacuuacagguaggccaggucgaacucggaggcggcccaggggcagguagucugcagccacucgcccucgaaggaaguuuacagaaaagagggaucgucgaacaguguuguaccuccaucuguucucuguaucagcucgaaaacuacuguaauuag

SEQ ID NO: 110673 - RNA, 333 nt, Artificial Sequence
  derived and/or modified sequence
auggcacuuuggaugcggcuacuuccguuacuggccuuacuagcucuuuggggaccagauccagccgcggccuucguuaaccaacaucuguguggcucacaccuagucgaagcccuuuaucuggugugcggggaaagaggauucuuuuauacugauaaaacccggagagaagccgaggaccugcagguaggacaaguggagcugggcggaggccccggagcagggucccuacagccucuggccuuagaggggucguugcaaaagagaggcauaguggaacaguguugcacuagcauauguucucucuaucagcucgaaaacuacuguaacuag

SEQ ID NO: 110674 - RNA, 333 nt, Artificial Sequence
  derived and/or modified sequence
auggcccuauggaugaggcugcucccacuccucgcccuacuugcacuuuggggaccagauccagccgccgccuucguuaaucagcaccugugcggcucucaccucguugaagcucucuaucucgugugcggggaacgugguuuuuucuauacuccaaagacacgucgggaagccgaagaucugcaggucggucaaguagaacugggcgggggaccaggggccggaagucugcagccucuugcccuagagggaagcuugcagaagagaggcauaguggaacaguguugcaccaguaucuguucguuauaccaacucgagaacuauugcggauag

SEQ ID NO: 110675 - RNA, 333 nt, Artificial Sequence
  derived and/or modified sequence
auggcacuuuggaugaggcugcucccauuacuggcucuacuggccuuguggggacccgaucccgcagccgcauuugugaagcagcaucugugugggagucacuugguugaggcccuguaucucgugugcggcgaaaggggauucuucuauacccccgaaacccgaagggaggcagaagacuugcaggucggacagguugaguugggagguggacccggugcuggaucccugcaacccuuggcccuggaaggaagccugcaaaagagggggauuguggagcagugcugcaccucgauuuguagucucuaccagcucgaaaacuauuguaauuag

SEQ ID NO: 110676 - RNA, 333 nt, Artificial Sequence
  derived and/or modified sequence
auggcccucuggaugcgccugcuucccuugcuugcuuuguuagcacuguggggaccagaucccgccgccgcauucguuaaccagcaccuaugugguucacaucugguggaagcccucuaucuugucugcggggagaggggcuuuuucuauacgaagccaaccagaagagaagcagaggacuuacaggugggucaggucgaauuggguggcggcccaggcgccgguucuuugcaaccgcuugcacucgaaggcucucuccaaaagcgaggaaucguggaacagugcuguacaucuauauguucccuguaucagcucgagaauuauuguaauuag

SEQ ID NO: 110677 - protein, 58 aa, Artificial Sequence
  derived and/or modified sequence
MVSESHHEALAAPPVTTVATVLPSNATEPASPGEGKEDAFSKLKEKFMNELHKIPLPP

SEQ ID NO: 110678 - DNA, 177 bp, Artificial Sequence
  derived and/or modified sequence
atggtgagcgagagccaccacgaggccctggccgccccccccgtgaccaccgtggccaccgtgctgcccagcaacgccaccgagcccgccagccccggcgagggcaaggaggacgccttcagcaagctgaaggagaagttcatgaacgagctgcacaagatccccctgcccccctag

SEQ ID NO: 110679 - DNA, 219 bp, Artificial Sequence
  derived and/or modified sequence
atggtgagcgagagccaccacgaggccctggccgccccccccgtgaccaccgtggccaccgtgctgcccagcaacgccaccgagcccgccagccccggcgagggcaaggaggacgccttcagcaagctgaaggagaagttcatgaacgagctgcacaagatccccctgcccccctgggccctgatcgccatcgccatcgtggccgtgctgctggtgtag

SEQ ID NO: 110680 - DNA, 222 bp, Artificial Sequence
  derived and/or modified sequence
atggtgagcgagagccaccacgaggccctggccgccccccccgtgaccaccgtggccaccgtgctgcccagcaacgccaccgagcccgccagccccggcgagggcaaggaggacgccttcagcaagctgaaggagaagttcatgaacgagctgcacaagatccccctgcccccctgggccctgatcgccatcgccatcgtggccgtgctgctggtgctgtag

SEQ ID NO: 110681 - DNA, 285 bp, Artificial Sequence
  derived and/or modified sequence
atggtgagcgagagccaccacgaggccctggccgccccccccgtgaccaccgtggccaccgtgctgcccagcaacgccaccgagcccgccagccccggcgagggcaaggaggacgccttcagcaagctgaaggagaagttcatgaacgagctgcacaagatccccctgcccccctgggccctgatcgccatcgccatcgtggccgtgctgctggtgctgacctgctgcttctgcatctgcaagaagtgcctgttcaagaagaagaacaagaagaagggcaagtag

SEQ ID NO: 110682 - DNA, 177 bp, Artificial Sequence
  derived and/or modified sequence
atggtgagtgaaagccaccatgaggcccttgccgctccaccagtcacaacagtcgcaaccgtattgccatcaaacgccactgagcctgcgtcgccaggagagggtaaggaagatgcttttagtaagctgaaggagaagttcatgaatgagctgcacaagatcccactccctccgtag

SEQ ID NO: 110683 - DNA, 219 bp, Artificial Sequence
  derived and/or modified sequence
atggtcagcgaatcacaccacgaagctctcgccgctccaccagttacaaccgtcgctacagtccttccatccaacgccactgagccggccagtccgggagaaggaaaagaggacgctttctcaaagctgaaggaaaagttcatgaacgaactacacaagattccccttccaccgtgggcattaatcgctatcgccatcgtggccgtgctgctggtctag

SEQ ID NO: 110684 - DNA, 222 bp, Artificial Sequence
  derived and/or modified sequence
atggtgtctgaatcacatcatgaggcgctcgctgctccacctgtgaccaccgtggccactgtgctcccttctaacgctaccgagccggccagcccgggggaaggcaaggaagatgcattcagcaaactcaaagaaaaatttatgaacgagctgcacaagatacctttgcctccctgggctctgatcgcaattgccatagtggctgtcctgctagttctgtag

SEQ ID NO: 110685 - DNA, 285 bp, Artificial Sequence
  derived and/or modified sequence
atggtgtcagagtcccatcacgaggctctggcggcccctcctgtcacaactgtcgctactgtgttaccgagcaacgccacagaacccgcaagtcccggcgaaggcaaggaagatgctttctccaagctcaaggaaaaatttatgaatgagctgcataagatcccccttcctccgtgggcactgattgccattgccatcgtggctgtactgctcgtgctgacctgctgcttctgtatttgtaaaaagtgcctctttaaaaaaaaaaataagaagaaaggcaagtag

SEQ ID NO: 110686 - DNA, 177 bp, Artificial Sequence
  derived and/or modified sequence
atggtgtctgagagccaccacgaggccctggccgcccctcctgtgaccaccgtggccaccgtgctgcccagcaatgccacagagcccgccagccctggagagggcaaggaggatgccttcagcaagctgaaggagaagttcatgaatgagctgcacaagatccccctgcccccatag

SEQ ID NO: 110687 - DNA, 219 bp, Artificial Sequence
  derived and/or modified sequence
atggtgtctgagagccaccacgaggccctggccgcccctcctgtgaccaccgtggccaccgtgctgcccagcaatgccacagagcccgccagccctggagagggcaaggaggatgccttcagcaagctgaaggagaagttcatgaatgagctgcacaagatccccctgcccccctgggccctgattgccatcgccatcgtggccgtgctgctggtgtag

SEQ ID NO: 110688 - DNA, 222 bp, Artificial Sequence
  derived and/or modified sequence
atggtgtctgagagccaccacgaggccctggccgcccctcctgtgaccaccgtggccaccgtgctgcccagcaatgccacagagcccgccagccctggagagggcaaggaggatgccttcagcaagctgaaggagaagttcatgaatgagctgcacaagatccccctgcccccctgggccctgattgccatcgccatcgtggccgtgctgctggtgctgtag

SEQ ID NO: 110689 - DNA, 285 bp, Artificial Sequence
  derived and/or modified sequence
atggtgtctgagagccaccacgaggccctggccgcccctcctgtgaccaccgtggccaccgtgctgcccagcaatgccacagagcccgccagccctggagagggcaaggaggatgccttcagcaagctgaaggagaagttcatgaatgagctgcacaagatccccctgcccccctgggccctgattgccatcgccatcgtggccgtgctgctggtgctgacctgctgcttctgcatctgcaagaagtgcctcttcaagaagaagaacaagaagaagggcaagtag

SEQ ID NO: 110690 - DNA, 177 bp, Artificial Sequence
  derived and/or modified sequence
atggtgagcgagagccaccacgaggccctggccgccccccccgtgaccactgtggcaacggtcctgcctagcaatgccaccgaacccgcatcacccggtgagggaaaggaagacgccttttctaagctcaaagagaaattcatgaacgagttgcataagatccctttgcccccctag

SEQ ID NO: 110691 - DNA, 219 bp, Artificial Sequence
  derived and/or modified sequence
atggtgagcgagagccaccacgaggccctggccgccccccccgtgacaaccgttgctactgtgctgccgtccaatgcaactgagcctgcctcgcccggagagggcaaagaggacgcattctccaagctgaaggagaagttcatgaatgaactgcacaagatccctctgccaccctgggccctcattgctatagcaattgtcgctgtgctcctggtgtag

SEQ ID NO: 110692 - DNA, 222 bp, Artificial Sequence
  derived and/or modified sequence
atggtgagcgagagccaccacgaggccctggccgccccccccgtgaccacggttgctacagtgcttccttccaatgctaccgaacccgcttcaccaggggagggcaaagaggacgctttctctaaacttaaagaaaaattcatgaatgagctacacaagattcctctgccaccgtgggctctgatcgctatcgcaatcgtcgcggtactgctggttctctag

SEQ ID NO: 110693 - DNA, 285 bp, Artificial Sequence
  derived and/or modified sequence
atggtgagcgagagccaccacgaggccctggccgccccccccgtgaccactgtggccacagttctaccgtctaatgcaactgaaccggcaagcccgggggaaggaaaggaggatgccttcagcaagctgaaagagaagttcatgaacgaactgcacaaaatccccctgcccccctgggcactcattgctattgctatcgtagctgtgctgttggtcctcacttgttgtttttgcatttgcaagaagtgcctgttcaaaaaaaaaaacaagaagaaaggaaagtag

SEQ ID NO: 110694 - DNA, 177 bp, Artificial Sequence
  derived and/or modified sequence
atggtgtccgagtcacaccacgaagcactagcagcccctcccgttaccactgtggcaaccgttctgccctcgaacgccaccgaacccgctagccccggagaggggaaagaggacgcttttagcaaattgaaggaaaaattcatgaacgaattgcacaaaattcctctccctccctag

SEQ ID NO: 110695 - DNA, 219 bp, Artificial Sequence
  derived and/or modified sequence
atggtgtccgagtcccatcacgaagctctggccgcacccccagttacaaccgtggcaactgtgttaccatctaacgctaccgagccagctagtcccggtgaggggaaggaggatgccttcagcaagctcaaggagaagtttatgaacgaactgcataagatccctcttcctccttgggcccttatcgcgattgccatcgtggctgtgctcctggtatag

SEQ ID NO: 110696 - DNA, 222 bp, Artificial Sequence
  derived and/or modified sequence
atggtgtccgagagccaccatgaggccttggcagcgcctcccgtgactaccgtagcaactgtgctgccttctaacgctacagaaccagcttcccccggtgaggggaaagaggacgcattctctaaacttaaagaaaaattcatgaatgagcttcacaagatacctttacccccttgggctcttattgccatcgccatagttgctgtgttactagtgctgtag

SEQ ID NO: 110697 - DNA, 285 bp, Artificial Sequence
  derived and/or modified sequence
atggtcagtgaatcccaccacgaggccctcgcagctcctcctgtaactactgtggccacagtcttgcctagcaacgccaccgaaccagctagccccggagagggaaaggaagacgcgttttcaaagctgaaagagaagttcatgaacgaactgcacaagatccctcttcccccatgggcacttatagccatcgctatcgtggctgtgctcttggtgctcacctgctgcttctgtatttgcaagaaatgtctttttaagaaaaagaataagaaaaagggtaagtag

SEQ ID NO: 110698 - DNA, 506 bp, Artificial Sequence
  derived and/or modified sequence
attttggaggaatctttggcattctgaatcatcctcctataacactttcccatccaggccccacccaactaatttttaatcataatttagatctcaacacaaaggctggcacaaagggaaaacgggaaaactagcaagagctagcaagaactagcaagagcttgaacaaacgcctggactcagattggaagactgctcatttgtctactgcctcattcctggaaattgcactggaactgtctgattaagaaaaacagaataattctgaaagaaagaaaacaaagaaaaacatactccagaattcctaatagaacacttcacctgaacctaaaatggtgagcgagagtcaccatgaggccctggcagccccgcctgtcaccactgtcgcgactgttctgccaagcaacgccacagagccagccagtcctggagaaggaaaggaagatgcattttctaagctgaaggagaagtttatgaatgagttgcataaaattccattgccaccg

SEQ ID NO: 110699 - DNA, 710 bp, Artificial Sequence
  derived and/or modified sequence
aacagaagatgtcagaatgatatgaaaaagttgctcttttgaaatgtttgttcttctagatttttttaaaatgtcagcatgattcatacctattggttcttagcctggagcacccagcacaaccaggaattgaggaagctagagcaggatgtgaataacgaatgggctgcataagcagaagtctatacccagtcaataagcagaagtctatacccagtcagtgtgcagagttgcaggctagcattttcacagattctattattctctctctctcaagggaaaacgggaaaactagcaagagctagcaagaactagcaagagcttgaacaaacgcctggactcagattggaagactgctcatttgtctactgcctcattcctggaaattgcactggaactgtctgattaagaaaaacagaataattctgaaagaaagaaaacaaagaaaaacatactccagaattcctaatagaacacttcacctgaacctaaaatggtgagcgagagtcaccatgaggccctggcagccccgcctgtcaccactgtcgcgactgttctgccaagcaacgccacagagccagccagtcctggagaaggaaaggaagatgcattttctaagctgaaggagaagtttatgaatgagttgcataaaattccattgccaccgtgggccttaattgcaatagccatagtcgcagtccttttagtcc

SEQ ID NO: 110700 - DNA, 579 bp, Artificial Sequence
  derived and/or modified sequence
ctctctctctcaagggaaaacgggaaaactagcaagagctagcaagaactagcaagagcttgaacaaacgcctggactcagattggaagactgctcatttgtctactgcctcattcctggaaattgcactggaactgtctgattaagcctcctttcactccgtgcccaattcctgcagttgttgctgaggtttaccagatggattaaaagaaaaaataagaagtggctccaaacataaaaacagaataattctgaaagaaagaaaacaaagaaaaacatactccagaattcctaatagaacaatacagaaactgaggtacacagagccatttaccccaggtcaacttcacctgaacctaaaatggtgagcgagagtcaccatgaggccctggcagccccgcctgtcaccactgtcgcgactgttctgccaagcaacgccacagagccagccagtcctggagaaggaaaggaagatgcattttctaagctgaaggagaagtttatgaatgagttgcataaaattccattgccaccgtgggccttaattgcaatagccatagtcgcagtccttttagtcct

SEQ ID NO: 110701 - DNA, 702 bp, Artificial Sequence
  derived and/or modified sequence
tttaaagaaagatgacggtgtcttaggaatgcttttaagggttctttggttgaaagtctgggaatactcagagataatattaatgagagcctagagtttttttcttttaaaatggggttccatggctttgggcagaaatgatttttatatgtatcatgattgaaaaaactctcagtacaagatgatgcacttctttatacagggaaaacgggaaaactagcaagagctagcaagaactagcaagagcttgaacaaacgcctggactcagattggaagactgctcatttgtctactgcctcattcctggaaattgcactggaactgtctgattaagaaaaacagaataattctgaaagaaagaaaacaaagaaaaacatactccagaattcctaatagaacacttcacctgaacctaaaatggtgagcgagagtcaccatgaggccctggcagccccgcctgtcaccactgtcgcgactgttctgccaagcaacgccacagagccagccagtcctggagaaggaaaggaagatgcattttctaagctgaaggagaagtttatgaatgagttgcataaaattccattgccaccgtgggccttaattgcaatagccatagtcgcagtccttttagtcctgacctgctgcttttgtatctgtaagaaatgtttgttcaaaaagaaaaacaagaagaagggaaagga

SEQ ID NO: 110702 - protein, 297 aa, Artificial Sequence
  derived and/or modified sequence
MKHIINSYENINNTARNNSDCPRVVLPEEIFFTISIVGVLENLIVLLAVFKNKNLQAPMYFFICSLAISDMLGSLYKILENILIILRNMGYLKPRGSFETTADDIIDSLFVLSLLGSIFSLSVIAADRYITIFHALRYHSIVTMRRTVVVLTVIWTFCTGTGITMVIFSHHVPTVITFTSLFPLMLVFILCLYVHMFLLARSHTRKISTLPRANMKGAITLTILLGVFIFCWAPFVLHVLLMTFCPSNPYCACYMSLFQVNGMLIMCNAVIDPFIYAFRSPELRDAFKKMIFCSRYW

SEQ ID NO: 110703 - DNA, 894 bp, Artificial Sequence
  derived and/or modified sequence
atgaagcacatcatcaacagctacgagaacatcaacaacaccgccagaaacaacagcgactgccccagagtggtgctgcccgaggagatcttcttcaccatcagcatcgtgggcgtgctggagaacctgatcgtgctgctggccgtgttcaagaacaagaacctgcaggcccccatgtacttcttcatctgcagcctggccatcagcgacatgctgggcagcctgtacaagatcctggagaacatcctgatcatcctgagaaacatgggctacctgaagcccagaggcagcttcgagaccaccgccgacgacatcatcgacagcctgttcgtgctgagcctgctgggcagcatcttcagcctgagcgtgatcgccgccgacagatacatcaccatcttccacgccctgagataccacagcatcgtgaccatgagaagaaccgtggtggtgctgaccgtgatctggaccttctgcaccggcaccggcatcaccatggtgatcttcagccaccacgtgcccaccgtgatcaccttcaccagcctgttccccctgatgctggtgttcatcctgtgcctgtacgtgcacatgttcctgctggccagaagccacaccagaaagatcagcaccctgcccagagccaacatgaagggcgccatcaccctgaccatcctgctgggcgtgttcatcttctgctgggcccccttcgtgctgcacgtgctgctgatgaccttctgccccagcaacccctactgcgcctgctacatgagcctgttccaggtgaacggcatgctgatcatgtgcaacgccgtgatcgaccccttcatctacgccttcagaagccccgagctgagagacgccttcaagaagatgatcttctgcagcagatactggtag

SEQ ID NO: 110704 - DNA, 894 bp, Artificial Sequence
  derived and/or modified sequence
atgaaacacatcattaatagttacgaaaatatcaataatacagcccgcaacaactcggactgtccccgggttgtgctcccagaggaaatcttttttacgatatctatcgtgggagtgttggagaatctcatagtcctcctggcagtgtttaaaaataagaacttacaagcccctatgtattttttcatttgttccctggctatctccgacatgctcggctctctatataaaatccttgaaaatatcctcatcatcctgagaaatatgggatacttaaaaccacgcggaagctttgaaacaacagcagacgatatcatcgattcactgttcgtgttatctctccttggctcgatattttcactctcagtgattgctgccgacaggtacataaccatttttcacgcgctgcgataccattccatagtcacaatgaggagaaccgtggtcgtcttgactgtcatttggacgttctgcaccggaacggggatcacgatggtgatcttctcgcaccacgttcctactgtcataaccttcaccagcctgtttccactgatgctcgtgttcatcttgtgcctgtacgtgcatatgtttttgcttgctcgcagtcataccagaaaaatttctaccctgcccagggcaaacatgaagggagccatcacactcacaatactcttgggtgtgttcattttctgttgggctccatttgtgctgcacgtgctcctgatgaccttttgtccatcaaacccctattgcgcatgttatatgtcgttattccaggtcaacggcatgctaatcatgtgtaacgcagtaattgaccctttcatctatgcattcaggagcccagaactgcgggatgccttcaagaaaatgatcttctgttcacggtactggtag

SEQ ID NO: 110705 - DNA, 894 bp, Artificial Sequence
  derived and/or modified sequence
atgaaacacataattaattcttacgaaaacatcaataatacagcacggaacaattctgactgtccacgcgttgtgctgcccgaggagatcttcttcactatatccatcgtgggcgtgctggaaaatttgatcgtgctactggccgtgttcaaaaacaaaaacctccaagcccctatgtatttcttcatttgcagtctggcaattagcgacatgttgggctcgctttataaaattctggaaaatattttgattatactgaggaacatggggtacttgaagccaaggggctcatttgagacaacagcagatgacatcatcgacagcctgttcgtactctcactgctcggcagtatcttctcattgtctgtgatcgccgcagaccgatacatcaccattttccatgcacttcggtaccatagcattgtgactatgaggcgaaccgttgtggtcctgactgttatctggaccttctgcaccggcaccggtatcaccatggtgatcttttctcatcacgttcccactgttatcacattcacaagtctttttccgctgatgttagtattcatcttgtgtctgtacgtgcatatgttccttttagcccgttcccatacgcgaaaaatctcgacactcccacgggctaatatgaaaggtgctataactctgacgatccttcttggcgtttttatattttgctgggctccttttgtgctccacgtgctacttatgaccttctgtcctagtaacccatactgcgcctgctacatgtctctattccaggtcaacggaatgttgattatgtgcaacgcggtcattgatccattcatctacgcgttccgcagccccgagttgcgtgacgcattcaagaaaatgatcttctgcagtcgatactggtag

SEQ ID NO: 110706 - DNA, 894 bp, Artificial Sequence
  derived and/or modified sequence
atgaagcacatcatcaacagctatgagaacatcaacaacacagccaggaacaacagcgactgcccccgggtggtgctgcctgaggagatcttcttcaccatcagcatcgtgggcgtgctggagaacctgattgtgctgctggccgtgttcaagaacaagaacctgcaggcccccatgtacttcttcatctgcagcctggccatcagtgacatgctgggcagcctgtacaagatcctggagaacatcctgatcatcctgaggaacatgggctacctgaagccccggggcagctttgagaccacagcagatgacatcatcgacagcctgtttgtgctgagcctgctgggcagcatcttcagcctgtctgtgattgctgctgaccgctacatcaccatcttccacgccctgcgctaccacagcatcgtgaccatgagaagaacagtggtggtgctgaccgtcatctggaccttctgcacaggaacaggcatcaccatggtgatcttcagccaccacgtgcccaccgtcatcaccttcaccagcctcttccccctgatgctggtgttcatcctgtgcctgtatgtgcacatgttcctgctggcccggagccacaccaggaagatcagcaccctgccccgggccaacatgaagggggccatcaccctgaccatcctgctgggcgtcttcatcttctgctgggccccctttgtgctgcacgtgctgctgatgaccttctgccccagcaacccctactgtgcctgctacatgagcctcttccaggtgaatggcatgctgatcatgtgcaatgctgtgattgaccccttcatctatgccttccgcagccctgagctgagagatgccttcaagaagatgatcttctgcagccgctactggtag

SEQ ID NO: 110707 - DNA, 894 bp, Artificial Sequence
  derived and/or modified sequence
atgaagcacatcatcaacagctacgagaacatcaacaacaccgccaggaataacagtgactgccctagagtagtattgccagaggagatctttttcaccatatccatcgtcggtgttcttgagaacctgattgtcctcttggctgtgttcaagaataagaacctgcaggctcctatgtacttttttatttgttcacttgcgatttccgacatgttgggaagcctatacaagatcctagaaaacattcttatcatactccgtaatatggggtatcttaagccaagaggaagttttgagaccaccgccgacgacataattgattctcttttcgtcctgagtctgttggggtccatcttcagtctcagcgtgattgcagctgacaggtacatcacgatttttcacgctctgcgataccattcaatcgtcacgatgaggagaaccgtggtggtgctgaccgtcatttggacattttgcaccgggacaggcataaccatggtgatcttttcccatcacgtgccaactgtgatcacctttaccagcttatttcccctaatgctggtgttcatcctatgcttatacgtgcacatgtttctccttgctcgttcccacaccaggaagataagcacattgcccagggctaatatgaaaggcgctattaccttaacgatcctgctgggcgtattcatcttttgttgggcgccattcgtgttacatgtgttgctgatgaccttctgccctagcaatccttattgcgcctgctacatgagtctgttccaggtgaatggaatgttgattatgtgcaacgcggtaatagaccctttcatatacgcgttcagatcaccggaattgagagatgctttcaagaagatgattttttgcagccgctactggtag

SEQ ID NO: 110708 - DNA, 894 bp, Artificial Sequence
  derived and/or modified sequence
atgaagcacatcatcaacagctacgagaacatcaacaacaccgcccgcaacaacagcgattgtccccgcgttgtgcttcctgaggagatcttctttaccatctctatcgttggcgttttagagaatcttatcgtcctgctcgccgtgtttaaaaacaaaaatctgcaagccccaatgtatttttttatttgttctcttgctatctcagacatgctgggaagcctttacaagatcttagagaatattcttatcatccttcgaaatatggggtacctgaaaccacgggggtcctttgagacaaccgccgatgacataatcgactcactgttcgttctgtcactgctgggtagcattttctctctatcggtcattgcagctgaccgctacataactatctttcacgcattacgctatcatagcattgtcactatgagacggactgtggtggtcttgacagtcatctggaccttctgcaccgggacaggcatcaccatggtgatcttctcccaccacgtgcctacagtgatcactttcacaagcctctttcccctgatgctcgtcttcatcttgtgcctatatgtccacatgtttctgctcgccagatcacacacaaggaaaatctctactctccctagggctaatatgaagggagcgataaccctgaccatccttctgggggtgttcatcttttgctgggcaccttttgtgctgcatgtgctgctgatgactttttgcccttccaatccttactgcgcatgctatatgtcactttttcaggtgaacggcatgctgattatgtgcaacgcagtgattgaccctttcatctacgcctttaggtctcctgagctgcgcgatgcctttaagaagatgatattttgttcacggtactggtag

SEQ ID NO: 110709 - DNA, 894 bp, Artificial Sequence
  derived and/or modified sequence
atgaaacacattattaacagctacgagaatatcaataacaccgctcggaacaatagcgattgccctcgggtggtactaccagaagaaatctttttcactatcagtatcgtcggggtgctggagaaccttatcgtgcttctcgcagtctttaaaaacaagaacctgcaggcccctatgtactttttcatctgctccctggctatcagcgatatgcttggatcactatacaagatccttgagaatattctgatcattctgcgtaacatggggtacctgaaacctagaggctccttcgagacgacggcagacgacattatcgacagcctctttgttctgtccctccttggcagcatcttttctctgagcgtgattgccgctgatcggtatatcacaatctttcatgcactgagatatcacagcatagtgacgatgcggcgaaccgttgtggtgctgacagtgatttggacattttgcacaggcaccggaattacgatggtgatcttcagccatcatgtccctaccgtaattacctttacgtccctcttccctctcatgctggtgtttatcctatgcctatacgtgcacatgttcctactcgccaggagccacacgaggaagatcagcactctccccagggctaacatgaagggagcaatcacgctaacgatcctactcggagtttttatcttctgttgggctcctttcgtcttgcacgtgttactgatgacattttgcccttccaatccttactgtgcttgctacatgagcctgtttcaggtcaatggtatgctcatcatgtgcaatgccgtgattgacccttttatttatgccttcaggtcccccgaactgagagatgcatttaaaaagatgattttttgtagtagatactggtag

SEQ ID NO: 110710 - DNA, 894 bp, Artificial Sequence
  derived and/or modified sequence
atgaaacatattataaattcgtatgaaaatatcaacaatacggccaggaataacagcgactgcccgagagtggtgctcccagaggagatttttttcactataagcatcgtgggggtccttgaaaatctgattgtgttgctggcagtctttaaaaacaagaacctgcaggctcccatgtacttctttatctgctcgctcgccatttcagacatgctgggcagtctctataaaatactcgagaatatcctgattatccttcgaaacatgggctacttaaaaccccgtggatcattcgagacgaccgcagatgacatcatcgatagcctttttgtgctgagcttacttggctctatttttagtctatctgttatagccgcagacaggtacattactatttttcatgccctgagatatcacagtatcgtcactatgcggagaaccgtagtcgtgctgaccgtgatctggacgttttgtactggcactggaattaccatggtcatctttagccaccatgtgccaaccgttattacatttacaagtctctttcccctgatgctggttttcattctctgtctgtatgtgcatatgtttctgctagccaggagccatacgcggaagatcagcacactgcccagggccaacatgaagggcgcaatcacactgacaatcctcttgggagtcttcatcttttgctgggctccgttcgtgctgcatgtgctgctaatgaccttttgtcccagcaacccctactgtgcctgttacatgagcctgtttcaggtcaatggcatgctcatcatgtgtaatgcggttatagatccattcatctatgcattccgttcccctgaattgagagatgcgtttaaaaagatgattttctgttcaagatactggtag

SEQ ID NO: 110711 - DNA, 3652 bp, Artificial Sequence
  derived and/or modified sequence
attccttctcattcattttgcccagaaagttcctgcttcagagctgaaggtgattgggagattttaacttagatctccagcaagtgctacaaggaagaaaagatcctgaagaatcaatcaagttttccgtgaagtcaagtccaagtaacatccccgccttaaccacaagcaggagaaatgaagcacattatcaactcgtatgaaaacatcaacaacacagcaagaaataattccgactgtcctcgtgtggttttgccggaggagatatttttcacaatttccattgttggagttttggagaatctgatcgtcctgctggctgtgttcaagaataagaatctccaggcacccatgtactttttcatctgtagcttggccatatctgatatgctgggcagcctatataagatcttggaaaatatcctgatcatattgagaaacatgggctatctcaagccacgtggcagttttgaaaccacagccgatgacatcatcgactccctgtttgtcctctccctgcttggctccatcttcagcctgtctgtgattgctgcggaccgctacatcaccatcttccacgcactgcggtaccacagcatcgtgaccatgcgccgcactgtggtggtgcttacggtcatctggacgttctgcacggggactggcatcaccatggtgatcttctcccatcatgtgcccacagtgatcaccttcacgtcgctgttcccgctgatgctggtcttcatcctgtgcctctatgtgcacatgttcctgctggctcgatcccacaccaggaagatctccaccctccccagagccaacatgaaaggggccatcacactgaccatcctgctcggggtcttcatcttctgctgggccccctttgtgcttcatgtcctcttgatgacattctgcccaagtaacccctactgcgcctgctacatgtctctcttccaggtgaacggcatgttgatcatgtgcaatgccgtcattgaccccttcatatatgccttccggagcccagagctcagggacgcattcaaaaagatgatcttctgcagcaggtactggtagaatggctgatccctggttttagaatccatgggaataacgttgccaagtgccagaatagtgtaacattccaacaaatgccagtgctcctcactggccttccttccctaatggatgcaaggatgatcccaccagctagtgtttctaatagctaggttctatgtgaacagtcttattgtaggggcaacctcttaactttgtgactggacagataaaacgatgtagtaaaagaaggatagaatacaaagtattaggtaggtacaaaagtaattaaggtttttgccattactttcaatgaccaaaaattgcaattacttttgcaccaatctagtaaaacagcaataaaaattcaagggctttgggctaaggcaaagacttgctttcctgtggacatctaacaagccagttctgaggtggcctttccaggtggaggccattgcagccaatttccagaagttaagtacctggacatgcgactccaggcagaagatgtagggtctctgtaagccaataataaattggaaggaatgcattgctgcagctgaatttgtctgtctcccacagccatgtggaatctccaccctcctctttctccctgttagtctgatgtattgatgccacctcagtttcagaaagtaggctgagtataaactataaatgtcaaataacgagcttcgagtttccaatgataaatggaccttctctgttagtcttctttgctcactcagtatcccactggccttaaaaccctttcctgttacatttcctcatgctttatgagcatacatttcaaaggaagaaatgaaaatttaatccatttagttcccatgtgggaatacataaaggccagatgaaaattgtcactatttgaagaagctgtaaccaaactatgtgtgttacaatgtagaagtacaagaaaagagccccaacatgtattttaagaaataaagagagagagacagagacagacagagagagagagagagagagagagagagagtgtgtgtgtgtgtgtgtgtgtgtgtgtgtgtgtgtgtgtgtgtgtgtgtgtattttccccatgcttttggactatggggaaaaccaaaaccaaagcaagacatcaagcaatggtgctgttattatagccccaagtcaaagacctgagggaggcaaacaccacctcattctgcagatgaatgtgaaagcagacccagtcactgggaaatgtcatcctcccatcagccaagatgccagcaatggaagagtggcaaccccagtaggaataaaagaaacataatttgcaagttcattcatttttaatagctaaaaatcagcttaaaggagaagcacatcctgattgtaagtccccactaagttggagggtgacttgaatggggtgaaaggtgaaagggacagaggagagcagtggggcttcagaggccaccaggctcaggatctgcaggatggatggtatcttccagaacaggcaatgctttgccctcaggagaatttcccagagctgctgaggggagaagacagccacacacaggacagaccatttggtgatgggtttgatattagaagtggcagggacaggaacttcagaagcaaaggaggcaaggcagctggagtcaagtgaggacagtggcaggcgtgctttcacatggcctgtcccacagatggaggtgaaaggtgcaccttcttgtcctctgttctgtagaaatccttccctgtttgatccttcccctgccaaatgaactatgttactctaatactaacctgtattaattaatatatgagatatatataagttaatttttcatgaaatctaaagcacaaccctagaactaatttttaaaagtgttatttctaccattgaaaaagtaatgtataacatattttatgtgattaaagtgcgtattctcaataagaggtaacctttttttgatgctgcaatgctctgtgataccacagaggtaagcaatgccacttaacctgtatcataaatagtcccaaactgctcttcctataaaattctgcctttgtcaacagctttgctgtctcctaatcactctcaagctctctgctgtgcatgtgactgttgtcagaaggaaaatcaccaagaaacttcacctctcactgcctttgatttgttgcagttaatctaagaaacaaaatgaagatggctagtctaatggtggatgaaacaaaaatgaagtctgagtgctaattcagagaacttgcaattccagacattttcaattctaggtcttctgctatattccaatcagaacagaagcttcagggctcatagttactgagaaaactcacgtttttctacctctaacttcatatagaattccaaatgaaagcaccaccaaactgcacatatttgtgtgaggaagatcaacaagcttcagacttttcccatgaggacttaattcttttatcaaattacccaatttttaaactgctgtgtggatactgtgagtgttcagctttatcgatgacctagccttggaccagatagctgaaaatgttcaggatgtgtactcaagctgatagtaattctgagccctgtctaataaaaaaggaaggatgt

SEQ ID NO: 110712 - DNA, 1024 bp, Artificial Sequence
  derived and/or modified sequence
aggtgattgggagattttaacttagatctccagcaagtgctacaaggaagaaaagatcctgaagaatcaatcaagttttccgtgaagtcaagtccaagtaacatccccgccttaaccacaagcaggagaaatgaagcacattatcaactcgtatgaaaacatcaacaacacagcaagaaataattccgactgtcctcgtgtggttttgccggaggagatatttttcacaatttccattgttggagttttggagaatctgatcgtcctgctggctgtgttcaagaataagaatctccaggcacccatgtactttttcatctgtagcttggccatatctgatatgctgggcagcctatataagatcttggaaaatatcctgatcatattgagaaacatgggctatctcaagccacgtggcagttttgaaaccacagccgatgacatcatcgactccctgtttgtcctctccctgcttggctccatcttcagcctgtctgtgattgctgcggaccgctacatcaccatcttccacgcactgcggtaccacagcatcgtgaccatgcgccgcactgtggtggtgcttacggtcatctggacgttctgcacggggactggcatcaccatggtgatcttctcccatcatgtgcccacagtgatcaccttcacgtcgctgttcccgctgatgctggtcttcatcctgtgcctctatgtgcacatgttcctgctggctcgatcccacaccaggaagatctccaccctccccagagccaacatgaaaggggccatcacactgaccatcctgctcggggtcttcatcttctgctgggccccctttgtgcttcatgtcctcttgatgacattctgcccaagtaacccctactgcgcctgctacatgtctctcttccaggtgaacggcatgttgatcatgtgcaatgccgtcattgaccccttcatatatgccttccggagcccagagctcagggacgcattcaaaaagatgatcttctgcagcaggtactggtag

SEQ ID NO: 110713 - protein, 305 aa, Artificial Sequence
  derived and/or modified sequence
MDRLGPFSNDPSDKPPCRGCSSYLMEPYIKCAECGPPPFFLCLQCFTRGFEYKKHQSDHTYEIMTSDFPVLDPSWTAQEEMALLEAVMDCGFGNWQDVANQMCTKTKEECEKHYMKHFINNPLFASTLLNLKQAEEAKTADTAIPFHSTDDPPRPTFDSLLSRDMAGYMPARADFIEEFDNYAEWDLRDIDFVEDDSDILHALKMAVVDIYHSRLKERQRRKKIIRDHGLINLRKFQLMERRYPKEVQDLYETMRRFARIVGPVEHDKFIESHACRWFLSLEQYLCVYIYINRRDNGVFYVKFYK

SEQ ID NO: 110714 - DNA, 918 bp, Artificial Sequence
  derived and/or modified sequence
atggatcggctggggccgttctcaaacgatccatcagacaagccgccctgccgaggatgtagtagctacctgatggaaccctacatcaagtgtgctgagtgtgggcctcccccttttttcttatgcctccagtgctttacacgggggtttgagtataaaaagcaccagtccgaccatacctatgaaataatgaccagtgattttcctgtgctggacccctcatggactgcacaggaggaaatggccctcttagaggccgtgatggattgcggttttggcaattggcaggatgtggcaaatcaaatgtgcacaaagacaaaggaggagtgtgagaaacactacatgaagcattttatcaataaccccctattcgccagcacactacttaatctaaagcaggcggaggaggcgaaaactgcagacacggctattccgtttcactccactgatgatcccccacgacccacatttgatagcctgctcagtagggatatggctggttatatgccagctcgtgccgatttcattgaagagtttgacaattatgccgagtgggacttgagagacattgattttgttgaagatgacagcgatatccttcacgccctgaaaatggccgtcgtggacatttatcattctaggcttaaggagcgccagcggaggaagaaaataatccgagatcacggtctaatcaatcttagaaagtttcaactgatggagcgtcgctaccccaaggaagttcaagacctttacgagactatgcgacgcttcgcacggatagttggtccagtggagcacgacaagtttatcgagagccacgcttgccgctggttcctctcactggagcaatacctctgtgtgtacatctatatcaatcgtcgtgacaatggcgtattctacgttaaattttataaatag

SEQ ID NO: 110715 - DNA, 918 bp, Artificial Sequence
  derived and/or modified sequence
atggaccggctgggccccttcagcaatgaccccagcgacaagccaccctgccggggctgcagcagctacctgatggagccctacatcaagtgtgctgaatgtggccccccacccttcttcctgtgcctgcagtgcttcacccggggctttgagtacaagaagcaccagagcgaccacacctatgagatcatgaccagtgacttccctgtgctggaccccagctggacagcccaggaggagatggccctgctggaggccgtgatggactgtggcttcggcaactggcaggatgtggccaaccagatgtgcaccaagaccaaggaggagtgtgagaagcactacatgaagcacttcatcaacaaccccctgtttgccagcaccctgctgaacctgaagcaggccgaggaggccaagacagctgacacagccatccccttccacagcacagatgaccccccccggcccacctttgacagcctgctgagccgggacatggccggctacatgcctgcccgggctgacttcatcgaggagtttgacaactatgcagagtgggacctgcgggacatcgactttgtggaggatgacagcgacatcctgcacgccctgaagatggctgtggtggacatctaccacagccggctgaaggagcggcagaggaggaagaagatcatccgggaccacggcctcatcaacctgaggaagttccagctgatggagcggcgctaccccaaggaggtgcaggacctgtatgagaccatgagaagatttgcccgcatcgtgggccctgtggagcatgacaagttcatcgagagccacgcctgccgctggttcctgagcctggagcagtacctgtgtgtgtacatctacatcaacagaagagacaacggggtcttctacgtgaagttctacaagtag

SEQ ID NO: 110716 - DNA, 918 bp, Artificial Sequence
  derived and/or modified sequence
atggaccggctgggccccttcagcaacgaccccagcgacaagcccccatgccgaggatgttcctcatacctcatggaaccttacataaagtgtgctgagtgcggtccaccacccttcttcctgtgtctgcagtgcttcacgagaggcttcgaatacaaaaaacatcagtctgaccacacctatgagattatgacttcggactttcctgtgctggatccatcttggacagcgcaggaagaaatggctctgttggaagccgttatggattgcggctttggtaactggcaggacgtggctaatcagatgtgcaccaagaccaaggaggaatgcgagaagcattacatgaagcacttcataaataatcctctgttcgcctccactctcctgaatcttaagcaagccgaggaggcgaaaacagccgacacggcaataccctttcactccacggatgacccccctaggccgacatttgactcgctactgagccgggatatggcgggatacatgcctgcaagagcggactttatcgaggagttcgataattacgccgagtgggacttaagagacatagatttcgtggaagacgacagcgatatcctgcacgccctcaagatggctgtggttgacatctaccatagcagactgaaggaacggcaacgccgaaagaagattatccgcgatcatgggctgatcaatctcaggaaatttcaacttatggaacgtaggtatcccaaggaagtgcaggacctgtacgaaaccatgaggcgctttgcgagaattgttgggcccgttgagcatgataagtttattgagtcccacgcatgccgctggtttctaagtttggaacaatatctctgtgtgtacatttacatcaatcggagagacaatggggtcttctacgtgaagttttacaaatag

SEQ ID NO: 110717 - DNA, 918 bp, Artificial Sequence
  derived and/or modified sequence
atggatcggctaggtccctttagtaacgacccaagtgataaacctccttgtcggggttgctcttcttacctcatggagccgtatattaaatgtgcggaatgcggccctccaccctttttcttgtgcctccaatgtttcacccgcggattcgaatataagaagcaccagagcgaccacacctacgagataatgacctccgatttcccggtgctggatccatcatggaccgctcaagaagaaatggccttactagaggccgtgatggactgcgggttcgggaactggcaggacgtagccaatcagatgtgtaccaaaacgaaggaggaatgcgaaaagcattacatgaaacactttataaataaccccttgtttgccagcaccctgttaaacctcaaacaggccgaagaagccaaaaccgcagataccgccattccctttcactccacagatgacccccctcgcccaacttttgattcactgcttagccgagatatggcagggtacatgcctgctagagccgattttattgaggagtttgataactacgccgaatgggatctgcgggatatcgactttgtcgaagacgattccgacatcctgcacgcccttaagatggcggtcgtggacatctaccatagccgtctgaaggagagacagaggagaaagaaaattattagggaccacggcctaatcaatctaaggaagtttcagctgatggaaagacgataccccaaggaagtccaggacttatatgagaccatgcgccgattcgccagaattgtcggccctgtggagcatgacaaattcatagagagtcacgcctgcaggtggttcttatctttggagcagtacttatgcgtgtacatctacattaatagaagagataacggcgtcttctacgtgaagttctacaaatag

SEQ ID NO: 110718 - DNA, 1304 bp, Artificial Sequence
  derived and/or modified sequence
tttcccgctcagccctggagcgcgtagctctaccaagaatggccactgtgccagatgcccctgaccagcgttgcccatttgaatttcctagcaggccccccaaagtaggtatttcagtaccctgttagagctgaggcgcaggtaaaatgactggcccaggccggtcccaccccgtaaggatttgaacgttggctccacaactcgggagcctgcgcctttcctcctcccaacgtggactcctgcccggcgaagtgcctcacttccttctcccgggagtcatcaagctttggtgtatgtgttggccggttctgaagtcttgaagaagctctgctgaggaagaccaaagcagcactcgttgccaattagggaatggaccgtttgggtccctttagcaatgatccctctgataagccaccttgccgaggctgctcctcctacctcatggagccttatatcaagtgtgctgaatgtgggccacctccttttttcctctgcttgcagtgtttcactcgaggctttgagtacaagaaacatcaaagcgatcatacttatgaaataatgacttcagattttcctgtccttgatcccagctggactgctcaagaagaaatggcccttttagaagctgtgatggactgtggctttggaaattggcaggatgtagccaatcaaatgtgcaccaagaccaaggaggagtgtgagaagcactatatgaagcatttcatcaataaccctctgtttgcatctaccctgctgaacctgaaacaagcagaggaagcaaaaactgctgacacagccattccatttcactctacagatgaccctccccgacctacctttgactccttgctttctcgggacatggccgggtacatgccagctcgagcagatttcattgaggaatttgacaattatgcagaatgggacttgagagacattgattttgttgaagatgactcggacattttacatgctctgaagatggctgtggtagatatctatcattccaggttaaaggagagacaaagacgaaaaaaaattataagagaccatggattaatcaaccttagaaagtttcaattaatggaacggcggtatcccaaggaggtccaggacctgtatgaaacaatgaggcgatttgcaagaattgtggggccagtggaacatgacaaattcattgaaagccatgcatgtaggtggtttttgagccttgagcagtatttgtgtgtgtatatttatataaataggagagataatggtgtgttttatgtgaagttctataaataaataaatggatatttctc

SEQ ID NO: 110719 - DNA, 918 bp, Artificial Sequence
  derived and/or modified sequence
atggacagactgggccccttcagcaacgaccccagcgacaagcccccctgcagaggctgcagcagctacctgatggagccctacatcaagtgcgccgagtgcggccccccccccttcttcctgtgcctgcagtgcttcaccagaggcttcgagtacaagaagcaccagagcgaccacacctacgagatcatgaccagcgacttccccgtgctggaccccagctggaccgcccaggaggagatggccctgctggaggccgtgatggactgcggcttcggcaactggcaggacgtggccaaccagatgtgcaccaagaccaaggaggagtgcgagaagcactacatgaagcacttcatcaacaaccccctgttcgccagcaccctgctgaacctgaagcaggccgaggaggccaagaccgccgacaccgccatccccttccacagcaccgacgacccccccagacccaccttcgacagcctgctgagcagagacatggccggctacatgcccgccagagccgacttcatcgaggagttcgacaactacgccgagtgggacctgagagacatcgacttcgtggaggacgacagcgacatcctgcacgccctgaagatggccgtggtggacatctaccacagcagactgaaggagagacagagaagaaagaagatcatcagagaccacggcctgatcaacctgagaaagttccagctgatggagagaagataccccaaggaggtgcaggacctgtacgagaccatgagaagattcgccagaatcgtgggccccgtggagcacgacaagttcatcgagagccacgcctgcagatggttcctgagcctggagcagtacctgtgcgtgtacatctacatcaacagaagagacaacggcgtgttctacgtgaagttctacaagtag

SEQ ID NO: 110720 - DNA, 2421 bp, Artificial Sequence
  derived and/or modified sequence
actagaccagcgagccctggagggctgggcagggccttgtcccctggtgcctcccggagcccagcacggggcagggccagctgggcacttagtttggacgagctctgtccctccaggggcttcactttcgccttctgcagcgtgggggatcatgtgtgaccttggccagcccctgacctccctgagccgcagcctctgcatctgggacacccagggtttcccatgcagggagtgtcaagtgtgggtgcaaagcccaggcaccgcacccctctgcagacgtctggggctttctcttgccccttcagttccctcccttctctgagaagcgcacctgctgcctgtggacatgaacactgggcatttggtgagtcacacagtggccacccgcttctccagtgggagcttcatggcacccccactgtgctgagttgtcacgggggacctcctggcctctcgcagcccacctgagtcctgcagggaccaagcatccttgtaaagcctcacagcccacctgggcagatcgaggaagaacctagaagccagaacaagctggggctggaagactcattccaggcaccgaggtccatgtgaaaggaggctttgcggtggtttctgctttgcttgcattgagcctcaaactcttcctgtcccgtgagaaggggggatgggatttggaggcctgaggaaggaaggaggggagcttcctgcgcacaagcggcggcaggggtttgcagaagtggaggctgggggctgcctggccaagcgcttaccgccctgcgcagccaggctggctggcaggctgcagcgggaagcgcctgtgggtcctcggcgctgactgcagagctgggtggaggcagcggaaccaaaactgctgtgtcactgcacgctgcagctgttgccagggtgaccggctcagctcacctatgaaccccgtcagcagcagcgaggacatcaagccccccctgggcctcaatggcgtcctcaaggtccccgcccacccctcaggaaacatggcttccttcaccaagcacatctgcgccatctgcggggaccgctcctcaggcaagcactatggagtgtacagctgcgaggggtgcaagggcttcttcaagcggacggtgcgcaaggacctgacctacacctgccgcgacaacaaggactgcctgattgacaagcggcagcggaaccggtgccagtactgccgctaccagaagtgcctggccatgggcatgaagcgggaagccgtgcaggaggagcggcagcgtggcaaggaccggaacgagaatgaggtggagtcgaccagcagcgccaacgaggacatgccggtggagaggatcctggaggctgagctggccgtggagcccaagaccgagacctacgtggaggcaaacatggggctgaaccccagctcgccgaacgaccctgtcaccaacatttgccaagcagccgacaaacagcttttcaccctggtggagtgggccaagcggatcccacacttctcagagctgcccctggacgaccaggtcatcctgctgcgggcaggctggaatgagctgctcatcgcctccttctcccaccgctccatcgccgtgaaggacgggatcctcctggccaccgggctgcacgtccaccggaacagcgcccacagcgcaggggtgggcgccatctttgacagggtgctgacggagcttgtgtccaagatgcgggacatgcagatggacaagacggagctgggctgcctgcgcgccatcgtcctctttaaccctgactccaaggggctctcgaacccggccgaggtggaggcgctgagggagaaggtctatgcgtccttggaggcctactgcaagcacaagtacccagagcagccgggaaggttcgctaagctcttgctccgcctgccggctctgcgctccatcgggctcaaatgcctggaacatctcttcttcttcaagctcatcggggacacacccattgacaccttccttatggagatgctggaggcgccgcaccaaatgacttaggcctgcgggcccatcctttgtgcccacccgttctggccaccctgcctggacgccagctgttcttctcagcctgagccctgtccctgcccttctctgcctggcctgtttggactttggggcacagcctgtcactgctctgcctaagagatgtgttgtcaccctccttatttctgttactacttgtctgtggcccagggcagtggctttcctgaggcagcagccttcgtggcaagaactagcgtgagcccagccaggcgcctccccaccgggctctcaggacaccctgccacaccccacggggcttgggcgactacagggtcttcgggccccagccctggagctgcaggagttgggaacggggcttttgtttccgttgctgtttatcgatgctggttttcag

SEQ ID NO: 110721 - DNA, 1098 bp, Artificial Sequence
  derived and/or modified sequence
atgaatcctgtatcaagcagtgaggacatcaaacctccactcggcctgaacggagtgctgaaagtgcccgctcaccccagcgggaatatggctagcttcacaaagcacatctgtgccatttgcggcgataggtcgtctggcaaacattacggggtgtactcatgcgagggatgtaagggtttctttaagcgcacggtccggaaagacttgacatatacctgccgggataataaagactgtctgatcgataagcggcagaggaatcgttgtcagtactgtaggtaccaaaagtgtctggctatgggtatgaagcgggaagccgtccaagaggaacggcagagggggaaggaccgcaatgagaatgaggtggaatccacctcctcagcaaacgaggacatgcctgttgagagaattttagaggctgaactggctgttgagcctaagacagagacatacgtcgaagccaacatgggtcttaatccttcatcccccaatgaccccgtcacaaacatctgtcaggctgccgacaagcagctgtttactctcgtcgaatgggccaagaggatcccacactttagtgagctcccactagatgaccaggtcatccttctgagagccgggtggaatgaactgttgatcgcctctttcagccacaggtcaatagccgtcaaggacggtatcctcctggctacaggcctgcatgtacatcgaaattccgctcacagcgcaggcgtgggtgccatcttcgatcgtgtcctcacagaattagtcagcaaaatgcgcgatatgcagatggacaagaccgagttgggctgtctcagagctattgtcctatttaaccccgactcaaaaggcctctcaaaccccgccgaagtcgaagccctgagggaaaaagtgtacgcttccctggaggcatattgcaaacacaaataccccgagcagccaggacgcttcgctaagctgctcctacgtctgccggctcttagatctatagggttgaaatgtttggaacatcttttcttttttaaactgatcggcgacacgccaattgacaccttcctgatggagatgcttgaggccccccaccagatgacctag

SEQ ID NO: 110722 - DNA, 1098 bp, Artificial Sequence
  derived and/or modified sequence
atgaaccctgtgagcagcagcgaggacatcaagccacccctgggcctgaatggagtgctgaaggtgcctgcccaccccagcggcaacatggccagcttcaccaagcacatctgtgccatctgtggggacaggagcagcggcaagcactacggcgtgtacagctgtgagggctgcaagggcttcttcaagaggacagtgaggaaggacctgacctacacctgccgggacaacaaggactgcctgattgacaagaggcagaggaaccgctgccagtactgccgctaccagaagtgcctggccatgggcatgaagcgggaggccgtgcaggaggagcggcagaggggcaaggacagaaatgaaaatgaggtggagagcaccagcagcgccaatgaagacatgcctgtggagcgcatcctggaggccgagctggccgtggagcccaagacagagacctacgtggaggccaacatgggcctgaaccccagcagccccaatgaccctgtgaccaacatctgccaggccgctgacaagcagctgttcaccctggtggagtgggccaagaggatcccccacttcagcgagctgcccctggatgaccaggtgatcctgctgcgggccggctggaatgagctgctgattgccagcttcagccacaggagcattgctgtgaaggatggcatcctgctggccaccggcctgcacgtgcacagaaattctgcccacagcgctggggtgggcgccatctttgacagagtgctgacagagctggtgtccaagatgagggacatgcagatggacaagacagagctgggctgcctgcgggccatcgtgctcttcaacccagacagcaagggcctgagcaacccagctgaggtggaggccctgcgggagaaggtgtatgccagcctggaggcctactgcaagcacaagtacccagagcagcccggccgctttgccaagctgctgctgcggctgcctgccctgcggagcatcggcctgaagtgcctggagcacctgttcttcttcaagctgattggagacacccccatcgacaccttcctgatggagatgctggaggccccccaccagatgacctag

SEQ ID NO: 110723 - DNA, 1098 bp, Artificial Sequence
  derived and/or modified sequence
atgaaccccgtgagcagcagcgaggacatcaagccccccctgggcctgaatggtgtcctcaaggtgccagcacatcctagcggaaacatggccagctttactaaacatatctgcgcaatatgtggcgacaggtcgtccggaaaacattatggagtgtacagctgcgagggatgtaaagggtttttcaagcggaccgtgcggaaagacctgacatacacatgcagagacaacaaggattgcctgatcgataagcgccagcggaatagatgccagtattgtcgctaccaaaagtgtctggccatggggatgaaacgcgaggctgtccaagaggaacgacaacgaggcaaggacagaaatgagaacgaagtggaaagtacctcatctgcgaacgaggacatgcccgtggagcggattctggaggcagaattggctgtagaacctaagaccgagacctatgttgaggctaatatgggccttaatccttcatcccccaacgatcccgtaaccaatatatgtcaggccgctgataagcagttattcaccctggtggaatgggcaaaacgcatccctcatttttccgagctgcctctagatgaccaggtcatcttactccgggcaggttggaacgagctcctgattgcatctttttcacacagatccattgctgtaaaagacggcatcttgctggccactggacttcatgtgcatagaaattccgctcacagcgcgggagtaggagctatcttcgacagggtcttgacagagctggtgtccaagatgcgggatatgcagatggataagaccgagctcggctgtctccgggccattgtcttgtttaatcccgatagcaaaggactcagcaaccctgccgaggtggaggccctccgcgagaaagtgtacgcaagccttgaagcttattgcaaacacaaatatccggagcagcctggcagatttgccaaattactgcttcgactacccgcactaaggagcatcgggctcaaatgcttagagcacttgttcttctttaagcttatcggggatacaccgatcgataccttcctcatggagatgctggaagccccccatcagatgacttag

SEQ ID NO: 110724 - DNA, 1098 bp, Artificial Sequence
  derived and/or modified sequence
atgaacccggtaagtagctcagaggacataaagcctccactggggctcaacggagtactcaaggtccctgctcatccatccgggaacatggcctctttcaccaaacatatttgcgccatctgtggtgaccggtcgtcaggcaaacactatggcgtttactcctgcgaaggctgtaagggatttttcaagaggactgttagaaaggatcttacgtacacttgtcgtgacaacaaggactgcctgattgacaaacgtcaacgaaataggtgccagtactgcagatatcagaagtgcctagcaatgggcatgaagcgcgaggccgtgcaggaagaacggcagcgtggaaaagaccgcaatgagaacgaggttgagtccactagctcggcaaatgaagatatgccagttgagaggatcctggaagccgagcttgccgttgagcctaagacagagacctatgtggaagccaatatgggcttaaatccttcttcacctaacgatcccgtgacgaacatatgccaggcggctgacaagcaactgttcacattggtcgaatgggccaagagaattccacattttagcgaactccctctggacgatcaggtgatacttctgagggcaggttggaatgaattgctgatagcatccttcagccacaggagtatagcagtgaaggatggcatactgttggccacaggtctgcatgtgcaccgcaacagcgcgcattccgcaggcgtgggggcaattttcgacagggtgctgactgagttggtgtccaagatgagagacatgcaaatggataaaaccgaactcggctgcttacgagctatcgttctctttaatcctgacagcaaaggactctctaaccccgctgaagtggaggcgttacgtgaaaaggtatacgcatccttggaagcctactgcaagcacaagtaccctgaacaacctggaagattcgctaaactacttctgcgtctccctgccctaaggagtatcgggctcaagtgtctcgagcatctgttcttttttaagctgatcggagacactcccatcgatacattcctaatggagatgctcgaggcccctcatcaaatgacttag

SEQ ID NO: 110725 - DNA, 1098 bp, Artificial Sequence
  derived and/or modified sequence
atgaaccccgtgagcagcagcgaggacatcaagccccccctgggcctgaacggcgtgctgaaggtgcccgcccaccccagcggcaacatggccagcttcaccaagcacatctgcgccatctgcggcgacagaagcagcggcaagcactacggcgtgtacagctgcgagggctgcaagggcttcttcaagagaaccgtgagaaaggacctgacctacacctgcagagacaacaaggactgcctgatcgacaagagacagagaaacagatgccagtactgcagataccagaagtgcctggccatgggcatgaagagagaggccgtgcaggaggagagacagagaggcaaggacagaaacgagaacgaggtggagagcaccagcagcgccaacgaggacatgcccgtggagagaatcctggaggccgagctggccgtggagcccaagaccgagacctacgtggaggccaacatgggcctgaaccccagcagccccaacgaccccgtgaccaacatctgccaggccgccgacaagcagctgttcaccctggtggagtgggccaagagaatcccccacttcagcgagctgcccctggacgaccaggtgatcctgctgagagccggctggaacgagctgctgatcgccagcttcagccacagaagcatcgccgtgaaggacggcatcctgctggccaccggcctgcacgtgcacagaaacagcgcccacagcgccggcgtgggcgccatcttcgacagagtgctgaccgagctggtgagcaagatgagagacatgcagatggacaagaccgagctgggctgcctgagagccatcgtgctgttcaaccccgacagcaagggcctgagcaaccccgccgaggtggaggccctgagagagaaggtgtacgccagcctggaggcctactgcaagcacaagtaccccgagcagcccggcagattcgccaagctgctgctgagactgcccgccctgagaagcatcggcctgaagtgcctggagcacctgttcttcttcaagctgatcggcgacacccccatcgacaccttcctgatggagatgctggaggccccccaccagatgacctag

SEQ ID NO: 110726 - protein, 599 aa, Artificial Sequence
  derived and/or modified sequence
MGEMWRKREEVIFREYSFSFYPLNIFAPFVLFPDYFCLLGFIWLSMNVLLFWKTFLLYNQGPEYHYLHQMLGLGLCLSRASASVLNLNCSLILLPMCRTLLAYLRGSQKVPSRRTRRLLDKSRTFHITCGVTICIFSGVHVAAHLVNALNFSVNYSEDFVELNAARYRDEDPRKLLFTTVPGLTGVCMVVVLFLMITASTYAIRVSNYDIFWYTHNLFFVFYMLLTLHVSGGLLKYQTNLDTHPPGCISLNRTSSQNISLPEYFSEHFHEPFPEGFSKPAEFTQHKFVKICMEEPRFQANFPQTWLWISGPLCLYCAERLYRYIRSNKPVTIISVMSHPSDVMEIRMVKENFKARPGQYITLHCPSVSALENHPFTLTMCPTETKATFGVHLKIVGDWTERFRDLLLPPSSQDSEILPFIQSRNYPKLYIDGPFGSPFEESLNYEVSLCVAGGIGVTPFASILNTLLDDWKPYKLRRLYFIWVCRDIQSFRWFADLLCMLHNKFWQENRPDYVNIQLYLSQTDGIQKIIGEKYHALNSRLFIGRPRWKLLFDEIAKYNRGKTVGVFCCGPNSLSKTLHKLSNQNNSYGTRFEYNKESFS

SEQ ID NO: 110727 - DNA, 1800 bp, Artificial Sequence
  derived and/or modified sequence
atgggagagatgtggaggaagagagaagaggtcatctttcgtgaatatagtttctctttctacccactcaatatctttgcgccctttgtgctattcccagactacttctgcctgctcggcttcatatggctgtctatgaatgtgcttttattttggaaaactttcttactatataaccagggcccagaatatcactatcttcaccagatgctgggtctgggcctttgcctaagcagggccagtgcctctgtactgaatctgaattgcagcctgattctactgccaatgtgtagaacactgttagcatatcttagaggctcacagaaggtaccctctcgccggacacggagattgctggacaagagtcgaacatttcatatcacttgtggcgtgactatttgcatattttcaggcgtgcatgtcgccgcacatttggtaaacgccttaaatttctccgtgaactattccgaagactttgtcgagcttaatgcagcccgataccgagatgaggatccccgtaaattgctttttacaacagtgccaggtttgacaggtgtttgtatggtggtcgtgctcttcctcatgatcaccgcctctacatatgccattagggtctccaactacgatattttctggtatactcacaacctcttttttgtgttctatatgctgctcactttgcatgtgtcggggggactgctgaagtaccaaacaaatttagacacacacccgccagggtgtatatctctgaacaggacttctagtcagaatatctcgctgccggaatatttttcagaacatttccacgaacctttcccagaggggttcagtaaacccgccgagttcacccagcataaatttgttaagatttgtatggaagagcctcgattccaagcaaactttccgcaaacctggctgtggatttccggtcccttgtgcctatattgcgcagaacggctttaccgctacatccgatctaacaagcctgttactatcatctccgtgatgagtcatccctctgacgtcatggagattaggatggtcaaagagaatttcaaagcacgcccgggccagtacatcaccctgcattgcccgtctgtgagcgcactggagaatcatccattcaccctaaccatgtgtcccaccgaaacaaaagctaccttcggcgtacacctcaagatcgttggtgactggacagagcggttccgcgacctgctgctgcctcccagctcacaggattccgaaattttgccctttatacagtcgagaaattaccccaaactgtatatcgatggcccgtttggtagcccattcgaagagagtctaaattacgaggtgagtttgtgcgtggccgggggtataggagtgactcccttcgcctcgattttaaacactttacttgacgattggaaaccgtacaaattgagacgcctgtactttatatgggtctgtagagacatccagtctttcaggtggtttgcagatctactgtgcatgttgcataacaagttttggcaggaaaataggccggactatgttaatatacagctgtacctttcccaaaccgacggaatccaaaagatcattggggaaaagtaccacgcactgaatagccggctgttcatagggcggccacggtggaagctactcttcgacgagattgctaaatacaaccgcggaaagaccgtcggggtgttctgttgtggcccgaattccctgagcaagaccctgcataaactgagtaaccagaacaactcctatgggacccgattcgaatataacaaggaatctttcagttag

SEQ ID NO: 110728 - DNA, 1800 bp, Artificial Sequence
  derived and/or modified sequence
atgggagagatgtggaggaagcgggaggaggtgatcttccgggagtacagcttctccttctaccccctgaacatctttgccccctttgtgctcttcccagactacttctgcctgctgggcttcatctggctgtccatgaatgtgctgctcttctggaagaccttcctgctgtacaaccagggccctgagtaccactacctgcaccagatgctgggcctgggcctgtgcctgagccgggccagcgcctctgtgctgaacctgaactgcagcctcatcctgctgcccatgtgcaggaccctgctggcctacctgcggggcagccagaaggtgcccagcaggaggacccggcggctgctggacaagagcaggaccttccacatcacctgtggggtgaccatctgcatcttctctggagtgcacgtggccgcccacctggtgaatgccctgaacttctctgtgaactacagtgaagattttgtggagctgaatgctgcccgctacagagatgaggaccccaggaagctgctcttcaccaccgtgcccggcctgactggagtgtgcatggtggtggtgctcttcctgatgatcacagccagcacctacgccatccgggtgagcaactatgacatcttctggtacacccacaacctcttctttgtgttctacatgctgctgaccctgcacgtgtctgggggcctgctgaagtaccagaccaacctggacacccaccccccaggctgcatcagcctgaacagaaccagcagccagaacatcagcctgcctgagtacttcagcgagcacttccacgagcccttccctgagggcttcagcaagccagctgagttcacccagcacaagtttgtgaagatctgcatggaggagccccgcttccaggccaacttcccccagacctggctgtggatcagcggccccctgtgcctgtactgtgccgagcggctgtaccgctacatccgcagcaacaagcctgtgaccatcatctctgtgatgagccaccccagtgatgtgatggagatccgcatggtgaaggagaacttcaaggcccggcccggccagtacatcaccctgcactgccccagcgtgtctgccctggagaaccaccccttcaccctgaccatgtgccccacagagaccaaggccaccttcggcgtgcacctgaagatcgtgggggactggacagagcgcttccgggacctgctgctgccccccagcagccaggacagcgagatcctgcccttcatccagagcaggaactaccccaagctgtacattgatggccccttcggcagcccctttgaggagagcctgaactatgaggtgtccctgtgtgtggccggcggcatcggcgtgaccccatttgccagcatcctgaacaccctgctggatgactggaagccctacaagctgcggcggctgtacttcatctgggtgtgccgggacatccagagcttccgctggtttgctgacctgctgtgcatgctgcacaacaagttctggcaggagaacagaccagactatgtgaacatccagctgtacctgagccagacagatggcatccagaagatcattggagagaagtaccacgccctgaacagccgcctcttcatcggccggccccgctggaagctgctgtttgatgagatcgccaagtacaacagaggcaagacagtgggcgtcttctgctgcggccccaacagcctgagcaagaccctgcacaagctgagcaaccagaacaacagctatggcaccaggtttgagtacaacaaggagagcttctcctag

SEQ ID NO: 110729 - DNA, 3347 bp, Artificial Sequence
  derived and/or modified sequence
attctctgagcgtgcacgggtgggaagctggaagtggaagttttgtcttaattcgaacattctcaacttacaaaactttatgctggagataacaatgaacactccccctcccaccccctcgcctgtcccccaaatgcatgagaatttttctgcacattgatgggagagatgtggaggaagagggaagaggtcattttccgtgaatacagcttttctttttaccctttaaacatttttgctccctttgttcttttcccagattacttctgtttgcttgggttcatctggctctccatgaatgtcctgcttttctggaaaaccttcttgctgtataaccaagggccagagtatcactacctccaccagatgttggggctaggattgtgtctaagcagagcctcagcatctgttcttaacctcaactgcagccttatccttttacccatgtgccgaacactcttggcttacctccgaggatcacagaaggttccaagcaggagaaccaggagattgttggataaaagcagaacattccatattacctgtggtgttactatctgtattttctcaggcgtgcatgtggctgcccatctggtgaatgccctcaacttctcagtgaattacagtgaagactttgttgaactgaatgcagcaagataccgagatgaggatcctagaaaacttctcttcacaactgttcctggcctgacaggggtctgcatggtggtggtgctattcctcatgatcacagcctctacatatgcaataagagtttctaactatgatatcttctggtatactcataacctcttctttgtcttctacatgctgctgacgttgcatgtttcaggagggctgctgaagtatcaaactaatttagatacccaccctcccggctgcatcagtcttaaccgaaccagctctcagaatatttccttaccagagtatttctcagaacattttcatgaacctttccctgaaggattttcaaaaccggcagagtttacccagcacaaatttgtgaagatttgtatggaagagcccagattccaagctaattttccacagacttggctttggatttctggacctttgtgcctgtactgtgccgaaagactttacaggtatatccggagcaataagccagtcaccatcatttcggtcatgagtcatccctcagatgtcatggaaatccgaatggtcaaagaaaattttaaagcaagacctggtcagtatattactctacattgtcccagtgtatctgcattagaaaatcatccatttaccctcacaatgtgtccaactgaaaccaaagcaacatttggggttcatcttaaaatagtaggagactggacagaacgatttcgagatttactactgcctccatctagtcaagactccgaaattctgcccttcattcaatctagaaattatcccaagctgtatattgatggtccttttggaagtccatttgaggaatcactgaactatgaggtcagcctctgcgtggctggaggcattggagtaactccatttgcatcaatactcaacaccctgttggatgactggaaaccatacaagcttagaagactatactttatttgggtatgcagagatatccagtccttccgttggtttgcagatttactctgtatgttgcataacaagttttggcaagagaacagacctgactatgtcaacatccagctgtacctcagtcaaacagatgggatacagaagataattggagaaaaatatcatgcactgaattcaagactgtttataggacgtcctcggtggaaacttttgtttgatgaaatagcaaaatataacagaggaaaaacagttggtgttttctgttgtggacccaattcactatccaagactcttcataaactgagtaaccagaacaactcatatgggacaagatttgaatacaataaagagtctttcagctgaaaacttttgccatgaagcaggactctaaagaaggaatgagtgcaatttctaagactttgaaactcagcggaatcaatcagctgtgttatgccaaagaatagtaaggttttcttatttatgattatttaaaatggaaatgtgagaatgtggcaagatgaccgtcacattacatgtttaatctggaaaccaaagagaccctgaagaatatttgatgtgatgattcacttttcagttctcaaattaaaagaaaactgttagatgcacactgttgattttcatggtggattcaagaactccctagtgaggagctgaacttgctcaatctaaggctgattgtcgtgttcctctttaaattgtttttggttgaacaaatgcaagattgaacaaaattaaaaattcattgaagctgaaattccattttctgtgttgtgtataaacagagtagctttaatttgcaagcactccaggcaaatatattagatgtttgaaaacacagcacaagactctgtattgatacgggtactttgtgtcaatatctaatcgtctccactacttatgctaatacctctatttgatatctgaagactatatgctaactgaaccttcctcaaatgttgttatagtatctatttttatatatttttttctttttattcctctctctagggaaatatgccttcccttagcatgcattagacataatgatttaataggtccctttcatcttcatttaaatctatcactattgcatggtaatgaaaatattcctactataaattataaagggatatatatatatggatatatatatgtatatacacatatatatatacacacacacacacatatatatatatatatatatatatacacatatactaataacttttcccttttttcagcatttttgtctctattattattattgtttttttcccaggtagggtttgtcttaggctgtagcctctaaggatagttagttaatttgcactttgagaccaaaggacatcatgtgtgtcagtagggactgaatataagatttatctcctttgccacacattggtttatgatggagacattgaaagtctagtcatattcctgaacagtaaaacctgtattttaccttttaagtaagaggaaatatgatattcttattcaaacttaagtttagaatccagaatattactgtcgcactttttggtatcctgagtttccatagggaactattgggtttaaagtcaccgttggaactacactgtgtgatcttataaacttatgttccctggctatcatattcttggctcagaacaatatttcccattactatcttaagaattaaggcattcatggctcacgcctgtaatcccggcactttgggaggccaaggc

SEQ ID NO: 110730 - DNA, 1825 bp, Artificial Sequence
  derived and/or modified sequence
acattgatgggagagatgtggaggaagagggaagaggtcattttccgtgaatacagcttttctttttaccctttaaacatttttgctccctttgttcttttcccagattacttctgtttgcttgggttcatctggctctccatgaatgtcctgcttttctggaaaaccttcttgctgtataaccaagggccagagtatcactacctccaccagatgttggggctaggattgtgtctaagcagagcctcagcatctgttcttaacctcaactgcagccttatccttttacccatgtgccgaacactcttggcttacctccgaggatcacagaaggttccaagcaggagaaccaggagattgttggataaaagcagaacattccatattacctgtggtgttactatctgtattttctcaggcgtgcatgtggctgcccatctggtgaatgccctcaacttctcagtgaattacagtgaagactttgttgaactgaatgcagcaagataccgagatgaggatcctagaaaacttctcttcacaactgttcctggcctgacaggggtctgcatggtggtggtgctattcctcatgatcacagcctctacatatgcaataagagtttctaactatgatatcttctggtatactcataacctcttctttgtcttctacatgctgctgacgttgcatgtttcaggagggctgctgaagtatcaaactaatttagatacccaccctcccggctgcatcagtcttaaccgaaccagctctcagaatatttccttaccagagtatttctcagaacattttcatgaacctttccctgaaggattttcaaaaccggcagagtttacccagcacaaatttgtgaagatttgtatggaagagcccagattccaagctaattttccacagacttggctttggatttctggacctttgtgcctgtactgtgccgaaagactttacaggtatatccggagcaataagccagtcaccatcatttcggtcatgagtcatccctcagatgtcatggaaatccgaatggtcaaagaaaattttaaagcaagacctggtcagtatattactctacattgtcccagtgtatctgcattagaaaatcatccatttaccctcacaatgtgtccaactgaaaccaaagcaacatttggggttcatcttaaaatagtaggagactggacagaacgatttcgagatttactactgcctccatctagtcaagactccgaaattctgcccttcattcaatctagaaattatcccaagctgtatattgatggtccttttggaagtccatttgaggaatcactgaactatgaggtcagcctctgcgtggctggaggcattggagtaactccatttgcatcaatactcaacaccctgttggatgactggaaaccatacaagcttagaagactatactttatttgggtatgcagagatatccagtccttccgttggtttgcagatttactctgtatgttgcataacaagttttggcaagagaacagacctgactatgtcaacatccagctgtacctcagtcaaacagatgggatacagaagataattggagaaaaatatcatgcactgaattcaagactgtttataggacgtcctcggtggaaacttttgtttgatgaaatagcaaaatataacagaggaaaaacagttggtgttttctgttgtggacccaattcactatccaagactcttcataaactgagtaaccagaacaactcatatgggacaagatttgaatacaataaagagtctttcagctgaaaacttttgccatgaagca

SEQ ID NO: 110731 - DNA, 4184 bp, Artificial Sequence
  derived and/or modified sequence
tgcagtgtcgaataggtacctgggtcaactccacacacttctcactcttcactggacctctggtacaagattgagaggattcctattacttacaaacagactagttcatctggctctccatgaatgtcctgcttttctggaaaaccttcttgctgtataaccaagggccagagtatcactacctccaccagatgttggggctaggattgtgtctaagcagagcctcagcatctgttcttaacctcaactgcagccttatccttttacccatgtgccgaacactcttggcttacctccgaggatcacagaaggttccaagcaggagaaccaggagattgttggataaaagcagaacattccatattacctgtggtgttactatctgtattttctcaggcgtgcatgtggctgcccatctggtgaatgccctcaacttctcagtgaattacagtgaagactttgttgaactgaatgcagcaagataccgagatgaggatcctagaaaacttctcttcacaactgttcctggcctgacaggggtctgcatggtggtggtgctattcctcatgatcacagcctctacatatgcaataagagtttctaactatgatatcttctggtatactcataacctcttctttgtcttctacatgctgctgacgttgcatgtttcaggagggctgctgaagtatcaaactaatttagatacccaccctcccggctgcatcagtcttaaccgaaccagctctcagaatatttccttaccagagtatttctcagaacattttcatgaacctttccctgaaggattttcaaaaccggcagagtttacccagcacaaatttgtgaagatttgtatggaagagcccagattccaagctaattttccacagacttggctttggatttctggacctttgtgcctgtactgtgccgaaagactttacaggtatatccggagcaataagccagtcaccatcatttcggtcatgagtcatccctcagatgtcatggaaatccgaatggtcaaagaaaattttaaagcaagacctggtcagtatattactctacattgtcccagtgtatctgcattagaaaatcatccatttaccctcacaatgtgtccaactgaaaccaaagcaacatttggggttcatcttaaaatagtaggagactggacagaacgatttcgagatttactactgcctccatctagtcaagactccgaaattctgcccttcattcaatctagaaattatcccaagctgtatattgatggtccttttggaagtccatttgaggaatcactgaactatgaggtcagcctctgcgtggctggaggcattggagtaactccatttgcatcaatactcaacaccctgttggatgactggaaaccatacaagcttagaagactatactttatttgggtatgcagagatatccagtccttccgttggtttgcagatttactctgtatgttgcataacaagttttggcaagagaacagacctgactatgtcaacatccagctgtacctcagtcaaacagatgggatacagaagataattggagaaaaatatcatgcactgaattcaagactgtttataggacgtcctcggtggaaacttttgtttgatgaaatagcaaaatataacagaggaaaaacagttggtgttttctgttgtggacccaattcactatccaagactcttcataaactgagtaaccagaacaactcatatgggacaagatttgaatacaataaagagtctttcagctgaaaacttttgccatgaagcaggactctaaagaaggaatgagtgcaatttctaagactttgaaactcagcggaatcaatcagctgtgttatgccaaagaatagtaaggttttcttatttatgattatttaaaatggaaatgtgagaatgtggcaagatgaccgtcacattacatgtttaatctggaaaccaaagagaccctgaagaatatttgatgtgatgattcacttttcagttctcaaattaaaagaaaactgttagatgcacactgttgattttcatggtggattcaagaactccctagtgaggagctgaacttgctcaatctaaggctgattgtcgtgttcctctttaaattgtttttggttgaacaaatgcaagattgaacaaaattaaaaattcattgaagctgaaattccattttctgtgttgtgtataaacagagtagctttaatttgcaagcactccaggcaaatatattagatgtttgaaaacacagcacaagactctgtattgatacgggtactttgtgtcaatatctaatcgtctccactacttatgctaatacctctatttgatatctgaagactatatgctaactgaaccttcctcaaatgttgttatagtatctatttttatatatttttttctttttattcctctctctagggaaatatgccttcccttagcatgcattagacataatgatttaataggtccctttcatcttcatttaaatctatcactattgcatggtaatgaaaatattcctactataaattataaagggatatatatatatggatatatatatgtatatacacatatatatatacacacacacacacatatatatatatatatatatatatacacatatactaataacttttcccttttttcagcatttttgtctctattattattattgtttttttcccaggtagggtttgtcttaggctgtagcctctaaggatagttagttaatttgcactttgagaccaaaggacatcatgtgtgtcagtagggactgaatataagatttatctcctttgccacacattggtttatgatggagacattgaaagtctagtcatattcctgaacagtaaaacctgtattttaccttttaagtaagaggaaatatgatattcttattcaaacttaagtttagaatccagaatattactgtcgcactttttggtatcctgagtttccatagggaactattgggtttaaagtcaccgttggaactacactgtgtgatcttataaacttatgttccctggctatcatattcttggctcagaacaatatttcccattactatcttaagaattaaggcattcatggctcacgcctgtaatcccggcactttgggaggccaaggcaggtggatcacgaggtcagagttcaagaccagcctgaccaagttggtgaaaccccatcgctactaaaaatacaaatattaggcgggtgtggtggcgggtgcctataatcccaactactcgggagactgaggcaaagaatcgcttgaacccggtgggcggaggttgcagtgagccaagattgcaccactgcactccagcctgggtgacagagcaagattccatctcaaaaaaaaaaaaaaaaaaaaaaaaaaagaattaaagcattcatacagtttagtgattttgtttagtagtcggctatcaattgctatcaaatataacactgctgaaatcagcagtgtgacttaccttgccattgttaaaatgttacataaaacataacatgatagatgctaaggcctttttttgctataattcaccaatagcaatcaagcatgctaacccatactgaatgatatttacttgtagatatttcttcctttccttgaaattctcctttctatggaaagaagatgaacccaaaaaagtgataggaaatgtggaatgctcatgcagatttagctctgaaggcatatttaataactagtatgtcttgacaacagtctttagattaaaaagaattttcatggaaacatttaacagaaagaactagtaaaaagacactttgagttagtccaggcttaatgtgcaatactgactctatactgatcataatttatttatgcgatcatattaatagacctaatttcattaaaacaggtagaagatttttcaaaagaaagatgatgtttcaaagctggtctgccattctagatgagcctccttgcttatttaagttccagtaggtgttcaaatgttaaatgttaaacataggtcatctttgcttctgcagggcttcatcttgcatgtttaagagaactttgttttattttgagggattatttctctggggatcattcttataatacaagccttaaatcactaattttagtagcaataaatgttaaaattg

SEQ ID NO: 110732 - DNA, 2379 bp, Artificial Sequence
  derived and/or modified sequence
tacttctagtctagttggagaaacaacctagaaaatgcaccaacaaatggggcacaataactactctgagagagagtggcacacagtggacgcaaagaagaggttcctgatgcagctgggaagagtctacatgggcctctagcaggagaagatactggtcttgagtttggagactaagtaagcatctccagtgtcgaataggtacctgggtcaactccacacacttctcactcttcactggacctctggtacaagattgagaggattcctattacttacaaacagactagttcatctggctctccatgaatgtcctgcttttctggaaaaccttcttgctgtataaccaagggccagagtatcactacctccaccagatgttggggctaggattgtgtctaagcagagcctcagcatctgttcttaacctcaactgcagccttatccttttacccatgtgccgaacactcttggcttacctccgaggatcacagaaggttccaagcaggagaaccaggagattgttggataaaagcagaacattccatattacctgtggtgttactatctgtattttctcaggcgtgcatgtggctgcccatctggtgaatgccctcaacttctcagtgaattacagtgaagactttgttgaactgaatgcagcaagataccgagatgaggatcctagaaaacttctcttcacaactgttcctggcctgacaggggtctgcatggtggtggtgctattcctcatgatcacagcctctacatatgcaataagagtttctaactatgatatcttctggtatactcataacctcttctttgtcttctacatgctgctgacgttgcatgtttcaggagggctgctgaagtatcaaactaatttagatacccaccctcccggctgcatcagtcttaaccgaaccagctctcagaatatttccttaccagagtatttctcagaacattttcatgaacctttccctgaaggattttcaaaaccggcagagtttacccagcacaaatttgtgaagatttgtatggaagagcccagattccaagctaattttccacagacttggctttggatttctggacctttgtgcctgtactgtgccgaaagactttacaggtatatccggagcaataagccagtcaccatcatttcggtcatgagtcatccctcagatgtcatggaaatccgaatggtcaaagaaaattttaaagcaagacctggtcagtatattactctacattgtcccagtgtatctgcattagaaaatcatccatttaccctcacaatgtgtccaactgaaaccaaagcaacatttggggttcatcttaaaatagtaggagactggacagaacgatttcgagatttactactgcctccatctagtcaagactccgaaattctgcccttcattcaatctagaaattatcccaagctgtatattgatggtccttttggaagtccatttgaggaatcactgaactatgaggtcagcctctgcgtggctggaggcattggagtaactccatttgcatcaatactcaacaccctgttggatgactggaaaccatacaagcttagaagactatactttatttgggtatgcagagatatccagtccttccgttggtttgcagatttactctgtatgttgcataacaagttttggcaagagaacagacctgactatgtcaacatccagctgtacctcagtcaaacagatgggatacagaagataattggagaaaaatatcatgcactgaattcaagactgtttataggacgtcctcggtggaaacttttgtttgatgaaatagcaaaatataacagaggaaaaacagttggtgttttctgttgtggacccaattcactatccaagactcttcataaactgagtaaccagaacaactcatatgggacaagatttgaatacaataaagagtctttcagctgaaaacttttgccatgaagcaggactctaaagaaggaatgagtgcaatttctaagactttgaaactcagcggaatcaatcagctgtgttatgccaaagaatagtaaggttttcttatttatgattatttaaaatggaaatgtgagaatgtggcaagatgaccgtcacattacatgtttaatctggaaaccaaagagaccctgaagaatatttgatgtgatgattcacttttcagttctcaaattaaaagaaaactgttagatgcacactgttgattttcatggtggattcaagaactccctagtgaggagctgaacttgctcaatctaaggctgattgtcgtgttcctctttaaattgtttttggttgaacaaatgcaagattgaacaaaattaaaaattcattgaagctg

SEQ ID NO: 110733 - DNA, 2610 bp, Artificial Sequence
  derived and/or modified sequence
acacttcactcaaatggctggctgcagctggtgctagttatggtctgggatctcagatgaggctgctaagccgaatgtgttgttactcctttacatcgtctctccacatggcttgaacttctcacagcatgcctgctggattcgaagagatggcattcaagtgcttaaaaatcaagaagaccctcaccaggtgccagcgtctagacattggattttccagcctccagaacttacttctagtctagttggagaaacaacctagaaaatgcaccaacaaatggggcacaataactactctgagagagagtggcacacagtggacgcaaagaagaggttcctgatgcagctgggaagagtctacatgggcctctagcaggagaagatactggtcttgagtttggagactaagtaagcatctccagtgtcgaataggtacctgggtcaactccacacacttctcactcttcactggacctctggtacaagattgagaggattcctattacttacaaacagactagttcatctggctctccatgaatgtcctgcttttctggaaaaccttcttgctgtataaccaagggccagagtatcactacctccaccagatgttggggctaggattgtgtctaagcagagcctcagcatctgttcttaacctcaactgcagccttatccttttacccatgtgccgaacactcttggcttacctccgaggatcacagaaggttccaagcaggagaaccaggagattgttggataaaagcagaacattccatattacctgtggtgttactatctgtattttctcaggcgtgcatgtggctgcccatctggtgaatgccctcaacttctcagtgaattacagtgaagactttgttgaactgaatgcagcaagataccgagatgaggatcctagaaaacttctcttcacaactgttcctggcctgacaggggtctgcatggtggtggtgctattcctcatgatcacagcctctacatatgcaataagagtttctaactatgatatcttctggtatactcataacctcttctttgtcttctacatgctgctgacgttgcatgtttcaggagggctgctgaagtatcaaactaatttagatacccaccctcccggctgcatcagtcttaaccgaaccagctctcagaatatttccttaccagagtatttctcagaacattttcatgaacctttccctgaaggattttcaaaaccggcagagtttacccagcacaaatttgtgaagatttgtatggaagagcccagattccaagctaattttccacagacttggctttggatttctggacctttgtgcctgtactgtgccgaaagactttacaggtatatccggagcaataagccagtcaccatcatttcggtcatgagtcatccctcagatgtcatggaaatccgaatggtcaaagaaaattttaaagcaagacctggtcagtatattactctacattgtcccagtgtatctgcattagaaaatcatccatttaccctcacaatgtgtccaactgaaaccaaagcaacatttggggttcatcttaaaatagtaggagactggacagaacgatttcgagatttactactgcctccatctagtcaagactccgaaattctgcccttcattcaatctagaaattatcccaagctgtatattgatggtccttttggaagtccatttgaggaatcactgaactatgaggtcagcctctgcgtggctggaggcattggagtaactccatttgcatcaatactcaacaccctgttggatgactggaaaccatacaagcttagaagactatactttatttgggtatgcagagatatccagtccttccgttggtttgcagatttactctgtatgttgcataacaagttttggcaagagaacagacctgactatgtcaacatccagctgtacctcagtcaaacagatgggatacagaagataattggagaaaaatatcatgcactgaattcaagactgtttataggacgtcctcggtggaaacttttgtttgatgaaatagcaaaatataacagaggaaaaacagttggtgttttctgttgtggacccaattcactatccaagactcttcataaactgagtaaccagaacaactcatatgggacaagatttgaatacaataaagagtctttcagctgaaaacttttgccatgaagcaggactctaaagaaggaatgagtgcaatttctaagactttgaaactcagcggaatcaatcagctgtgttatgccaaagaatagtaaggttttcttatttatgattatttaaaatggaaatgtgagaatgtggcaagatgaccgtcacattacatgtttaatctggaaaccaaagagaccctgaagaatatttgatgtgatgattcacttttcagttctcaaattaaaagaaaactgttagatgcacactgttgattttcatggtggattcaagaactccctagtgaggagctgaacttgctcaatctaaggctgattgtcgtgttcctctttaaattgtttttggttgaacaaatgcaagattgaacaaaattaaaaattcattgaagctg

SEQ ID NO: 110734 - DNA, 1800 bp, Artificial Sequence
  derived and/or modified sequence
atgggcgagatgtggcggaagcgggaggaggtgatcttccgggagtacagcttttcgttttaccctctgaacatctttgctcccttcgtgctgttcccggattacttttgcctcttggggtttatttggctatcaatgaacgtgctcctcttctggaagacattcctactgtataaccagggtccagaataccactatcttcaccagatgctgggactgggtctgtgcctgagcagagcctccgcaagcgtgctgaacttgaattgctccctcattttgctgcccatgtgccgcacgttacttgcatatctgcgaggctctcagaaggttcctagtcgtaggaccagacgtttactcgacaagtcccggacttttcacatcacctgtggagttactatttgcattttctcaggcgttcacgtagccgctcatttggtgaatgccctgaacttttcagtgaattattctgaggatttcgtggaacttaacgccgctcgctatagggacgaggatcctcgtaaactgttattcaccacagttcctggtttgacaggagtatgtatggtagtcgtgctgttcctcatgataactgctagtacctatgccatacgtgtttccaactacgacatcttttggtatacccacaatctttttttcgtcttctacatgctcctgaccttacacgtgtcaggcggactgctcaagtatcagaccaatctggacacacaccctcctggttgtatatctctcaatcgcacaagttctcagaacatctctctgcctgaatacttcagtgagcacttccacgagccattccccgagggcttttctaaaccggcagaattcacacagcacaaatttgtcaagatttgcatggaggagccaaggttccaggccaacttcccacagacttggctgtggatttccggtcccctgtgcctttattgcgctgaacgcctgtatcgatacattcgctccaataagcccgtcactataatatctgtcatgagccacccatcagacgtcatggagataagaatggtgaaggaaaacttcaaagccagacccggacagtatataactctccactgcccatctgtcagcgctctggagaaccacccattcaccctaacaatgtgcccaaccgaaacaaaagcaaccttcggggttcacctaaaaatagtgggggactggacggagcggtttagagacctcctcctgcccccatcctcccaggactctgaaattctgcccttcattcagtccagaaattacccaaagttgtacatcgacggacctttcgggtccccattcgaggaatccctaaactatgaagtttccctgtgtgtcgcaggcggaattggagtaaccccctttgcgagtatccttaacaccctactggacgactggaaaccatacaaactccgacgactctacttcatttgggtgtgccgcgacattcagagcttccgctggttcgctgacctcctgtgcatgttacacaacaagttctggcaagaaaatcgcccagattacgtgaatatccagctgtacttgagccaaacagatggcatacaaaagataattggagagaaatatcatgcactgaattctaggctcttcataggccgccccagatggaagctcttgtttgacgagatagccaagtacaatagggggaagacggtcggcgtgttttgttgcgggccaaacagcctgtctaagaccctccacaaactctctaatcagaacaacagctatggtactcgattcgaatacaataaggagtcttttagctag

SEQ ID NO: 110735 - DNA, 1800 bp, Artificial Sequence
  derived and/or modified sequence
atgggcgagatgtggaggaagagagaagaggtcatcttccgggagtattcattttctttttacccactgaatattttcgcacctttcgttctttttcctgactacttctgcctgctgggatttatctggcttagcatgaatgtcctgttgttctggaagacatttctcctctacaatcaagggccagaatatcactatttacatcagatgctggggcttggtctgtgtctgagccgggctagcgccagcgttctgaacctcaattgctccctgatcctgttgcctatgtgtcgaaccctgctagcttatctacggggatcgcaaaaggttccatctcggaggactcgaaggttgctggataaatccagaactttccacataacttgcggtgtgaccatctgtatcttctccggggtccatgtggctgcgcacctggtgaatgccttaaacttctcagtaaactattccgaagacttcgtcgaactgaacgctgctcgttaccgggatgaggaccctcggaaactgctgtttaccaccgtcccaggcctcactggggtgtgtatggtcgtggtgttgttcttgatgatcacagcctcaacatacgccatccgggtgagcaattatgatattttttggtatacacataacctcttctttgtgttctacatgctgctgactttgcatgtgtccggaggactcctgaagtatcagactaacctggatactcacccccctggttgcattagcctgaacaggacttcctcacaaaacatttcgttgcccgaatacttctcggagcactttcatgagccttttcccgaaggattcagcaaaccggctgagtttacccaacataaatttgtcaaaatctgcatggaggagccgaggttccaggccaacttcccccaaacttggttgtggataagcggcccactgtgcctgtactgtgccgagaggctttaccggtatatccgcagcaataaaccagttaccataatttccgtgatgagccatccttccgacgtaatggagattcgtatggtgaaagagaacttcaaggctcggcctggccagtacattaccctgcactgccccagcgtgagtgcgctcgagaaccacccctttaccctgaccatgtgccctacggagaccaaggccacctttggcgtgcatctgaaaatcgtgggcgactggactgagcgtttccgcgatctattacttccacccagcagccaagattcagagatcctcccattcattcagtctaggaattacccaaagctatacattgatggcccatttggatctcccttcgaagagtcactcaactatgaggtgtctctttgcgtggctggcggtattggggtgacaccctttgcaagtattctgaacaccctgctggacgattggaaaccttacaagttgaggcgcctctactttatttgggtgtgtcgagatattcagtcctttagatggtttgctgatctcctctgcatgctgcataacaagttctggcaggagaatcgccctgactatgtgaacatccaattatacctaagccagactgatggcatccagaagattatcggggagaagtatcacgcgcttaacagtcgactgtttattggccgtccgaggtggaagctgttgtttgatgagatagcaaagtataacaggggaaagaccgtaggcgtattctgctgcgggccaaactctctcagcaagacccttcataagttaagcaaccagaacaattcctatgggacccgctttgaatataataaggagtcattcagctag

SEQ ID NO: 110736 - DNA, 1800 bp, Artificial Sequence
  derived and/or modified sequence
atgggcgagatgtggagaaagagagaggaggtgatcttcagagagtacagcttcagcttctaccccctgaacatcttcgcccccttcgtgctgttccccgactacttctgcctgctgggcttcatctggctgagcatgaacgtgctgctgttctggaagaccttcctgctgtacaaccagggccccgagtaccactacctgcaccagatgctgggcctgggcctgtgcctgagcagagccagcgccagcgtgctgaacctgaactgcagcctgatcctgctgcccatgtgcagaaccctgctggcctacctgagaggcagccagaaggtgcccagcagaagaaccagaagactgctggacaagagcagaaccttccacatcacctgcggcgtgaccatctgcatcttcagcggcgtgcacgtggccgcccacctggtgaacgccctgaacttcagcgtgaactacagcgaggacttcgtggagctgaacgccgccagatacagagacgaggaccccagaaagctgctgttcaccaccgtgcccggcctgaccggcgtgtgcatggtggtggtgctgttcctgatgatcaccgccagcacctacgccatcagagtgagcaactacgacatcttctggtacacccacaacctgttcttcgtgttctacatgctgctgaccctgcacgtgagcggcggcctgctgaagtaccagaccaacctggacacccacccccccggctgcatcagcctgaacagaaccagcagccagaacatcagcctgcccgagtacttcagcgagcacttccacgagcccttccccgagggcttcagcaagcccgccgagttcacccagcacaagttcgtgaagatctgcatggaggagcccagattccaggccaacttcccccagacctggctgtggatcagcggccccctgtgcctgtactgcgccgagagactgtacagatacatcagaagcaacaagcccgtgaccatcatcagcgtgatgagccaccccagcgacgtgatggagatcagaatggtgaaggagaacttcaaggccagacccggccagtacatcaccctgcactgccccagcgtgagcgccctggagaaccaccccttcaccctgaccatgtgccccaccgagaccaaggccaccttcggcgtgcacctgaagatcgtgggcgactggaccgagagattcagagacctgctgctgccccccagcagccaggacagcgagatcctgcccttcatccagagcagaaactaccccaagctgtacatcgacggccccttcggcagccccttcgaggagagcctgaactacgaggtgagcctgtgcgtggccggcggcatcggcgtgacccccttcgccagcatcctgaacaccctgctggacgactggaagccctacaagctgagaagactgtacttcatctgggtgtgcagagacatccagagcttcagatggttcgccgacctgctgtgcatgctgcacaacaagttctggcaggagaacagacccgactacgtgaacatccagctgtacctgagccagaccgacggcatccagaagatcatcggcgagaagtaccacgccctgaacagcagactgttcatcggcagacccagatggaagctgctgttcgacgagatcgccaagtacaacagaggcaagaccgtgggcgtgttctgctgcggccccaacagcctgagcaagaccctgcacaagctgagcaaccagaacaacagctacggcaccagattcgagtacaacaaggagagcttcagctag

SEQ ID NO: 110737 - protein, 271 aa, Artificial Sequence
  derived and/or modified sequence
MAVSWRSWLANEGVKHLCLFIWLSMNVLLFWKTFLLYNQGPEYHYLHQMLGCPTETKATFGVHLKIVGDWTERFRDLLLPPSSQDSEILPFIQSRNYPKLYIDGPFGSPFEESLNYEVSLCVAGGIGVTPFASILNTLLDDWKPYKLRRLYFIWVCRDIQSFRWFADLLCMLHNKFWQENRPDYVNIQLYLSQTDGIQKIIGEKYHALNSRLFIGRPRWKLLFDEIAKYNRGKTVGVFCCGPNSLSKTLHKLSNQNNSYGTRFEYNKESFS

SEQ ID NO: 110738 - DNA, 990 bp, Artificial Sequence
  derived and/or modified sequence
atgctccggaaagttatccagcagtatctgtcgggtggtatgtgtgggtacgatcttgatggctgtcctgtttggtatgacatcatcggcccactagacgctaaaggcttgctgtttagcgctagcaaacaggatctgctgcgtactaagatgcgtgaatgcgagttactcttgcaagagtgtgcgcatcaaactactaagctggggcgcaaggtcgaaacgattacgataatatatgactgcgagggcttgggactgaagcatctctggaaacctgccgtcgaggcgtatggtgaatttctatgtatgttcgaggaaaattacccagagactctgaagagattatttgtggtaaaggcccctaagctgttccccgtggcctataatctgatcaagccatttttgtccgaagatacaaggaagaagattatggtgctgggcgcaaactggaaagaagtactgttgaagcacatatcccctgatcaagtgccggttgaatacggcgggacaatgacagacccagacggtaaccctaaatgtaaaagcaagatcaactatggtggcgatataccccgcaaatactacgtaagggatcaggtaaagcagcagtacgagcactccgtgcagatttccagaggtagctcacaccaggtggaatatgagatcctcttccctgggtgcgttctacgctggcaatttatgagcgacggtgccgacgtgggcttcgggatcttcctgaaaacaaaaatgggtgagcgtcagcgtgcgggcgaaatgaccgaggtactgcccaaccagcggtataacagtcacctggttccagaggacggaactcttacatgtagtgaccctggtatctacgtgctgagattcgacaacacttatagtttcatccacgctaaaaaagtcaatttcacagttgaagtcctactgcccgataaagcaagtgaggagaaaatgaagcaattgggggccggcactccaaagtag

SEQ ID NO: 110739 - DNA, 990 bp, Artificial Sequence
  derived and/or modified sequence
atgctgaggaaggtgatccagcagtacctgagcggcggcatgtgtggctatgacctggatggctgccctgtgtggtatgacatcatcggccccctggatgccaagggcctgctcttcagcgccagcaagcaggacctgctgcggaccaagatgagagaatgtgagctgctgctgcaggagtgtgcccaccagaccaccaagctgggcaggaaggtggagaccatcaccatcatctatgactgtgagggcctgggcctgaagcacctgtggaagccagctgtggaggcctatggagagttcctgtgcatgtttgaggagaactacccagagaccctgaagaggctgtttgtggtgaaggcccccaagctgtttcctgtggcctacaacctgatcaagcccttcctgtctgaggacaccaggaagaagatcatggtgctgggcgccaactggaaggaggtgctgctgaagcacatcagcccagaccaggtgcctgtggagtatggaggcaccatgacagatcctgatggcaaccccaagtgcaagagcaagatcaactacggcggggacatccccaggaagtactacgtgcgggaccaggtgaagcagcagtatgagcacagcgtgcagatcagccggggcagcagccaccaggtggagtatgagatcctcttccctggctgtgtgctgcgctggcagttcatgtctgatggagcagatgtgggcttcggcatcttcctgaagaccaagatgggagagcggcagagagctggggagatgacagaggtgctgcccaaccagcgctacaacagccacctggtgcctgaagatggcaccctgacctgcagcgaccccggcatctacgtgctgcgctttgacaacacctacagcttcatccacgccaagaaggtgaacttcaccgtggaggtgctgctgcctgacaaggccagcgaggagaagatgaagcagctgggcgccggcacccccaagtag

SEQ ID NO: 110740 - DNA, 990 bp, Artificial Sequence
  derived and/or modified sequence
atgctgcggaaggtgatccagcagtacctgagcggcggcatgtgcgggtatgacctggacggatgtcctgtatggtacgacatcatcggtccgcttgatgcaaaggggctgctgttttccgcttcaaagcaagacttgttgcggaccaaaatgcgggaatgcgaacttctactccaggagtgtgcccaccagacaactaaactggggaggaaggttgagacgatcacaatcatatacgactgtgagggtcttggcctgaagcacctttggaaacctgcggttgaagcctatggggagttcctgtgcatgttcgaagagaattaccctgagaccttaaagcgcctctttgtggtgaaggcccctaagcttttcccagtggcctacaaccttataaaacctttcctgagcgaagatactcgtaagaaaatcatggttttgggcgcaaactggaaggaggtcttgctgaagcacattagtcccgaccaggtgcccgttgaatacggaggtactatgacggatcccgacgggaatcctaaatgcaagagcaagatcaactacggcggcgacatcccacggaagtactatgttagggaccaggtcaagcaacagtacgaacattcagttcagataagtaggggttcaagccaccaggtggagtatgaaattctttttcctggctgtgttctcagatggcagtttatgagtgacggcgccgatgttgggttcggaatcttcctgaagactaagatgggagagaggcagagagccggggagatgacagaagtcctgccaaatcagcggtataatagccacttggtcccagaggacggtacactgacctgctccgatccagggatctacgtcttgcgcttcgacaatacttacagctttatccacgcaaaaaaagttaatttcacagttgaggtccttctacctgacaaagccagcgaggagaaaatgaaacagcttggagcgggaactccaaaatag

SEQ ID NO: 110741 - DNA, 990 bp, Artificial Sequence
  derived and/or modified sequence
atgctgcgaaaagtgatacagcagtacttgtcaggcggaatgtgcggttacgatctggacgggtgccctgtgtggtacgatattatcggtcctctggatgcaaagggcctcctgttttctgcttcaaaacaagatctgctgcggactaagatgcgagagtgcgaactgcttctgcaggagtgcgcacaccagaccaccaagttgggacgtaaagtggagactattacaataatctacgattgcgaggggctgggcctgaaacacttgtggaagcctgctgtggaggcctacggtgagtttctgtgcatgttcgaggaaaattatcccgagactttgaaaaggctattcgtcgtcaaagcgccaaagctcttcccagtcgcctataacttgatcaagcctttcttgagcgaggacacccgcaagaagataatggtgttaggagctaattggaaggaggtgttgctgaaacatatatcgccggatcaggtccctgtggaatatggagggaccatgacagatcccgacggaaaccctaagtgcaagtcaaagatcaactacggaggggatatccctcgaaaatattacgtgagggaccaggttaaacagcaatatgaacacagcgtgcagatttcaagaggcagctcccaccaagttgagtacgagatcttatttccgggatgtgttctcagatggcagtttatgagtgatggggcagacgtgggctttggcatttttctgaagaccaaaatgggcgagcgtcagcgcgctggggagatgactgaggttttgcccaaccagcgttataatagtcatctcgttcctgaggatggtacactcacatgcagcgatcccggaatctacgttctcaggtttgataacacctacagcttcatacacgcaaagaaagtgaacttcacagtcgaggtgcttctcccggataaggcgtccgaggagaagatgaagcagctcggggcaggaacgcccaagtag

SEQ ID NO: 110742 - DNA, 990 bp, Artificial Sequence
  derived and/or modified sequence
atgctgagaaaggtgatccagcagtacctgagcggcggcatgtgcggctacgacctggacggctgccccgtgtggtacgacatcatcggccccctggacgccaagggcctgctgttcagcgccagcaagcaggacctgctgagaaccaagatgagagagtgcgagctgctgctgcaggagtgcgcccaccagaccaccaagctgggcagaaaggtggagaccatcaccatcatctacgactgcgagggcctgggcctgaagcacctgtggaagcccgccgtggaggcctacggcgagttcctgtgcatgttcgaggagaactaccccgagaccctgaagagactgttcgtggtgaaggcccccaagctgttccccgtggcctacaacctgatcaagcccttcctgagcgaggacaccagaaagaagatcatggtgctgggcgccaactggaaggaggtgctgctgaagcacatcagccccgaccaggtgcccgtggagtacggcggcaccatgaccgaccccgacggcaaccccaagtgcaagagcaagatcaactacggcggcgacatccccagaaagtactacgtgagagaccaggtgaagcagcagtacgagcacagcgtgcagatcagcagaggcagcagccaccaggtggagtacgagatcctgttccccggctgcgtgctgagatggcagttcatgagcgacggcgccgacgtgggcttcggcatcttcctgaagaccaagatgggcgagagacagagagccggcgagatgaccgaggtgctgcccaaccagagatacaacagccacctggtgcccgaggacggcaccctgacctgcagcgaccccggcatctacgtgctgagattcgacaacacctacagcttcatccacgccaagaaggtgaacttcaccgtggaggtgctgctgcccgacaaggccagcgaggagaagatgaagcagctgggcgccggcacccccaagtag

SEQ ID NO: 110743 - protein, 1214 aa, Artificial Sequence
  derived and/or modified sequence
MSPALQDLSQPEGLKKTLRDEINAILQKRIMVLDGGMGTMIQREKLNEEHFRGQEFKDHARPLKGNNDILSITQPDVIYQIHKEYLLAGADIIETNTFSSTSIAQADYGLEHLAYRMNMCSAGVARKAAEEVTLQTGIKRFVAGALGPTNKTLSVSPSVERPDYRNITFDELVEAYQEQAKGLLDGGVDILLIETIFDTANAKAALFALQNLFEEKYAPRPIFISGTIVDKSGRTLSGQTGEGFVISVSHGEPLCIGLNCALGAAEMRPFIEIIGKCTTAYVLCYPNAGLPNTFGDYDETPSMMAKHLKDFAMDGLVNIVGGCCGSTPDHIREIAEAVKNCKPRVPPATAFEGHMLLSGLEPFRIGPYTNFVNIGERCNVAGSRKFAKLIMAGNYEEALCVAKVQVEMGAQVLDVNMDDGMLDGPSAMTRFCNLIASEPDIAKVPLCIDSSNFAVIEAGLKCCQGKCIVNSISLKEGEDDFLEKARKIKKYGAAMVVMAFDEEGQATETDTKIRVCTRAYHLLVKKLGFNPNDIIFDPNILTIGTGMEEHNLYAINFIHATKVIKETLPGARISGGLSNLSFSFRGMEAIREAMHGVFLYHAIKSGMDMGIVNAGNLPVYDDIHKELLQLCEDLIWNKDPEATEKLLRYAQTQGTGGKKVIQTDEWRNGPVEERLEYALVKVIKSARVMKKAVGHLIPFMEKEREETRVLNGTVEEEDPYQGTIVLATVKGDVHDIGKNIVGVVLGCNNFRVIDLGVMTPCDKILKAALDHKADIIGLSGLITPSLDEMIFVAKEMERLAIRIPLLIGGATTSKTHTAVKIAPRYSAPVIHVLDASKSVVVCSQLLDENLKDEYFEEIMEEYEDIRQDHYESLKERRYLPLSQARKSGFQMDWLSEPHPVKPTFIGTQVFEDYDLQKLVDYIDWKPFFDVWQLRGKYPNRGFPKIFNDKTVGGEARKVYDDAHNMLNTLISQKKLRARGVVGFWPAQSIQDDIHLYAEAAVPQAAEPIATFYGLRQQAEKDSASTEPYYCLSDFIAPLHSGIRDYLGLFAVACFGVEELSKAYEDDGDDYSSIMVKALGDRLAEAFAEELHERVRRELWAYCGSEQLDVADLRRLRYKGIRPAPGYPSQPDHTEKLTMWRLADIEQSTGIRLTESLAMAPASAVSGLYFSNLKSKYFAVGKISKDQVEDYALRKNISVAEVEKWLGPILGYDTD

SEQ ID NO: 110744 - DNA, 3645 bp, Artificial Sequence
  derived and/or modified sequence
atgtctcccgcacttcaggaccttagccagccagagggactgaagaagactttacgcgatgagattaatgcaattttacagaaaaggattatggtgctagacggaggcatgggaaccatgatacagcgagagaagctgaatgaggaacatttccgggggcaggagtttaaagaccacgcccgccccctcaagggcaataatgacatcctgagtatcactcagccagatgtcatctaccagatccacaaagaataccttctggccggcgccgacattatagaaaccaacaccttttcctctacttctatagcacaagcggactacggacttgagcatctcgcatataggatgaatatgtgcagcgctggcgtcgcacgcaaagctgccgaggaagttaccctgcaaaccgggatcaagaggttcgtggccggagcactaggtccaactaataaaaccctgtcagttagcccatccgtagaaaggcctgactacaggaacatcaccttcgacgaactggtggaggcctatcaggagcaagctaagggacttctggatgggggtgtggacatcttgctgatcgagaccatctttgacacggccaacgcaaaggccgctttgttcgccctgcagaatctgttcgaagaaaagtacgctccccgtccaatctttattagcgggaccattgttgacaagagcgggaggacactgtcagggcagacaggcgagggctttgtcatttctgtgtcgcacggcgagcccctctgtattgggctgaactgtgctctgggtgccgcagaaatgcggccttttatcgagatcattggcaagtgtactaccgcatatgtactctgctaccccaatgcaggccttcccaacactttcggagattacgatgagacaccatcaatgatggcaaaacacctgaaagactttgccatggatggtttagtgaacatagtgggagggtgctgcggctcaaccccggatcacattcgcgaaatcgctgaggctgttaagaattgtaaacctagagtgccccctgcaaccgcttttgagggccacatgctgcttagcgggctcgaaccctttcgtattggaccctatactaatttcgtcaacattggtgagaggtgcaatgttgccgggtcccgcaagttcgctaagttaatcatggctggcaactatgaggaagccctgtgcgtggctaaagtgcaagtggagatgggagcacaggtcctagacgttaacatggatgacggtatgctcgatgggccttccgccatgacacgcttctgcaatctcatcgccagcgaaccagatattgccaaggtccccttatgtattgacagctccaacttcgccgtcatagaggccggacttaagtgctgtcaagggaagtgcatcgttaatagtatatcgttgaaagaaggggaggacgacttcctggagaaggcaagaaagattaagaagtacggcgccgcgatggtggtaatggcctttgacgaagaaggccaggctacagaaacggacacaaagatccgggtgtgtactagagcctaccatctgctcgtcaaaaagctgggatttaaccccaatgacattatttttgaccctaatattttgactattggcactggcatggaggaacacaacctatatgccatcaacttcatccacgccacaaaggtgattaaagagacacttccaggcgctcgcatctctggtggcctcagtaacttgtcctttagcttcagaggcatggaagccattagagaggctatgcacggcgtcttcctataccacgcaataaagagtggaatggatatggggattgtgaacgccggaaatttgcctgtatatgacgacatacataaagagcttttacagttatgtgaggacctaatttggaacaaagatcctgaagctactgaaaagctcctgagatatgcccagacacagggtacagggggcaagaaggttattcaaactgacgagtggcgcaacggcccagtggaggaaaggctcgaatacgctctggtgaaggtaataaagtcagcacgcgttatgaagaaggctgtcggtcacctgatcccgtttatggaaaaggagcgcgaggaaacaagagtgcttaatggcactgtggaggaagaagatccataccagggcaccattgtgctcgcaaccgtgaaaggagacgtccacgacattggaaaaaacatcgtgggggtggtgctggggtgtaacaatttccgggtgattgacctgggagttatgaccccttgcgacaagattctgaaggccgctctggaccataaggcggacataattggactgtctggcctcatcacgccatcactcgacgagatgattttcgtggccaaggaaatggagagactggcaattcggatcccccttcttatcggcggagcaactacatccaagactcacactgcagtgaaaattgcccctaggtactccgctccggtgatccatgttcttgatgctagcaagagtgttgtagtgtgcagtcaacttctggatgagaatctgaaggacgaatattttgaggagattatggaagagtatgaggatattcgacaggatcactacgagagcctaaaggaacgtcgctacttacctctgtcacaggccagaaagtctgggtttcagatggactggttgtctgagccccacccagtgaaacctactttcattggaacgcaggttttcgaggactatgacctgcagaagcttgtcgactacatcgattggaagccctttttcgatgtttggcaattacgggggaaatatcccaatcgaggctttcccaaaatttttaacgacaaaacggtgggcggggaagccagaaaagtctacgatgatgcgcataatatgctcaacacgttaatatcccagaaaaaacttcgcgcgagaggcgtggttggattctggccagctcagagcattcaggatgatatccatctgtacgccgaggctgctgtacctcaggccgccgaaccaatagctaccttctatggactgcgtcaacaagcagagaaggacagtgcttccactgaaccgtactactgcttgtcagattttattgcaccgctacacagcggaatccgagattatttagggttgtttgcagtggcttgtttcggcgtggaggagctttctaaagcatatgaagatgatggggatgattactcctccattatggtgaaagccttaggcgatcgtttggcggaagccttcgctgaggaactccacgaacgggtgcggcgcgagctgtgggcttactgcggcagcgaacagcttgatgtcgccgaccttcggcgtcttcgctataagggaatacgacccgcccctggctacccttcacaaccagaccataccgagaaactgactatgtggagattagctgacatcgagcagtctacggggatccggctcactgagtccctcgctatggccccagcctcagccgtcagcgggctgtatttctctaatctcaaatccaagtattttgcagtagggaagatatctaaagaccaggtggaggactatgccctccgaaaaaatatcagtgtcgcggaggtggagaagtggcttggcccaattctgggatatgataccgattag

SEQ ID NO: 110745 - DNA, 3645 bp, Artificial Sequence
  derived and/or modified sequence
atgagccctgccctgcaggacctgagccagcctgagggcctgaagaagaccctgagagatgagatcaatgccatcctgcagaagaggatcatggtgctggatggcggcatgggcaccatgatccagcgggagaagctgaatgaggagcacttccggggccaggagttcaaggaccacgcccggcccctgaagggcaacaatgacatcctgagcatcacccagccagatgtgatctaccagatccacaaggagtacctgctggccggggctgacatcatcgagaccaacaccttcagcagcaccagcatcgcccaggccgactatggcctggagcacctggcctacaggatgaacatgtgcagcgctggggtggccaggaaggctgctgaggaggtgaccctgcagacaggcatcaagagatttgtggccggggccctgggccccaccaacaagaccctgtctgtgagccccagcgtggagaggccagactacagaaacatcacctttgatgagctggtggaggcctaccaggagcaggccaagggcctgctggatggaggagtggacatcctgctgattgagaccatctttgacacagccaatgccaaggccgccctgtttgccctgcagaacctgtttgaggagaagtatgccccccggcccatcttcatcagcggcaccatcgtggacaagagcggccgcaccctgagcggccagacaggagagggcttcgtcatctctgtgagccacggggagcccctgtgcatcggcctgaactgtgccctgggcgctgctgagatgaggcccttcatcgagatcatcggcaagtgcaccacagcctacgtgctgtgctacccaaatgccggcctgcccaacaccttcggggactatgatgagacccccagcatgatggccaagcacctgaaggactttgccatggatggcctggtgaacatcgtgggcggctgctgcggcagcaccccagaccacatccgggagattgctgaggccgtgaagaactgcaagccccgggtgcccccagccacagcctttgagggccacatgctgctgagcggcctggagcccttcagaattggcccctacaccaactttgtgaacatcggggagcgctgcaatgtggccggcagcaggaagtttgccaagctgatcatggccggcaactatgaggaggccctgtgtgtggccaaggtgcaggtggagatgggcgcccaggtgctggatgtgaacatggatgatggcatgctggatggccccagcgccatgacccgcttctgcaacctgattgccagcgagccagacatcgccaaggtgcccctgtgcatcgacagcagcaactttgctgtgattgaggccggcctgaagtgctgccagggcaagtgcatcgtgaacagcatcagcctgaaggagggggaggatgacttcctggagaaggccaggaagatcaagaagtatggagctgccatggtggtgatggcctttgatgaggagggccaggccacagaaacagacaccaagatccgggtgtgcacccgggcctaccacctgctggtgaagaagctgggcttcaaccccaatgacatcatctttgaccccaacatcctgaccatcggcaccggcatggaggagcacaacctgtatgccatcaacttcatccacgccaccaaggtgatcaaggagaccctgcccggggcccgcatcagcggcggcctgagcaacctgtccttctccttccggggcatggaggccatccgggaggccatgcatggagtcttcctgtaccacgccatcaagagcggcatggacatgggcatcgtgaatgccggcaacctgcctgtgtatgatgacatccacaaggagctgctgcagctgtgtgaggacctgatctggaacaaggaccctgaggccacagagaagctgctgcgctatgcccagacccagggcactggaggcaagaaggtgatccagacagatgagtggagaaatggacctgtggaggagcggctggagtatgccctggtgaaggtgatcaagagcgcccgggtgatgaagaaggctgtgggccacctgatccccttcatggagaaggagcgggaggagaccagggtgctgaatggaacagtggaggaggaggacccctaccagggcaccatcgtgctggccaccgtgaagggagatgtgcatgacatcggcaagaacatcgtgggcgtggtgctgggctgcaacaacttccgggtgattgacctgggcgtgatgaccccctgtgacaagatcctgaaggccgccctggaccacaaggctgacatcatcggcctgagcggcctcatcacccccagcctggatgagatgatctttgtggccaaggagatggagcggctggccatccgcatccccctgctgattggaggagccaccaccagcaagacccacacagctgtgaagatcgccccccgctacagcgcccctgtgattcatgtgctggatgccagcaagtctgtggtggtgtgcagccagctgctggatgagaacctgaaggatgagtactttgaggagatcatggaggagtatgaggacatccggcaggaccactatgagagcctgaaggagcggcgctacctgcccctgagccaggccaggaagagcggcttccagatggactggctgtctgagccccaccctgtgaagcccaccttcatcggcacccaggtgtttgaagattatgacctgcagaagctggtggactacatcgactggaagcccttctttgatgtgtggcagctgcggggcaagtaccccaacagaggcttccccaagatcttcaatgacaagacagtgggcggggaggccaggaaggtgtatgatgatgcccacaacatgctgaacaccctcatcagccagaagaagctgcgggcccggggcgtggtgggcttctggccagcccagagcatccaggatgacatccacctgtatgcagaggccgctgtgccccaggccgctgagcccatcgccaccttctacggcctgcggcagcaggccgagaaggacagcgccagcacagagccctactactgcctgagtgacttcatcgcccccctgcacagcggcatccgggactacctgggcctgtttgctgtggcctgcttcggcgtggaggagctgagcaaggcctatgaagatgatggagatgactacagcagcatcatggtgaaggccctgggggaccggctggccgaggcctttgctgaggagctgcacgagcgggtgagaagagagctgtgggcctactgcggcagcgagcagctggatgtggccgacctgcggcggctgcgctacaagggcatccggcctgcccctggctaccccagccagcctgaccacacagagaagctgaccatgtggaggctggccgacatcgagcagagcacaggcatccggctgacagagagcctggccatggccccagccagcgctgtgtctggcctgtacttcagcaacctgaagagcaagtactttgctgtgggcaagatcagcaaggaccaggtggaggactatgccctgaggaagaacatctctgtggccgaggtggagaagtggctgggccccatcctgggctatgacacagactag

SEQ ID NO: 110746 - DNA, 3645 bp, Artificial Sequence
  derived and/or modified sequence
atgagccccgccctgcaggacctgagccagcccgagggcctgaagaaaacccttagggacgagattaacgctatcctgcagaaaagaatcatggttctggatggtggtatgggcactatgatccaacgcgagaaactgaacgaagagcacttccgcggccaggagttcaaagaccacgctcggcccttgaagggtaacaacgatatcctgtcgatcacacagccagatgtgatataccagatccacaaggaatatttgcttgctggggccgatattatcgagacaaatactttttctagtacatccattgcccaggccgattacggcctggagcatctagcatacagaatgaacatgtgttccgcaggagtcgccaggaaggcagccgaggaggtgacactgcaaaccggaattaaaaggtttgtcgcaggtgccctcgggcctacaaataagacactgtccgtctcaccctcagtcgagagacctgactatcggaacatcactttcgacgagctcgtagaggcatatcaagaacaggcgaagggcctcttggacgggggagtcgacattttgcttattgagactatattcgacacagccaacgcaaaggctgctctattcgcattgcaaaacctgttcgaagaaaagtatgctccccgtcctatttttatctcaggtaccattgtcgacaaatctggcaggactctttcggggcagacgggcgagggtttcgttatctcagtcagccatggtgagcctttgtgtatcggcctgaattgcgcattgggcgcagccgagatgcgcccatttatcgagataatcggcaagtgtactacggcctacgtactgtgctacccgaacgctgggctcccaaacacatttggagactatgacgagacccctagcatgatggcaaaacacctgaaagactttgccatggacgggctcgtgaacattgtcgggggatgctgcgggagcacaccggaccacatccgtgagatcgcagaggcagtaaaaaattgtaagccacgcgtgcccccggcaaccgcattcgaaggtcacatgcttctgagcgggctagaacctttcaggatcggcccctatacgaacttcgtgaacataggcgagcgatgcaatgtggccggatcacgcaaattcgctaagctcattatggccgggaactatgaggaggcattatgcgtagctaaagtgcaagtggagatgggcgctcaggtactggacgtgaacatggacgacgggatgctggatggaccttcggccatgacgcgcttctgtaatttgatcgcttcggagcctgatatcgccaaagtccctctatgtattgactcctctaactttgcagtgatcgaggccggtctgaagtgctgccagggcaaatgcatcgtcaattctatttcattgaaagaaggcgaagacgactttctcgaaaaggcaagaaagatcaagaaatatggggcagccatggtcgtaatggcctttgacgaagagggccaggctacagagacagataccaagatccgggtttgcaccagggcataccacctgctcgtcaaaaagctggggtttaaccccaatgacatcatatttgatccaaatatcctcactatcggaactgggatggaggagcataacctgtatgcaattaactttatacacgccacgaaggtaataaaggagaccctccccggcgcccgtatctcggggggactgtccaatctctccttcagtttcagggggatggaggctatccgcgaagctatgcacggggtctttctgtaccatgccatcaagagtggtatggatatgggaattgtcaacgctggcaatttacctgtttatgatgatatccacaaagagctcctccagctgtgtgaggatctcatttggaataaggaccccgaggccactgaaaagctactacgctacgcacagacgcagggtacggggggtaagaaagttatccagacagacgagtggcggaacggaccagtggaagagcggctcgaatacgccttagtgaaagtgatcaagtcagctcgggtgatgaaaaaggcagtgggacatctcattccgttcatggagaaggagagagaggaaaccagggtccttaacggcaccgtagaagaggaagacccgtaccaaggtaccattgtccttgccaccgtaaagggtgacgtgcatgacataggcaaaaacattgttggcgtagtgctcggctgtaataactttagggtcatcgacttgggggtgatgacaccctgtgataaaatcctgaaggctgctttagatcacaaagccgacatcatcggcctgagcggcttgatcacaccaagcctggacgaaatgatatttgtagcgaaggagatggagcgcctggctattagaattcctctgctaattggaggggcgaccacgtcgaagacccacacggctgttaagattgccccaagatatagtgcccccgtcattcacgtactagacgcatctaagagcgtcgtggtatgttcacagctcctcgatgagaatctgaaggacgagtactttgaggagatcatggaggaatacgaggatattaggcaggaccactacgagtctctgaaggaacgccgatatttgcccctgagtcaagcccgcaagtcagggtttcaaatggattggctgtcagagcctcaccccgtgaaacccacgttcatcgggactcaagtctttgaagactacgatctccagaagctcgtggactacatcgactggaagcccttctttgacgtgtggcaactgcgggggaaatacccgaacagggggtttccgaaaatattcaatgacaaaactgtagggggtgaagccagaaaagtctatgatgatgcccataacatgctgaacactctgattagccaaaagaagctgcgggccagaggagttgtgggcttttggccggcgcagagcatccaggatgatatacatctgtacgcagaggccgcagttcctcaagcggccgagcccattgcaacattctatggacttaggcaacaggcagaaaaggactcagcttccactgaaccttactactgtctctccgactttatcgcccccctgcacagcgggatccgggactatcttgggctcttcgccgtggcctgcttcggcgtcgaagaactgagtaaagcttacgaggacgatggggatgattactcttccatcatggtgaaggccctgggcgatcggctggctgaggcatttgctgaggaattgcatgagcgagtgaggagagagctatgggcttactgtggatctgaacagctggacgtggccgacctgagacggctgagatataagggaataagaccagccccagggtacccatctcagcctgaccacaccgagaaactcacaatgtggcggcttgccgacatcgaacagtccacgggaatccggttaaccgagagtctcgcaatggcccccgcttctgctgtcagcgggctctacttttccaacctcaagagcaagtatttcgccgtcgggaagatcagcaaggatcaggtggaggactatgcactgagaaaaaatataagtgtcgccgaggtcgagaagtggcttgggcccattcttggatacgatacagactag

SEQ ID NO: 110747 - DNA, 3645 bp, Artificial Sequence
  derived and/or modified sequence
atgtctcctgccctgcaggatcttagccagccggaaggtttgaaaaagaccctgcgtgatgaaatcaatgcaatccttcagaagcgcattatggttctggacggcggtatgggcacgatgatccagagggagaagttaaatgaagaacattttcgcggtcaggaattcaaagaccatgcccgacccctgaaaggcaacaacgatatcttgagcattacccagccagatgtcatatatcagattcacaaagaatacttgctagctggcgctgatattattgagacgaataccttttcaagcactagcattgcccaggccgattacggacttgagcaccttgcgtaccggatgaatatgtgctcggccggtgtggctaggaaagctgctgaagaggtgactctgcagactgggatcaagagattcgtggctggagctttagggccaactaataagactctgagcgtctctccctccgtggagcggccagactaccgcaatatcacctttgacgagcttgtcgaagcatatcaggagcaggccaaaggtctgcttgacggtggagtggacatactactgatcgaaacgatctttgacaccgccaatgccaaggctgccctcttcgccctacagaacctgttcgaggagaaatatgcgcctcgcccaattttcatctctggcacgattgtggataaatccggacggacactgtccgggcagaccggcgaggggtttgtcataagcgtgagccatggcgagcccctatgtattggccttaattgcgcgttgggcgcagcagaaatgcgcccttttattgaaatcataggaaagtgtacaacggcatacgtgctgtgttatcctaacgctgggctaccaaatactttcggcgattatgatgaaacaccctccatgatggcaaagcacctgaaagatttcgccatggatggacttgtcaatatcgtcggaggctgttgtggatcaacgccagaccatattcgagagatcgcagaggccgtgaaaaattgtaagcccagagtccccccagccaccgcctttgaaggacatatgcttttgtctggcttggagccctttcgtattggtccatacactaattttgtcaacattggcgagagatgtaatgtggcaggttcccggaaatttgccaaactgattatggccggaaactatgaggaagctttgtgcgtagccaaggtgcaagtggagatgggagcccaggtgttggacgttaatatggacgatggaatgctggatggaccctctgccatgacacgattttgtaacttgatagctagtgaacctgacatagctaaagtacctttatgcattgattccagcaatttcgcagtcatcgaggcagggttgaaatgctgtcagggaaaatgcatagtcaatagcatctccctgaaggagggggaggatgacttcctggaaaaggccaggaagatcaaaaaatacggcgctgcgatggtggtaatggccttcgatgaggagggccaggccaccgaaaccgatactaaaatacgagtgtgcacacgtgcttatcatctcctggtaaaaaagctcggattcaaccccaatgacatcatttttgaccccaacattttgaccatcggcaccgggatggaagagcacaatctttatgctattaatttcatccacgcgaccaaagttatcaaggaaactctgccaggggcaaggatcagcggcggactcagcaatttaagctttagtttccgcggaatggaggccattagggaggcaatgcacggggtatttttgtaccatgccattaagagcggaatggatatgggtattgtgaacgctggcaacttgcctgtgtacgacgatattcataaagagctcctgcaattatgcgaagatcttatttggaataaagacccagaggcaacagaaaaactcctcaggtacgcccagacccagggcaccgggggaaagaaagtgatacagactgacgagtggaggaacggtcctgtggaagaacgcctggaatacgccttggtaaaggtcataaagtctgcccgagtcatgaagaaagcagttgggcacctcatcccgtttatggagaaggaaagggaagaaacgcgcgtacttaatggaacagtggaagaagaagatccctaccagggcactattgtgctggccaccgttaaaggtgatgttcatgacattggaaagaatatcgttggtgtggtgctgggttgcaataacttcagagtaatcgatctaggagtcatgaccccctgcgataagattcttaaagctgccctggaccataaagccgacatcattgggttgtcaggcctcataactccatcgctggacgagatgatattcgtggcaaaggagatggaacgcctggctatccgtattcctctattgatcggtggggctacgactagcaagacgcacaccgcagtgaaaatcgcacctagatactccgcgcctgttatccatgtcctcgacgcttcgaagtccgtggtggtgtgtagccaactgctggacgagaatttaaaagatgaatacttcgaagagattatggaagaatatgaggacatacgacaggaccactacgagagtctgaaagagcgcaggtacctgccgctcagtcaggccaggaaatctggctttcagatggattggctcagtgaacctcatcctgtgaagcccacctttattggcacacaggtctttgaggattacgatcttcagaagttggtcgactacatcgattggaaacctttcttcgacgtgtggcagctgagaggaaagtatcccaacagaggcttccccaagatttttaatgataagactgtgggcggtgaagctcgcaaggtgtacgatgatgcacataacatgctgaacactctcatatctcagaagaaattacgggctcgcggagtggtgggtttctggcctgcgcagagcatacaggatgacatccatctttacgccgaagccgctgtccctcaggccgcagagcccatcgccaccttttatggactgcgccaacaggccgagaaggattcagcctccacagagccgtattactgcctttctgattttatcgcaccacttcactctggcatccgggactatttgggcctgttcgcagtggcctgctttggtgtcgaagaattgagtaaagcctacgaagatgacggggatgactatagttcaatcatggtgaaggctcttggagaccggctggccgaggctttcgcagaggagctccacgaacgcgtccgtcgggaactctgggcgtactgtgggagcgaacagctggacgtggctgaccttaggcgccttaggtataagggcattcgcccagctcctggctacccctcacagcctgaccacaccgaaaagctaacaatgtggcgcctcgcagacatcgagcagtctactgggatccgcttgacagaaagccttgctatggccccagcctccgcggtctcaggcctatattttagcaacctgaagagcaagtactttgccgtgggtaagatcagtaaggaccaggtggaagactacgccctcagaaagaacatctctgtggcagaagtagaaaagtggctgggtcccattctggggtacgacacagattag

SEQ ID NO: 110748 - DNA, 4157 bp, Artificial Sequence
  derived and/or modified sequence
cgcaaggaggagactcgacaacatgtcacccgcgctccaagacctgtcgcaacccgaaggtctgaagaaaaccctgcgggatgagatcaatgccattctgcagaagaggattatggtgctggatggagggatggggaccatgatccagcgggagaagctaaacgaagaacacttccgaggtcaggaatttaaagatcatgccaggccgctgaaaggcaacaatgacattttaagtataactcagcctgatgtcatttaccaaatccataaggaatacttgctggctggggcagatatcattgaaacaaatacttttagcagcactagtattgcccaagctgactatggccttgaacacttggcctaccggatgaacatgtgctctgcaggagtggccagaaaagctgccgaggaggtaactctccagacaggaattaagaggtttgtggcaggggctctgggtccgactaataagacactctctgtgtccccatctgtggaaaggccggattataggaacatcacatttgatgagcttgttgaagcataccaagagcaggccaaaggacttctggatggcggggttgatatcttactcattgaaactatttttgatactgccaatgccaaggcagccttgtttgcactccaaaatctttttgaggagaaatatgctccccggcctatctttatttcagggacgatcgttgataaaagtgggcggactctttccggacagacaggagagggatttgtcatcagcgtgtctcatggagaaccactctgcattggattaaattgtgctttgggtgcagctgaaatgagaccttttattgaaataattggaaaatgtacaacagcctatgtcctctgttatcccaatgcaggtcttcccaacacctttggtgactatgatgaaacgccttctatgatggccaagcacctaaaggattttgctatggatggcttggtcaatatagttggaggatgctgtgggtcaacaccagatcatatcagggaaattgctgaagctgtgaaaaattgtaagcctagagttccacctgccactgcttttgaaggacatatgttactgtctggtctagagcccttcaggattggaccgtacaccaactttgttaacattggagagcgctgtaatgttgcaggatcaaggaagtttgctaaactcatcatggcaggaaactatgaagaagccttgtgtgttgccaaagtgcaggtggaaatgggagcccaggtgttggatgtcaacatggatgatggcatgctagatggtccaagtgcaatgaccagattttgcaacttaattgcttccgagccagacatcgcaaaggtacctttgtgcatcgactcctccaattttgctgtgattgaagctgggttaaagtgctgccaagggaagtgcattgtcaatagcattagtctgaaggaaggagaggacgacttcttggagaaggccaggaagattaaaaagtatggagctgctatggtggtcatggcttttgatgaagaaggacaggcaacagaaacagacacaaaaatcagagtgtgcacccgggcctaccatctgcttgtgaaaaaactgggctttaatccaaatgacattatttttgaccctaatatcctaaccattgggactggaatggaggaacacaacttgtatgccattaattttatccatgcaacaaaagtcattaaagaaacattacctggagccagaataagtggaggtctttccaacttgtccttctccttccgaggaatggaagccattcgagaagcaatgcatggggttttcctttaccatgcaatcaagtctggcatggacatggggatagtgaatgctggaaacctccctgtgtatgatgatatccataaggaacttctgcagctctgtgaagatctcatctggaataaagaccctgaggccactgagaagctcttacgttatgcccagactcaaggcacaggagggaagaaagtcattcagactgatgagtggagaaatggccctgtcgaagaacgccttgagtatgcccttgtgaaggttataaagtcagcccgggttatgaagaaggctgttggccaccttatccctttcatggaaaaagaaagagaagaaaccagagtgcttaacggcacagtagaagaagaggacccttaccagggcaccatcgtgctggccactgttaaaggcgacgtgcacgacataggcaagaacatagttggagtagtccttggctgcaataatttccgagttattgatttaggagtcatgactccatgtgataagatactgaaagctgctcttgaccacaaagcagatataattggcctgtcaggactcatcactccttccctggatgaaatgatttttgttgccaaggaaatggagagattagctataaggattccattgttgattggaggagcaaccacttcaaaaacccacacagcagttaaaatagctccgagatacagtgcacctgtaatccatgtcctggacgcgtccaagagtgtggtggtgtgttcccagctgttagatgaaaatctaaaggatgaatactttgaggaaatcatggaagaatatgaagatattagacaggaccattatgagtctctcaaggagaggagatacttacccttaagtcaagccagaaaaagtggtttccaaatggattggctgtctgaacctcacccagtgaagcccacgtttattgggacccaggtctttgaagactatgacctgcagaagctggtggactacattgactggaagcctttctttgatgtctggcagctccggggcaagtacccgaatcgaggctttcccaagatatttaacgacaaaacagtaggtggagaggccaggaaggtctacgatgatgcccacaatatgctgaacacactgattagtcaaaagaaactccgggcccggggtgtggttgggttctggccagcacagagtatccaagacgacattcacctgtacgcagaggctgctgtgccccaggctgcagagcccatagccaccttctatgggttaaggcaacaggctgagaaggactctgccagcacggagccatactactgcctctcagacttcatcgctcccttgcattctggcatccgtgactacctgggcctgtttgccgttgcctgctttggggtagaagagctgagcaaggcctatgaggatgatggtgacgactacagcagcatcatggtcaaggcgctgggggaccggctggcagaggcctttgcagaagagctccatgaaagagttcgccgagaactgtgggcctactgtggcagtgagcagctggacgtcgcagacctgcgcaggctgcggtacaagggcatccgcccggctcctggctaccccagccagcccgaccacaccgagaagctcaccatgtggagactcgcagacatcgagcagtctacaggcattaggttaacagaatcattagcaatggcacctgcttcagcagtctcaggcctctacttctccaatttgaagtccaaatattttgctgtggggaagatttccaaggatcaggttgaggattatgcattgaggaagaacatatctgtggctgaggttgagaaatggcttggacccattttgggatatgatacagactaactttttttttttttttgccttttttattcttgatgatcctcaaggaaatacaacctagggtgccttaaaaataacaacaacaaaaaacctgtgtgcatctggctgacacttacctgcttctggttttcgaagactatttagtggaaccttgtagaggagcagggtcttcctgcagtgcctggaaaacaggcgctgtttttttgggaccttgcgtgaagagcagtgagcagggttcctgtggtttccctggtccctctgagatggggacagactgaagacagaggtcgtttgatttcaaagcaagtcaacctgcttttttctgtttttacagtggaatctaggaggccacttagtcgtctttttttcctcttagaagaaaagcctgaaactgagttgaatagagaagtgtgaccctgtgacaaaatgatactgtgagaaatggggcattttaatctaagtggttataacagtggattctgacggggaaggt

SEQ ID NO: 110749 - DNA, 3645 bp, Artificial Sequence
  derived and/or modified sequence
atgagccccgccctgcaggacctgagccagcccgagggcctgaagaagaccctgagagacgagatcaacgccatcctgcagaagagaatcatggtgctggacggcggcatgggcaccatgatccagagagagaagctgaacgaggagcacttcagaggccaggagttcaaggaccacgccagacccctgaagggcaacaacgacatcctgagcatcacccagcccgacgtgatctaccagatccacaaggagtacctgctggccggcgccgacatcatcgagaccaacaccttcagcagcaccagcatcgcccaggccgactacggcctggagcacctggcctacagaatgaacatgtgcagcgccggcgtggccagaaaggccgccgaggaggtgaccctgcagaccggcatcaagagattcgtggccggcgccctgggccccaccaacaagaccctgagcgtgagccccagcgtggagagacccgactacagaaacatcaccttcgacgagctggtggaggcctaccaggagcaggccaagggcctgctggacggcggcgtggacatcctgctgatcgagaccatcttcgacaccgccaacgccaaggccgccctgttcgccctgcagaacctgttcgaggagaagtacgcccccagacccatcttcatcagcggcaccatcgtggacaagagcggcagaaccctgagcggccagaccggcgagggcttcgtgatcagcgtgagccacggcgagcccctgtgcatcggcctgaactgcgccctgggcgccgccgagatgagacccttcatcgagatcatcggcaagtgcaccaccgcctacgtgctgtgctaccccaacgccggcctgcccaacaccttcggcgactacgacgagacccccagcatgatggccaagcacctgaaggacttcgccatggacggcctggtgaacatcgtgggcggctgctgcggcagcacccccgaccacatcagagagatcgccgaggccgtgaagaactgcaagcccagagtgccccccgccaccgccttcgagggccacatgctgctgagcggcctggagcccttcagaatcggcccctacaccaacttcgtgaacatcggcgagagatgcaacgtggccggcagcagaaagttcgccaagctgatcatggccggcaactacgaggaggccctgtgcgtggccaaggtgcaggtggagatgggcgcccaggtgctggacgtgaacatggacgacggcatgctggacggccccagcgccatgaccagattctgcaacctgatcgccagcgagcccgacatcgccaaggtgcccctgtgcatcgacagcagcaacttcgccgtgatcgaggccggcctgaagtgctgccagggcaagtgcatcgtgaacagcatcagcctgaaggagggcgaggacgacttcctggagaaggccagaaagatcaagaagtacggcgccgccatggtggtgatggccttcgacgaggagggccaggccaccgagaccgacaccaagatcagagtgtgcaccagagcctaccacctgctggtgaagaagctgggcttcaaccccaacgacatcatcttcgaccccaacatcctgaccatcggcaccggcatggaggagcacaacctgtacgccatcaacttcatccacgccaccaaggtgatcaaggagaccctgcccggcgccagaatcagcggcggcctgagcaacctgagcttcagcttcagaggcatggaggccatcagagaggccatgcacggcgtgttcctgtaccacgccatcaagagcggcatggacatgggcatcgtgaacgccggcaacctgcccgtgtacgacgacatccacaaggagctgctgcagctgtgcgaggacctgatctggaacaaggaccccgaggccaccgagaagctgctgagatacgcccagacccagggcaccggcggcaagaaggtgatccagaccgacgagtggagaaacggccccgtggaggagagactggagtacgccctggtgaaggtgatcaagagcgccagagtgatgaagaaggccgtgggccacctgatccccttcatggagaaggagagagaggagaccagagtgctgaacggcaccgtggaggaggaggacccctaccagggcaccatcgtgctggccaccgtgaagggcgacgtgcacgacatcggcaagaacatcgtgggcgtggtgctgggctgcaacaacttcagagtgatcgacctgggcgtgatgaccccctgcgacaagatcctgaaggccgccctggaccacaaggccgacatcatcggcctgagcggcctgatcacccccagcctggacgagatgatcttcgtggccaaggagatggagagactggccatcagaatccccctgctgatcggcggcgccaccaccagcaagacccacaccgccgtgaagatcgcccccagatacagcgcccccgtgatccacgtgctggacgccagcaagagcgtggtggtgtgcagccagctgctggacgagaacctgaaggacgagtacttcgaggagatcatggaggagtacgaggacatcagacaggaccactacgagagcctgaaggagagaagatacctgcccctgagccaggccagaaagagcggcttccagatggactggctgagcgagccccaccccgtgaagcccaccttcatcggcacccaggtgttcgaggactacgacctgcagaagctggtggactacatcgactggaagcccttcttcgacgtgtggcagctgagaggcaagtaccccaacagaggcttccccaagatcttcaacgacaagaccgtgggcggcgaggccagaaaggtgtacgacgacgcccacaacatgctgaacaccctgatcagccagaagaagctgagagccagaggcgtggtgggcttctggcccgcccagagcatccaggacgacatccacctgtacgccgaggccgccgtgccccaggccgccgagcccatcgccaccttctacggcctgagacagcaggccgagaaggacagcgccagcaccgagccctactactgcctgagcgacttcatcgcccccctgcacagcggcatcagagactacctgggcctgttcgccgtggcctgcttcggcgtggaggagctgagcaaggcctacgaggacgacggcgacgactacagcagcatcatggtgaaggccctgggcgacagactggccgaggccttcgccgaggagctgcacgagagagtgagaagagagctgtgggcctactgcggcagcgagcagctggacgtggccgacctgagaagactgagatacaagggcatcagacccgcccccggctaccccagccagcccgaccacaccgagaagctgaccatgtggagactggccgacatcgagcagagcaccggcatcagactgaccgagagcctggccatggcccccgccagcgccgtgagcggcctgtacttcagcaacctgaagagcaagtacttcgccgtgggcaagatcagcaaggaccaggtggaggactacgccctgagaaagaacatcagcgtggccgaggtggagaagtggctgggccccatcctgggctacgacaccgactag

SEQ ID NO: 110750 - protein, 357 aa, Artificial Sequence
  derived and/or modified sequence
MEKYVAAMVLSAAGDALGYYNGKWEFLQDGEKIHRQLAQLGGLDALDVGRWRVSDDTVMHLATAEALVEAGKAPKLTQLYYLLAKHYQDCMEDMDGRAPGGASVHNAMQLKPGKPNGWRIPFNSHEGGCGAAMRAMCIGLRFPHHSQLDTLIQVSIESGRMTHHHPTGYLGALASALFTAYAVNSRPPLQWGKGLMELLPEAKKYIVQSGYFVEENLQHWSYFQTKWENYLKLRGILDGESAPTFPESFGVKERDQFYTSLSYSGWGGSSGHDAPMIAYDAVLAAGDSWKELAHRAFFHGGDSDSTAAIAGCWWGVMYGFKGVSPSNYEKLEYRNRLEETARALYSLGSKEDTVISL

SEQ ID NO: 110751 - protein, 125 aa, Artificial Sequence
  derived and/or modified sequence
MEKYVAAMVLSAAGDALGYYNGKWEFLQDGEKIHRQLAQLGGLDALDVGRWRVSDDTVMHLATAEALVEAGKAPKLTQLYYLLAKHYQDCMEDMDGRAPGGASVHNAMQLKPGKPNGWRIPFNSH

SEQ ID NO: 110752 - DNA, 1074 bp, Artificial Sequence
  derived and/or modified sequence
atggagaagtacgtggccgccatggtgctgagcgccgccggcgacgccctgggctactacaacggcaagtgggagttcctgcaggacggcgagaagatccacagacagctggcccagctgggcggcctggacgccctggacgtgggcagatggagagtgagcgacgacaccgtgatgcacctggccaccgccgaggccctggtggaggccggcaaggcccccaagctgacccagctgtactacctgctggccaagcactaccaggactgcatggaggacatggacggcagagcccccggcggcgccagcgtgcacaacgccatgcagctgaagcccggcaagcccaacggctggagaatccccttcaacagccacgagggcggctgcggcgccgccatgagagccatgtgcatcggcctgagattcccccaccacagccagctggacaccctgatccaggtgagcatcgagagcggcagaatgacccaccaccaccccaccggctacctgggcgccctggccagcgccctgttcaccgcctacgccgtgaacagcagaccccccctgcagtggggcaagggcctgatggagctgctgcccgaggccaagaagtacatcgtgcagagcggctacttcgtggaggagaacctgcagcactggagctacttccagaccaagtgggagaactacctgaagctgagaggcatcctggacggcgagagcgcccccaccttccccgagagcttcggcgtgaaggagagagaccagttctacaccagcctgagctacagcggctggggcggcagcagcggccacgacgcccccatgatcgcctacgacgccgtgctggccgccggcgacagctggaaggagctggcccacagagccttcttccacggcggcgacagcgacagcaccgccgccatcgccggctgctggtggggcgtgatgtacggcttcaagggcgtgagccccagcaactacgagaagctggagtacagaaacagactggaggagaccgccagagccctgtacagcctgggcagcaaggaggacaccgtgatcagcctgtag

SEQ ID NO: 110753 - DNA, 378 bp, Artificial Sequence
  derived and/or modified sequence
atggagaagtacgtggccgccatggtgctgagcgccgccggcgacgccctgggctactacaacggcaagtgggagttcctgcaggacggcgagaagatccacagacagctggcccagctgggcggcctggacgccctggacgtgggcagatggagagtgagcgacgacaccgtgatgcacctggccaccgccgaggccctggtggaggccggcaaggcccccaagctgacccagctgtactacctgctggccaagcactaccaggactgcatggaggacatggacggcagagcccccggcggcgccagcgtgcacaacgccatgcagctgaagcccggcaagcccaacggctggagaatccccttcaacagccactag

SEQ ID NO: 110754 - DNA, 3439 bp, Artificial Sequence
  derived and/or modified sequence
caggtgcgggggccctcgccgccaccctgcttatctggggacagtcccggaacccggtgacccggctccgccccaacccgcgccctcgtccacccgcagcagccaaggcctcttccccggccccgggagcccgcgccacgcccgtcgctcgcgcgttccagtccaggctacagcaggggctctccagcctgcattccatggccaacagcagtgcagctgcagaagcacttctggaagcctcctgacttgaactagaccttggacaccctctccagagcccagcaattgtgagggactgatggagaagtatgtggctgctatggtgctgagtgcagctggagatgccctggggtactacaatgggaagtgggagttcctccaggatggggagaagatacaccggcagttggcccagctgggcggcttggatgccctagacgtgggaaggtggagagttagtgacgacacagtgatgcacttggccacagcagaagctcttgtggaagctgggaaagcccctaagttgactcaactgtattacctccttgctaagcattaccaagactgcatggaagacatggatgggcgggcaccaggtggtgcctcggtgcacaacgccatgcagctgaagccgggcaagcccaatggctggaggattcccttcaacagccatgagggcggctgtggggctgccatgcgggccatgtgcatcggtctcaggttcccacaccatagccaactggacacactgatccaagtgagcatcgagagtggtcggatgacccaccaccacccaacaggctacctgggggcccttgcgtctgctctttttacagcctatgctgtgaatagcagaccacccttgcagtggggaaaaggactgatggagctgctaccagaagctaaaaagtacattgtccaatcaggctactttgtagaggaaaatcttcaacactggtcctacttccaaaccaaatgggaaaattacctaaaacttagagggattttggatggagaatcagcccctaccttccctgagtctttcggtgtgaaggagagggatcagttctacacctccctgagctactctggctggggtggcagcagtgggcacgatgcccccatgattgcctacgatgctgttcttgctgcaggagactcctggaaggagcttgcccaccgagcctttttccatggtggagacagtgattctacagctgccattgctggctgctggtggggagttatgtatggttttaaaggagtgagtccctccaactatgagaaactagaatacagaaaccggctggaagagacagctagggctttatattctctcgggtcaaaagaagacactgtaatttccctttagggagacgtgatgttcacttctgatggattcttcttttgtgtatttccttttctgctatttcttttcagtttttccaaagtcaagagtcttaaccttgtactcagggaattttgagataacaagtcccttgggcaccttaagctcagttttttcaggctcatcctgttcttccagaatctatcccttttcttacactgaagagtcctttagctcaattgatagggtcagcgtctcgcaagcaaaaaatctcatgacctcatatttgagtcttcattttcatcatctacttgttctaaaagttttttctgtttgtctcaagttgggttcccacaaagtggactttgagacaaagatctgaatgcaagcagtttatatgggagatgattccaggaaataccgatatgagaatggggaaatgaaaccaggaagggaagagagctagtatggggtatgttaatgagcaggtttccactgtgggcggttggcactctgccatctgagtcctctgcctaaagcattcctcagaactgtcccatttgaagggcaagcaaacctggggtatttatccactgacttccatctgacactggttgaggaccactgccagggatgctaactccctggtaattcttggcttaccctttgtacaaaccaaaccttagtgtcttcaggtaaagactcagagatacttgcaggggcaagctgtaaagggcatgggaacagtgagggacatatgtggggtcctaacaatatctgctaggctggtctacctcctaaatatactctgaatctatcacctctattgccttcttgcactgaggatttttcagctggatttctgcaatccaagctactcaagtctgggagatgctgctctgagctgctctcagtactctcctcatcatggcagttaacacattaccaattttgttattgtctgtttgcttgtttgcattatttctaaacagaacctagcacagtgcttgggcagccaataggcattaatcagtatctattgagtgttatgaactagcctcctagctcgtgcttccctcattaccctccagagttatgtttacgaataacaaattgaccatgctaaactaatcatgttccaatgaatacatcacctttcttcatttcttgatgctcttcccaatccttgtctacctgataataaattcttacttgtccttcaagacccaactcagatagatagagcttcctgagtgaaacctgctttgattgttcaggcacttggccaccttctcctcactcctcccacagccttctgtcttggccttgtcatcacatcaatcctgttgtgtggtgctgtgtgtcttctgggtcagtcctaggcacatgctgcccagcacatgtccacctgggaaatgagatgccatcgtcacattcatttggtcaccctcagtccagccagtgggcttgctctcatttggcctgttctcaggggtgggaaggaagagcgtcccttccttctccttttgagaaaaccacagaactatgactctcatgatttttcctttgtgaaatccctggttttcagctggaagcggtgggtaaatgaggtctgatgatagcagtcctgccaccttctagttcatcccataggaatgtttttccaagtccttccagtctttttagaacgtggtggaggagggttgtgtgtgccccagggggtcgggggtaggggatgcagggaggatcttagcatttgttgttttctagtgcagggctttagccacaattgtaaacaacaggaaaaggctctttagagatcctattagatttgctttgccgattgtcactcttcatcacaggcacatttcaaaaagaggttagactttcagacttcttttttctcaaacctcaaaacttccaccccaaacttcgctctcagctggtgactttgcttctttatgtgtgtgtatgtgtgtcagagaaagagagagagagagagagaagggaggatgagaacgaatggggggaagagataaactttatgcataacattagggtaaatcaataaagatggtctgacacatcgta

SEQ ID NO: 110755 - DNA, 1365 bp, Artificial Sequence
  derived and/or modified sequence
agagtcgttgttttttctgattcttcttgctcctcatcctatttcctttgtcttaatttccccacaaagacaccctctccagagcccagcaattgtgagggactgatggagaagtatgtggctgctatggtgctgagtgcagctggagatgccctggggtactacaatgggaagtgggagttcctccaggatggggagaagatacaccggcagttggcccagctgggcggcttggatgccctagacgtgggaaggtggagagttagtgacgacacagtgatgcacttggccacagcagaagctcttgtggaagctgggaaagcccctaagttgactcaactgtattacctccttgctaagcattaccaagactgcatggaagacatggatgggcgggcaccaggtggtgcctcggtgcacaacgccatgcagctgaagccgggcaagcccaatggctggaggattcccttcaacagccatgagggcggctgtggggctgccatgcgggccatgtgcatcggtctcaggttcccacaccatagccaactggacacactgatccaagtgagcatcgagagtggtcggatgacccaccaccacccaacaggctacctgggggcccttgcgtctgctctttttacagcctatgctgtgaatagcagaccacccttgcagtggggaaaaggactgatggagctgctaccagaagctaaaaagtacattgtccaatcaggctactttgtagaggaaaatcttcaacactggtcctacttccaaaccaaatgggaaaattacctaaaacttagagggattttggatggagaatcagcccctaccttccctgagtctttcggtgtgaaggagagggatcagttctacacctccctgagctactctggctggggtggcagcagtgggcacgatgcccccatgattgcctacgatgctgttcttgctgcaggagactcctggaaggagcttgcccaccgagcctttttccatggtggagacagtgattctacagctgccattgctggctgctggtggggagttatgtatggttttaaaggagtgagtccctccaactatgagaaactagaatacagaaaccggctggaagagacagctagggctttatattctctcgggtcaaaagaagacactgtaatttccctttagggagacgtgatgttcacttctgatggattcttcttttgtgtatttccttttctgctatttcttttcagtttttccaaagtcaagagtcttaaccttgtactcagggaattttgagataacaagtcccttgggcaccttaagctcagttttttcaggctcatcctgttcttccagaatctatccctt

SEQ ID NO: 110756 - DNA, 4546 bp, Artificial Sequence
  derived and/or modified sequence
aaataaatgactagttaaaattaactaactgaatccttaacaaccattctaagaggcagatattattatcccactttatgcgtgagggcccagaaccctggcaagggcggcacactcagtacgctcttcaagcatctgggcacacccggtccactacagtcctacaaagtcggacgtgagcacgggcgaaggcgtcagccggggccacacgggagtcactgaccacagccaggcgagagccggctttccggtgccgccacattccgggcaccaggctccgggctcttcagagcatttggggcgggcgacggaggtcccgtccactctcgcttgggtgcagaagggcgcggcggtgccaggaagccgccttggaggctccaagattagctcactcagcgcggccaagcgcaggtgcgggggccctcgccgccaccctgcttatctggggacagtcccggaacccggtgacccggctccgccccaacccgcgccctcgtccacccgcagcagccaaggcctcttccccggccccgggagcccgcgccacgcccgtcgctcgcgcgttccagtccaggctacagcaggtatcgcgatcccggccctcggccccgcgctcccctcccccgcccctggcgctctccgagtgtggccgaccatgaggattcccagtcttgcaaatcgtgggagcgtgtcaaccgccccgtttctttccaaagccgggcatggcccggaagcagctgatcagatcttagttctgaatgtatagttcgggtacgagaatgtgacccgtgaaagttcagaggagttaagtaattacagcgttctgaaagcgaacgttaaagggaatttacaaccgaaaaaagatgccggtcttcttcccccatcccagcttgcaattcacagaagcacacattagggtggagccagaaggaattacggaaaggacaatgaggacattgagagggagggtatggggggttaaagttagtcctccgaggccaagaagcagagtgtcttggcctagtgtctgaaaatcgcagcgcaggacggaacttccgagagcctatacctccccacttccccctccagtttacagatgggcaaaccgctgtcccgggtgtctgtcaggtctagtagcccagaatctcagtgcctaggcttcactgtaaataataaactatgtaaataacatttacaaatatcctttgtgagctcagaaactcagcattaccagtaactgggtagtggaacgcatccatcttcgtcgtttactccttctccaggggctctccagcctgcattccatggccaacagcagtgcagctgcagaagcacttctggaagcctcctgacttgaactagaccttggacaccctctccagagcccagcaattgtgagggactgatggagaagtatgtggctgctatggtgctgagtgcagctggagatgccctggggtactacaatgggaagtgggagttcctccaggatggggagaagatacaccggcagttggcccagctgggcggcttggatgccctagacgtgggaaggtggagagttagtgacgacacagtgatgcacttggccacagcagaagctcttgtggaagctgggaaagcccctaagttgactcaactgtattacctccttgctaagcattaccaagactgcatggaagacatggatgggcgggcaccaggtggtgcctcggtgcacaacgccatgcagctgaagccgggcaagcccaatggctggaggattcccttcaacagccatgagggcggctgtggggctgccatgcgggccatgtgcatcggtctcaggttcccacaccatagccaactggacacactgatccaagtgagcatcgagagtggtcggatgacccaccaccacccaacaggctacctgggggcccttgcgtctgctctttttacagcctatgctgtgaatagcagaccacccttgcagtggggaaaaggactgatggagctgctaccagaagctaaaaagtacattgtccaatcaggctactttgtagaggaaaatcttcaacactggtcctacttccaaaccaaatgggaaaattacctaaaacttagagggattttggatggagaatcagcccctaccttccctgagtctttcggtgtgaaggagagggatcagttctacacctccctgagctactctggctggggtggcagcagtgggcacgatgcccccatgattgcctacgatgctgttcttgctgcaggagactcctggaaggagcttgcccaccgagcctttttccatggtggagacagtgattctacagctgccattgctggctgctggtggggagttatgtatggttttaaaggagtgagtccctccaactatgagaaactagaatacagaaaccggctggaagagacagctagggctttatattctctcgggtcaaaagaagacactgtaatttccctttagggagacgtgatgttcacttctgatggattcttcttttgtgtatttccttttctgctatttcttttcagtttttccaaagtcaagagtcttaaccttgtactcagggaattttgagataacaagtcccttgggcaccttaagctcagttttttcaggctcatcctgttcttccagaatctatcccttttcttacactgaagagtcctttagctcaattgatagggtcagcgtctcgcaagcaaaaaatctcatgacctcatatttgagtcttcattttcatcatctacttgttctaaaagttttttctgtttgtctcaagttgggttcccacaaagtggactttgagacaaagatctgaatgcaagcagtttatatgggagatgattccaggaaataccgatatgagaatggggaaatgaaaccaggaagggaagagagctagtatggggtatgttaatgagcaggtttccactgtgggcggttggcactctgccatctgagtcctctgcctaaagcattcctcagaactgtcccatttgaagggcaagcaaacctggggtatttatccactgacttccatctgacactggttgaggaccactgccagggatgctaactccctggtaattcttggcttaccctttgtacaaaccaaaccttagtgtcttcaggtaaagactcagagatacttgcaggggcaagctgtaaagggcatgggaacagtgagggacatatgtggggtcctaacaatatctgctaggctggtctacctcctaaatatactctgaatctatcacctctattgccttcttgcactgaggatttttcagctggatttctgcaatccaagctactcaagtctgggagatgctgctctgagctgctctcagtactctcctcatcatggcagttaacacattaccaattttgttattgtctgtttgcttgtttgcattatttctaaacagaacctagcacagtgcttgggcagccaataggcattaatcagtatctattgagtgttatgaactagcctcctagctcgtgcttccctcattaccctccagagttatgtttacgaataacaaattgaccatgctaaactaatcatgttccaatgaatacatcacctttcttcatttcttgatgctcttcccaatccttgtctacctgataataaattcttacttgtccttcaagacccaactcagatagatagagcttcctgagtgaaacctgctttgattgttcaggcacttggccaccttctcctcactcctcccacagccttctgtcttggccttgtcatcacatcaatcctgttgtgtggtgctgtgtgtcttctgggtcagtcctaggcacatgctgcccagcacatgtccacctgggaaatgagatgccatcgtcacattcatttggtcaccctcagtccagccagtgggcttgctctcatttggcctgttctcaggggtgggaaggaagagcgtcccttccttctccttttgagaaaaccacagaactatgactctcatgatttttcctttgtgaaatccctggttttcagctggaagcggtgggtaaatgaggtctgatgatagcagtcctgccaccttctagttcatcccataggaatgtttttccaagtccttccagtctttttagaacgtggtggaggagggttgtgtgtgccccagggggtcgggggtaggggatgcagggaggatcttagcatttgttgttttctagtgcagggctttagccacaattgtaaacaacaggaaaaggctctttagagatcctattagatttgctttgccgattgtcactcttcatcacaggcacatttcaaaaagaggttagactttcagacttcttttttctcaaacctcaaaacttccaccccaaacttcgctctcagctggtgactttgcttctttatgtgtgtgtatgtgtgtcagagaaagagagagagagagagagaagggaggatgagaacgaatggggggaagagataaactttatgcataacattagggtaaatcaataaagatggtctgacacatcgta

SEQ ID NO: 110757 - DNA, 1501 bp, Artificial Sequence
  derived and/or modified sequence
actctcgcttgggtgcagaagggcgcggcggtgccaggaagccgccttggaggctccaagattagctcactcagcgcggccaagcgcaggtgcgggggccctcgccgccaccctgcttatctggggacagtcccggaacccggtgacccggctccgccccaacccgcgccctcgtccacccgcagcagccaaggcctcttccccggccccgggagcccgcgccacgcccgtcgctcgcgcgttccagtccaggctacagcagacaccctctccagagcccagcaattgtgagggactgatggagaagtatgtggctgctatggtgctgagtgcagctggagatgccctggggtactacaatgggaagtgggagttcctccaggatggggagaagatacaccggcagttggcccagctgggcggcttggatgccctagacgtgggaaggtggagagttagtgacgacacagtgatgcacttggccacagcagaagctcttgtggaagctgggaaagcccctaagttgactcaactgtattacctccttgctaagcattaccaagactgcatggaagacatggatgggcgggcaccaggtggtgcctcggtgcacaacgccatgcagctgaagccgggcaagcccaatggctggaggattcccttcaacagccatgagggcggctgtggggctgccatgcgggccatgtgcatcggtctcaggttcccacaccatagccaactggacacactgatccaagtgagcatcgagagtggtcggatgacccaccaccacccaacaggctacctgggggcccttgcgtctgctctttttacagcctatgctgtgaatagcagaccacccttgcagtggggaaaaggactgatggagctgctaccagaagctaaaaagtacattgtccaatcaggctactttgtagaggaaaatcttcaacactggtcctacttccaaaccaaatgggaaaattacctaaaacttagagggattttggatggagaatcagcccctaccttccctgagtctttcggtgtgaaggagagggatcagttctacacctccctgagctactctggctggggtggcagcagtgggcacgatgcccccatgattgcctacgatgctgttcttgctgcaggagactcctggaaggagcttgcccaccgagcctttttccatggtggagacagtgattctacagctgccattgctggctgctggtggggagttatgtatggttttaaaggagtgagtccctccaactatgagaaactagaatacagaaaccggctggaagagacagctagggctttatattctctcgggtcaaaagaagacactgtaatttccctttagggagacgtgatgttcacttctgatggattcttcttttgtgtatttccttttctgctatttcttttcagtttttccaaagtcaagagtcttaaccttgtactcagggaattttgagataacaagtccctt

SEQ ID NO: 110758 - DNA, 984 bp, Artificial Sequence
  derived and/or modified sequence
aaagtcggacgtgagcacgggcgaaggcgtcagccggggccacacgggagtcactgaccacagccaggcgagagccggctttccggtgccgccacattccgggcaccaggctccgggctcttcagagcatttggggcgggcgacggaggtcccgtccactctcgcttgggtgcagaagggcgcggcggtgccaggaagccgccttggaggctccaagattagctcactcagcgcggccaagcgcaggtgcgggggccctcgccgccaccctgcttatctggggacagtcccggaacccggtgacccggctccgccccaacccgcgccctcgtccacccgcagcagccaaggcctcttccccggccccgggagcccgcgccacgcccgtcgctcgcgcgttccagtccaggctacagcagaaactcagcattaccagtaactgggtagtggaacgcatccatcttcgtcgtttactccttctccaggggctctccagcctgcattccatggccaacagcagtgcagctgcagaagcacttctggaagcctcctgacttgaactagaccttggacaccctctccagagcccagcaattgtgagggactgatggagaagtatgtggctgctatggtgctgagtgcagctggagatgccctggggtactacaatgggaagtgggagttcctccaggatggggagaagatacaccggcagttggcccagctgggcggcttggatgccctagacgtgggaaggtggagagttagtgacgacacagtgatgcacttggccacagcagaagctcttgtggaagctgggaaagcccctaagttgactcaactgtattacctccttgctaagcattaccaagactgcatggaagacatggatgggcgggcaccaggtggtgcctcggtgcacaacgccatgcagctgaagccgggcaagcccaatggctggaggattcccttcaacagccatga

SEQ ID NO: 110759 - DNA, 1074 bp, Artificial Sequence
  derived and/or modified sequence
atggagaagtacgtggccgctatggtcctaagcgctgctggcgacgccctgggatactataatggcaaatgggagttcctccaggatggggagaagatccacagacagctcgcccagttgggggggttagatgcactggatgttggcaggtggcgggtctctgacgacacggtgatgcatcttgccactgctgaggcccttgtcgaggcgggcaaagcgccaaaactgacgcagctctattatctgcttgcgaaacattaccaggattgcatggaagatatggatggcagggctcctggcggtgctagtgtgcacaatgctatgcagctcaagccaggcaaacccaatgggtggcgcatacctttcaatagtcatgagggagggtgtggagctgccatgagagcaatgtgtattgggttacgttttccacatcatagccagctggatacacttatacaggtttctatcgaatctgggcggatgacacaccatcaccccactgggtatctgggggctctggcctcagcactctttacagcctacgccgttaattcccggccacctctgcagtggggtaaggggctgatggagttgctgcccgaagccaagaagtacattgtccaaagcggctatttcgtggaggagaatctgcagcactggtcttacttccaaacaaaatgggaaaactatcttaagctgcgtggcatcctcgatggcgaatcggcacccacatttccggagtcctttggcgtgaaagaaagagatcagttctacacttcattgagctattccggctggggaggatcttctggacacgacgcccctatgattgcctacgatgccgttcttgccgcgggcgactcatggaaggagctggctcaccgcgcctttttccatggaggcgactccgattctacagcggcaattgccggttgttggtggggcgtgatgtacggcttcaaaggggtgtcaccatctaactatgaaaagctggaataccgcaacaggctcgaagagacggctcgggcgctctactccctgggctcaaaagaagatacagtgatctccctgtag

SEQ ID NO: 110760 - DNA, 1074 bp, Artificial Sequence
  derived and/or modified sequence
atggaaaagtatgtggctgctatggtgctgtctgctgcaggcgacgctctcgggtactacaacggaaagtgggagtttttgcaagacggagaaaaaatccaccgccagttggcccaattgggggggctggacgccttagacgtgggtcggtggagagtatcggacgacacagtaatgcaccttgccacagccgaggcgttggtggaggcagggaaagcacccaaactgactcagctgtactaccttctcgccaagcattaccaagactgcatggaagacatggatggcagggcgcctgggggagcctccgtgcataacgctatgcagctgaagccaggaaagccgaatggctggcgaataccctttaactctcacgaaggaggctgtggcgctgccatgcgagccatgtgcatcgggttgcgctttccccatcatagtcagcttgacacattgattcaggtcagcatcgagtcagggcgcatgacacaccaccaccccactgggtacctcggagccttagcatccgcgctctttaccgcatacgccgttaacagtagacctccattgcagtggggcaaaggcctcatggaactgctccctgaagcaaagaagtatattgttcagtccggctacttcgtggaagagaacctgcagcactggtcatacttccagactaaatgggagaattacctcaaactcaggggtattctggacggggagagtgcccccactttccctgagagctttggcgttaaggagcgcgaccaattctacacaagcctgtcctatagtgggtgggggggatcctcgggccacgacgccccgatgatcgcttacgacgccgttttggcagccggcgattcctggaaagaattggcacatcgggcattcttccacgggggcgattcagattcaactgctgccattgccggctgctggtggggcgttatgtatggctttaagggagtaagccccagcaactacgagaagttggagtaccgcaaccggctggaagagaccgcccgcgccctctacagcttaggctcaaaggaagacacggttatttcattatag

SEQ ID NO: 110761 - DNA, 1074 bp, Artificial Sequence
  derived and/or modified sequence
atggaaaaatatgtggccgccatggtgcttagtgctgctggcgatgccttggggtactataacggcaagtgggaattccttcaggatggcgagaaaatccaccgacagctagcacagctgggcggcttggacgcccttgatgtaggcagatggagagttagcgatgacactgtcatgcatctggccacagcagaagctctggttgaggccgggaaagccccaaagcttacgcaattgtattaccttctggctaaacactaccaggactgcatggaggatatggacgggagagcgccaggtggggcttccgtgcataacgcgatgcagctaaagcccggtaaaccgaatgggtggaggataccatttaactcccatgaggggggatgtggagccgccatgagggccatgtgcataggcctgagatttcctcaccactctcaattagacacacttatccaggtgtccatagagagcggaagaatgacacaccaccacccgacagggtacctcggggcacttgcttctgcgttatttacagcatacgccgtcaatagcaggcccccactgcagtggggcaagggactgatggagctgctgcccgaagcgaagaaatacattgtacagagtggatatttcgttgaggaaaatttacagcactggtcatactttcaaaccaagtgggagaactacctcaagcttcgcggtatcctcgacggcgagtccgcccctactttccccgaatcttttggagtgaaggagagagaccagttttatacaagtctgagctatagcggctgggggggctcctctggccacgacgcgcctatgatcgcatacgatgccgttctcgctgccggcgattcctggaaggagctggcacacagggccttcttccacggaggcgactctgactctaccgccgcaattgccggctgttggtggggcgtcatgtacggatttaaaggcgttagccccagcaattacgagaagcttgaatacagaaaccgactcgaggaaaccgcacgggctctgtatagcctcgggtcaaaggaggatacagtcatttccctctag

SEQ ID NO: 110762 - DNA, 1074 bp, Artificial Sequence
  derived and/or modified sequence
atggagaaatacgtcgctgccatggtcctttccgccgcaggtgatgccctggggtactacaacggaaaatgggagtttctgcaggacggcgaaaaaattcatcggcaactcgcccaactaggcggcctggatgccctggacgtgggccggtggagggtctcagacgacaccgtgatgcacttggctacagctgaggcccttgtagaggcaggcaaagcacccaagctaacacagttgtactatctgctcgcaaagcattaccaggattgcatggaagatatggatggccgggctccgggcggggctagcgtgcacaacgctatgcagttgaagcccggcaagcccaatgggtggcggatacctttcaacagccacgagggcggctgtggcgctgcgatgagagcaatgtgcattggccttagattcccccaccattcccaactcgatacccttatacaggtcagtattgagtccgggaggatgacacaccaccacccaactggatacctgggcgcactcgcatcagccctttttacagcatacgccgtcaattccagacccccattacagtggggtaagggactgatggagctgctgcccgaagccaagaagtatatagttcaaagcggctacttcgtcgaggagaatcttcagcattggtcatattttcaaactaaatgggaaaactatctcaagctgcggggcattttagacggcgaaagcgcacccacctttcccgaatcattcggagtcaaggagcgggaccagttctacacaagtctaagttactcggggtggggcggctcctctggtcacgatgctccaatgatcgcttacgacgccgtgctggcagcaggcgattcttggaaggaactggcccatcgcgctttctttcacggtggcgactctgacagtacagctgcgattgccggctgctggtggggcgtgatgtatggtttcaaaggggtttcgccttcaaactacgagaaactggagtaccgcaatcggctggaagaaacagcacgcgccttgtactcccttggctcgaaggaagacacagtaatatcgctttag

SEQ ID NO: 110763 - DNA, 378 bp, Artificial Sequence
  derived and/or modified sequence
atggagaaatacgtggctgcaatggtgctgtctgccgcaggagacgccttaggctattataatggtaaatgggagttcctgcaggacggcgaaaaaattcaccggcagctcgcgcagctggggggcttggatgccctcgacgttggcaggtggcgtgtctcagacgataccgttatgcacctcgctactgcagaagccttggtggaggcaggtaaagcccccaagcttacacagttatactacttactcgccaagcattaccaagattgcatggaagatatggatgggcgggctcctgggggggcatctgtccacaacgcgatgcagctgaagcctgggaaacccaacgggtggcggattccattcaactcacattag

SEQ ID NO: 110764 - DNA, 1074 bp, Artificial Sequence
  derived and/or modified sequence
atggagaagtatgtggccgccatggtgctgtctgctgctggagatgccctgggctactacaacgggaagtgggagttcctgcaggatggagagaagatccaccggcagctggcccagctgggcggcctggatgccctggatgtgggccgctggagggtgtctgatgacacagtgatgcacctggccacagctgaggccctggtggaggccggcaaggcccccaagctgacccagctgtactacctgctggccaagcactaccaggactgcatggaggacatggatggccgggcccctggaggagcctctgtgcacaatgccatgcagctgaagccaggcaagcccaacggctggaggatccccttcaacagccatgaaggaggctgtggggccgccatgagggccatgtgcatcggcctgcgcttcccccaccacagccagctggacaccctcatccaggtgtccattgagagcggccgcatgacccaccaccaccccaccggctacctgggcgccctggccagcgccctcttcaccgcctatgctgtgaacagcaggcctcccctgcagtggggcaagggcctgatggagctgctgcctgaggccaagaagtacatcgtgcagagcggctactttgtggaggagaacctgcagcactggagctacttccagaccaagtgggagaactacctgaagctgcggggcatcctggatggagagagcgcccccaccttccctgagagctttggagtgaaggagcgggaccagttctacaccagcctgagctacagcggctggggcggcagcagcggccatgatgcccccatgattgcctatgatgctgtgctggccgccggggacagctggaaggagctggcccaccgggccttcttccatggaggagacagcgacagcacagctgccatcgccggctgctggtggggcgtgatgtatggcttcaagggcgtgagccccagcaactatgagaagctggagtacagaaaccggctggaggagacagcccgggccctgtacagcctgggcagcaaagaagatactgtcatcagcctgtag

SEQ ID NO: 110765 - DNA, 378 bp, Artificial Sequence
  derived and/or modified sequence
atggagaagtatgtggccgccatggtgctgtctgctgctggagatgccctgggctactacaacgggaagtgggagttcctgcaggatggagagaagatccaccggcagctggcccagctgggcggcctggatgccctggatgtgggccgctggagggtgtctgatgacacagtgatgcacctggccacagctgaggccctggtggaggccggcaaggcccccaagctgacccagctgtactacctgctggccaagcactaccaggactgcatggaggacatggatggccgggcccctggaggagcctctgtgcacaatgccatgcagctgaagccaggcaagcccaacggctggaggatccccttcaacagccactag

SEQ ID NO: 110766 - DNA, 1074 bp, Artificial Sequence
  derived and/or modified sequence
atggagaagtacgtggccgccatggtgctgagcgccgccggcgacgctctcggctattataatggaaaatgggagttcctacaggacggtgagaaaattcatagacagctggcccaactcggaggactcgacgccctggatgtaggtcgttggagagtcagcgatgacactgttatgcatctggccaccgccgaagccctggttgaggctggcaaggcaccaaaacttactcagttatattacctgttagcaaagcactatcaggattgtatggaggatatggacggcagggctccaggtggagcatcagtgcataatgccatgcaactgaagccaggaaagccaaacgggtggaggatcccctttaacagtcatgagggaggttgcggagcagccatgcgagctatgtgcatcggacttagattcccacaccattcgcagctggacactcttattcaagtgtccattgagtcggggcgcatgacacatcaccacccaaccggctatctaggtgccctggcatctgccttattcacagcctatgccgttaattctagacctcctctccagtggggcaaaggattgatggaactgctgccagaggccaagaagtatatcgtccaaagtggttacttcgtggaagagaatctacagcattggtcctatttccagaccaaatgggaaaattatctgaagctacggggcatccttgatggcgagtccgcccccaccttcccagaatcattcggagtcaaagagagagatcagttctatactagtctttcctactcaggctggggtggcagtagcggccatgatgctcctatgatcgcctacgatgccgtcctagcagcaggagacagttggaaagaactggctcaccgcgcattttttcacggcggggatagcgattccactgctgccatcgccgggtgctggtggggcgtaatgtatggatttaagggagtgtccccatctaactatgagaagctggaatatagaaacagactggaggagactgccagagccctctactcgctaggctcgaaagaggacacggtgattagtctgtag

SEQ ID NO: 110767 - DNA, 1074 bp, Artificial Sequence
  derived and/or modified sequence
atggagaagtacgtggccgccatggtgctgagcgccgccggcgacgctctgggctattacaatggaaaatgggagttcctccaagacggagagaaaattcatagacagttagcccagctaggaggccttgacgcactcgatgttgggcggtggagggtgtccgatgatactgtgatgcatctcgctacagcagaggccttagtggaagctggcaaagcaccaaagctcacacagctctactaccttctggcaaagcactatcaagattgcatggaagatatggacggtcgggctcccggcggggcttctgttcacaacgctatgcaactgaagcctgggaagccaaacggctggcgtatcccttttaactcacacgaaggtggatgcggggccgccatgcgagctatgtgcatcggcttgcgctttccacaccatagccagttagacaccctgatccaggtgtcgatcgagtcgggccggatgactcaccatcatcccacaggctacctcggtgccctggccagtgccctgtttactgcttatgccgtaaactcccggcctccattgcagtggggcaaggggctcatggaactgctgccggaggccaagaagtatattgtgcagtccggttatttcgtggaggaaaacttacagcactggtcgtacttccagactaaatgggagaattacctgaaattgaggggaatactggatggggagagcgccccaacattccctgagtctttcggcgtgaaagagcgggatcagttttacacatctctgtcctatagcgggtggggaggttccagtggtcacgacgccccaatgattgcctacgacgccgtgctggctgccggggacagctggaaagagttagcccatcgcgcttttttccatgggggcgacagtgacagtacagcagccatcgcaggatgctggtggggggtaatgtacggctttaaaggcgtctcaccttccaattatgaaaaactggaatataggaatagactggaagaaacagccagagcactgtattccctaggttctaaagaggatactgtaatttctttatag

SEQ ID NO: 110768 - DNA, 1074 bp, Artificial Sequence
  derived and/or modified sequence
atggagaagtacgtggccgccatggtgctgagcgccgccggcgacgccctgggctactacaatggcaaatgggaatttcttcaggatggcgagaagatacaccggcaattggctcagctggggggcctcgatgctttggatgtgggcaggtggcgagtctcggacgacactgtaatgcacctggccacagctgaagccctggtcgaagccggaaaggcaccgaagctgacacagctgtactacctgctcgccaaacactatcaggattgcatggaggacatggacggacgcgctcccggcggagcctccgtccacaatgcaatgcagttgaagccaggcaaacctaacggctggagaatccccttcaacagccacgagggcggatgcggagccgcaatgagagccatgtgcatcggtttgcgattccctcaccactcacagctcgatactctgattcaggtctccattgagtcaggcagaatgacacaccatcaccctacaggatatctcggcgcccttgcgtccgctctgtttaccgcttacgccgtcaattcacggccccccctccagtgggggaaggggctgatggaactgttacctgaggcgaagaagtatatcgtgcagagtggctactttgttgaagaaaacttgcagcactggtcatatttccagaccaagtgggagaattatctcaagctgcggggcattctcgacggagaaagtgctccgactttccccgagagctttggggtcaaagagcgagaccagttctacacaagtttgtcttattcaggctggggaggcagcagcggacacgacgcgccaatgatcgcttacgacgcagtattagcggcgggcgattcctggaaagagctcgctcaccgagcattcttccacggcggcgacagcgattctactgccgctatcgccgggtgctggtggggtgtaatgtacgggttcaagggcgtgagtccatccaattatgaaaagctggaatatcgcaaccgtctggaagagacggctcgggctctctattcgttgggaagtaaggaggacaccgtgatctccctttag

SEQ ID NO: 110769 - DNA, 1074 bp, Artificial Sequence
  derived and/or modified sequence
atggagaagtacgtggccgccatggtgctgagcgccgccggcgacgctttagggtactataacggcaaatgggagttcctgcaggatggagagaaaattcaccgccaacttgcacagctagggggactggacgctctcgatgttggcagatggcgtgtgagcgatgatactgtgatgcatttggccaccgccgaggcactggtcgaagctgggaaggcccctaaactcacccagctgtactacttgctggctaaacactaccaggattgcatggaggacatggacgggagagccccagggggagcgtctgtgcataacgcgatgcaactcaaacctggcaagcctaacggatggcgaatcccttttaattcacatgagggcggctgcggggcagcaatgcgggctatgtgtattggattaaggtttcctcaccacagccagttggatactctgattcaggtgagcatagagagtgggcgaatgactcatcaccacccaactgggtacctgggtgctctcgcatctgcactcttcacagcatatgccgtgaattcaaggccgcccttacagtggggaaaggggctgatggagctgctaccggaggctaaaaaatatattgtgcaaagtggatatttcgtggaggagaatcttcagcattggagctatttccagaccaagtgggaaaactatcttaagttgcggggcatcttagacggagaaagcgctcccaccttcccagagagctttggtgtgaaggagcgcgatcagttctacacctcattaagctatagcgggtggggtggcagctccggccacgatgcaccgatgatcgcctacgatgccgtcctggctgccggggactcatggaaggagcttgcgcaccgcgcattctttcacgggggcgattctgatagcaccgcagctattgcgggatgctggtggggcgtcatgtacggcttcaagggggtgagcccttcaaactacgagaaactcgagtatcggaacagactggaagaaaccgcaagggcgttatattctctgggcagtaaagaagacacagtcatctcactctag

SEQ ID NO: 110770 - DNA, 378 bp, Artificial Sequence
  derived and/or modified sequence
atggagaagtacgtggccgccatggtgctgagcgccgccggcgacgctcttggctattataacgggaaatgggaattcttgcaagacggagagaagattcaccgtcagctagcccagctagggggcctcgatgccctcgacgtgggcaggtggcgggtcagcgatgataccgtgatgcatctggcaacggctgaggctctggtggaggcaggtaaagcccctaagcttacacagctctattatctcctagccaagcactatcaggattgtatggaagacatggatggcagggccccaggcggcgctagcgtgcacaatgcgatgcaactcaagccggggaagccaaacggctggaggattcctttcaactcacactag

SEQ ID NO: 110771 - DNA, 1074 bp, Artificial Sequence
  derived and/or modified sequence
atggagaagtacgtggccgctatggtgctgtctgctgctggagatgccctgggctattataatgggaaatgggaattcctgcaggacggcgagaagattcaccgccaattggcccagttgggaggattggatgcattggatgtagggcgatggcgtgtgagtgacgacaccgtgatgcaccttgcgaccgcggaggcactggtggaagctggcaaggctcccaagcttactcagttgtattacctactggccaagcactatcaagattgcatggaggacatggacggacgggctcctggtggtgccagtgtgcataacgctatgcaattgaagcctggcaaaccaaacggttggaggattcctttcaattcccacgaagggggatgtggggcagccatgagggctatgtgcatagggctgcgcttccctcaccacagccagttggacaccctgatccaagtttccatagagagcggacggatgacccaccaccacccaacgggatatctgggggcactggctagcgccctcttcaccgcatatgccgtcaatagcaggccgccattgcagtggggcaagggactcatggaactgctccctgaggccaaaaagtacattgtgcagtccggctatttcgttgaggagaacctgcagcattggtcttacttccagaccaagtgggagaactatctcaagttgagaggaatcctggacggggagtctgcccctacattccccgagagtttcggggtgaaggaaagagatcagttctacaccagtctgtcctactctggatggggagggtcttcgggccatgatgccccaatgatagcctatgatgccgttcttgcagcaggggattcatggaaggaattagcccacagggccttctttcatgggggtgatagtgatagtacggcggctatcgctgggtgttggtggggcgttatgtatggattcaaaggtgtatccccatctaattacgagaagctggagtataggaacaggttggaagaaactgccagggccctctattcactgggcagcaaggaggacacggtgatctctttgtag

SEQ ID NO: 110772 - DNA, 1074 bp, Artificial Sequence
  derived and/or modified sequence
atggaaaagtatgtggctgccatggtgttgagcgcagccggtgatgccctcggctactataatggaaagtgggaatttctgcaggacggcgaaaagatccacagacagctggctcagctgggtggattggacgcactggatgtgggcaggtggagagtgagtgatgacaccgtaatgcacctcgccaccgcagaggcccttgttgaggctgggaaggccccaaaattgactcaattatattatctcctggcaaagcactaccaggactgtatggaagacatggacgggagggcgccaggcggtgccagcgtgcataacgcaatgcaactgaaacctggtaagcccaatggctggagaatcccttttaactcacatgaaggcggttgcggggctgcgatgcgagcgatgtgcatcggtcttcggttcccacatcactcgcagcttgacacgctgattcaagtgtccatagaaagtggcagaatgacccaccaccatcctacggggtatctaggcgcacttgccagcgcacttttcacagcttatgccgtcaatagtaggccgcctttacagtggggtaaagggctaatggaactgctccccgaggccaagaaatacattgtacagtctgggtatttcgttgaggagaacctgcagcattggtcttactttcagacgaagtgggaaaactacctgaaactgcggggaattcttgatggcgagagtgcgccaacctttcctgagtcattcggggtcaaggagcgagaccagttctacaccagcctgagctattcaggatggggcggaagctccggacatgatgcccctatgattgcctacgacgccgttctcgccgcaggggacagttggaaggaactagcccaccgggcttttttccatggcggagattccgatagtactgctgccatcgcgggatgctggtggggagtaatgtacggcttcaagggagtttccccgagtaattatgaaaagctggaatatcgtaaccgactggaggagaccgctcgcgctttatatagcctcgggtccaaggaggacaccgtaatctccttgtag

SEQ ID NO: 110773 - DNA, 1074 bp, Artificial Sequence
  derived and/or modified sequence
atggaaaaatacgttgcagccatggtgctgagcgccgcaggggacgccctcggatattataatgggaagtgggaatttcttcaggatggcgaaaagatccatcgacagctggcccagctcggaggtctagatgctttagatgtgggacgctggagagtctccgacgataccgtcatgcatctggctacagccgaagcgcttgtcgaggccggtaaagcacctaagctgacacagttatactaccttttggctaagcattaccaggattgtatggaagacatggatggtcgggctcctggtggagccagcgtgcacaatgccatgcagcttaagccaggaaagcccaatggttggcggattccttttaactctcatgaggggggatgcggcgcagccatgcgtgcaatgtgtatagggttgcggttcccccaccactcgcagttggacacactgatccaggtgagtatcgaaagtggacggatgacccatcaccacccaacagggtacctcggggctctggccagcgccctgttcactgcttatgccgtcaattctaggccccctttacagtggggtaagggactcatggagttgctccccgaggccaaaaagtacatcgtgcagtccgggtactttgtcgaggaaaacctgcaacactggtcatactttcaaactaagtgggagaattacctgaagttgcgaggaatcttggacggagagtcagccccaacttttcctgagtctttcggcgtgaaggagagggatcagttctacacctctctgtcctactctggttggggtggaagtagcggacacgatgctcccatgatcgcatatgacgcagtacttgctgccggagatagttggaaggaattggcacatcgagccttcttccacggtggtgatagtgattctacagctgcgatagctggttgttggtggggggtcatgtatggattcaaaggtgtcagcccgagtaactacgagaagcttgagtatcgtaatcggctcgaagaaaccgctcgcgcactgtactcgcttggttcaaaggaagataccgtgattagcttgtag

SEQ ID NO: 110774 - DNA, 1074 bp, Artificial Sequence
  derived and/or modified sequence
atggagaagtacgtcgctgcgatggtcctcagcgctgcaggagatgccctcggatactacaacgggaaatgggaatttctgcaggacggcgaaaagattcacaggcaattggcgcagttggggggactcgatgcgttggacgttggtcggtggcgcgttagcgacgacaccgtaatgcatctggctacagctgaagccctggtagaagctggaaaggcacccaagctgactcagctgtattatctcctggcgaaacactaccaagattgtatggaagacatggacggtagagctcccggaggtgcttctgtgcataatgccatgcagctcaaacccggaaagccgaatgggtggcggattcctttcaactcccacgaaggtgggtgcggcgctgccatgagagcgatgtgtatcgggttgcggtttccacatcattctcagttggacacactgattcaggtaagcattgaaagtgggcgaatgacgcatcaccacccaacgggctacctcggagcactggcctcagcactatttactgcatacgcggtgaacagccggccacccctccaatggggaaagggcttgatggagctgcttccagaagccaaaaaatatattgtgcagagtgggtatttcgtggaggagaacctccagcactggagttatttccagaccaagtgggagaattaccttaagctgaggggaatcctggacggagaatctgcccctacattccccgagtcctttggagtaaaagagcgcgaccagttctataccagtttatcctatagcggctggggcggttcctccggacacgatgcccctatgatcgcttatgacgcagttctggctgccggagacagttggaaagaattggctcatagagcatttttccatggcggtgacagcgattctacagccgctatagccggttgctggtggggagtgatgtacggatttaagggtgtttcgcctagcaactacgagaagctcgagtatcgtaacaggttggaggagaccgcccgagcgttgtatagcttgggttccaaggaagatacagttataagcctgtag

SEQ ID NO: 110775 - DNA, 378 bp, Artificial Sequence
  derived and/or modified sequence
atggagaagtatgtggctgcaatggtgctgtcagcagctggcgatgcactcggatattataacggaaagtgggaatttcttcaagacggtgagaaaatccatcgtcagctggcacagctggggggattggatgccctagacgtcggcaggtggcgagtttctgatgacacagttatgcacctggctacagctgaagctttagtggaggctggcaaggcgccaaagctcactcagctttattatctgctggccaaacactaccaggactgtatggaagacatggacggcagagctccaggtggggcatcagttcacaatgccatgcaactcaaaccagggaaaccgaacggctggcggataccctttaacagccactag

SEQ ID NO: 110776 - protein, 551 aa, Artificial Sequence
  derived and/or modified sequence
MFGKMFFVFCQESGYDTILRVLGSNVREFLQNLDALHDHLATIYPGMRAPSFRCTDAEKGKGLILHYYSEREGLQDIVIGIIKTVAQQIHGTEIDMKVIQQRNEECDHTQFLIEEKESKEEDFYEDLDRFEENGTQESRISPYTFCKAFPFHIIFDRDLVVTQCGNAIYRVLPQLQPGNCSLLSVFSLVRPHIDISFHGILSHINTVFVLRSKEGLLDVEKLECEDELTGTEISCLRLKGQMIYLPEADSILFLCSPSVMNLDDLTRRGLYLSDIPLHDATRDLVLLGEQFREEYKLTQELEILTDRLQLTLRALEDEKKKTDTLLYSVLPPSVANELRHKRPVPAKRYDNVTILFSGIVGFNAFCSKHASGEGAMKIVNLLNDLYTRFDTLTDSRKNPFVYKVETVGDKYMTVSGLPEPCIHHARSICHLALDMMEIAGQVQVDGESVQITIGIHTGEVVTGVIGQRMPRYCLFGNTVNLTSRTETTGEKGKINVSEYTYRCLMSPENSDPQFHLEHRGPVSMKGKKEPMQVWFLSRKNTGTEETKQDDD

SEQ ID NO: 110777 - protein, 599 aa, Artificial Sequence
  derived and/or modified sequence
MLMCFIKEAQLDEEGQFLVRIIYDDSKTYDLVAAASKVLNLNAGEILQMFGKMFFVFCQESGYDTILRVLGSNVREFLQNLDALHDHLATIYPGMRAPSFRCTDAEKGKGLILHYYSEREGLQDIVIGIIKTVAQQIHGTEIDMKVIQQRNEECDHTQFLIEEKESKEEDFYEDLDRFEENGTQESRISPYTFCKAFPFHIIFDRDLVVTQCGNAIYRVLPQLQPGNCSLLSVFSLVRPHIDISFHGILSHINTVFVLRSKEGLLDVEKLECEDELTGTEISCLRLKGQMIYLPEADSILFLCSPSVMNLDDLTRRGLYLSDIPLHDATRDLVLLGEQFREEYKLTQELEILTDRLQLTLRALEDEKKKTDTLLYSVLPPSVANELRHKRPVPAKRYDNVTILFSGIVGFNAFCSKHASGEGAMKIVNLLNDLYTRFDTLTDSRKNPFVYKVETVGDKYMTVSGLPEPCIHHARSICHLALDMMEIAGQVQVDGESVQITIGIHTGEVVTGVIGQRMPRYCLFGNTVNLTSRTETTGEKGKINVSEYTYRCLMSPENSDPQFHLEHRGPVSMKGKKEPMQVWFLSRKNTGTEETKQDDD

SEQ ID NO: 110778 - DNA, 1656 bp, Artificial Sequence
  derived and/or modified sequence
atgtttggcaagatgttttttgtcttttgtcaggaatccggatatgacacgattctgagagtcctcggatctaatgtgcgggaatttctgcagaacctggacgccttgcacgatcacctcgccacgatttaccctgggatgcgggcgccatctttcaggtgtactgacgctgagaaggggaagggcttaattctacattactacagcgagcgggagggcctccaagatattgtgataggtatcatcaagactgtggcacagcaaattcacggaaccgaaatcgacatgaaagtgattcagcagcggaacgaagagtgcgaccatacgcaattcctcatcgaggagaaagagtccaaggaagaagacttctatgaagatctggaccggtttgaagagaatggaactcaggagagtcggatttcgccatacacattctgtaaggctttcccatttcacatcatattcgacagagatctggtggtgacgcagtgcggcaatgccatctaccgggtgttaccccaacttcagccaggtaattgttcactgcttagtgtattttcgcttgtgaggccgcatattgatattagtttccatggtattctgtcacacataaatacagtttttgtgcttcgctcgaaggagggtcttctcgacgtagagaaattggaatgtgaggatgagctgactggaaccgaaatatcatgtctgagactgaaaggccagatgatctatctaccagaggccgactcaattttgttcctgtgcagcccgagcgtgatgaacctcgacgatcttactcgaagagggctgtacctctcagatataccactgcacgacgccacacgtgacctcgtgctcctaggcgaacagttcagggaggagtataagctcactcaggaactggagattctgactgatagactccagcttacactgcgggcattggaagacgaaaagaaaaagacggatacattgttgtactccgtgctccccccttccgttgccaatgaacttcgacacaagcggcctgttcctgccaagcgctatgacaatgttaccattctgttctcaggcatcgtgggcttcaacgccttttgcagcaagcacgctagcggcgaaggggcaatgaagattgttaatttgctgaatgacttatacactaggttcgatactctcacagattcaagaaagaatcccttcgtttacaaagtggaaacggtcggcgataagtatatgaccgtgagtggtctaccagagccgtgcatccaccacgcacggtccatctgtcacctggcgctggacatgatggagattgcggggcaggtccaagtggatggcgaaagcgtccagatcacaattgggatccataccggagaggtcgtgacaggcgtgattggacagagaatgcctcggtattgtttgttcggcaacactgtgaatctaacctctagaactgagactacaggagaaaaaggcaaaattaacgtctccgagtatacttatagatgtctcatgtccccagaaaacagtgacccccagttccatctcgagcaccgcggacctgtgtcaatgaaagggaaaaaagaaccaatgcaagtgtggttcctttccaggaagaataccggcaccgaggagactaaacaggatgacgactag

SEQ ID NO: 110779 - DNA, 1800 bp, Artificial Sequence
  derived and/or modified sequence
atgctaatgtgtttcataaaggaggcccaactagatgaggaggggcagttcctggttcggatcatttacgacgactccaaaacatacgatttggtcgcagcagccagcaaagttctgaacctgaacgctggagagattcttcagatgttcgggaagatgttttttgtcttctgccaggagagtggctatgataccattctgagggttctaggcagtaacgtgcgcgaatttctgcagaatctggatgcccttcacgatcatctcgcgaccatataccccggtatgcgcgccccttcatttagatgcactgacgctgaaaaagggaaaggactcattctgcactactattctgagcgggagggcctgcaggatatagtcattggtataatcaaaacagtcgcgcagcagattcatggaactgagattgacatgaaagtgatccaacagagaaacgaagagtgcgaccatacccagttccttatcgaggaaaaagagagcaaggaggaggatttctacgaagaccttgacagatttgaggaaaatggcactcaggagtcccgaataagtccatatacattctgcaaagccttcccctttcacataatattcgatagagacctggtagtgacacaatgtggaaatgctatttatcgggtgttgccacaactgcagcctggcaactgcagcttactttccgtcttttcattggtgcgaccccacatagatatttcctttcacggaatcctgagccatattaatactgtcttcgttcttcggtcaaaagaaggactgctggatgtggaaaaactcgagtgtgaagatgagctgacaggcactgaaataagctgcttaaggctaaagggccaaatgatctatctcccggaggctgactctattctatttctctgctcacctagcgtaatgaatctcgacgacctgacaagaagggggctctatctttctgacatccctttgcacgacgccactagggacctggttctactaggtgaacagtttagggaggaatataagttgactcaggagttggaaattctcaccgaccggcttcaactgaccctgcgagcgcttgaagacgagaaaaagaagactgacacattactgtactccgtactcccgccttctgtagccaatgagttgaggcacaagcggccggtaccagcaaaacgatacgacaacgtcactatactgttctcgggcattgtcggcttcaatgcattttgttcaaagcacgcctcaggcgagggtgccatgaagatcgtgaatctcctcaacgacctctacacacgttttgatacgctgacagattctcgaaagaatccgtttgtgtataaggtggagactgtaggcgataagtatatgactgtctccggcctaccagaaccatgtatccatcacgctcggtcaatttgtcatctcgcactggatatgatggagatagccggccaggtccaggtggatggggagtcagtgcagataaccatcggaatccatactggagaagtcgtgacaggcgttattggccagcgaatgccaaggtactgtttgttcggaaatacagtgaaccttacatcccggacagaaaccaccggcgagaaggggaagataaatgtgagtgagtatacatatcgatgccttatgagcccggaaaacagcgacccccagtttcatctggaacaccggggaccagtctcaatgaaaggcaagaaggagccaatgcaagtgtggttcctgagtcggaagaatacgggcacagaagagacaaaacaggacgatgattag

SEQ ID NO: 110780 - DNA, 1656 bp, Artificial Sequence
  derived and/or modified sequence
atgtttgggaagatgtttttcgtcttctgtcaggagtcaggatatgataccatcttgcgcgtgctgggatccaatgtgcgggaatttttgcaaaacttggatgcattacacgatcacttggcaacaatctatccggggatgcgcgcgcctagtttccgctgcacggatgcggaaaagggaaaaggtttgattctgcactattattccgagcgcgagggcctccaagacattgtcatcggtattatcaaaactgttgcccagcagattcacggcactgaaattgatatgaaggtcatacagcagagaaacgaagaatgtgaccacacccagtttttgatcgaggaaaaggagtccaaagaagaggatttttacgaggaccttgaccggttcgaggagaatgggacacaagaatctcgcattagtccttataccttttgtaaagccttccccttccacattatattcgaccgggatctagtcgttacccagtgtggtaacgctatctaccgtgtattgcctcagctgcaaccaggcaactgtagtctattgtccgtttttagtctcgtccgcccacacatagatattagtttccacgggattctgtcccacataaatactgtgttcgtgctgcggagtaaggagggactgctggacgtcgagaagcttgagtgcgaggatgagctgactggcaccgagataagctgtctacgactgaagggtcaaatgatctatttgcccgaagcagactcaatcctgttcctctgctccccatcagtcatgaacctggatgacctcactcgccgcgggctgtacctcagcgatattcccctgcacgacgctacccgggaccttgtgctgctaggtgagcagttcagggaggagtataaactaacccaggaattagagatcctgaccgacagacttcaactgactctgagagctttggaggacgaaaagaagaaaaccgacaccctgttatattcagtccttccgccatccgttgcaaatgaactgagacacaagagacctgtgccagccaagaggtacgataatgtgaccattctgtttagcggaatcgtaggcttcaacgccttctgcagcaagcatgctagtggcgaaggcgccatgaagattgtgaacctcctgaatgatttatacacccgatttgacaccctcaccgacagccgaaagaatcccttcgtgtacaaagttgaaaccgttggcgacaagtatatgaccgtgtccggcttgcccgaaccgtgtatacatcacgctaggtctatttgtcatctggcattagatatgatggagatcgcggggcaagtacaggtggacggggaatctgtgcagattacgattggaatacataccggggaagtagtgaccggcgtgataggacagcgcatgccaaggtattgtctgttcggtaatacggtgaatctcacatccaggactgagacaacgggggaaaaaggcaaaataaacgtctctgagtacacctacagatgtttaatgagccccgagaactcggatcctcagttccatctggaacaccggggacctgtgtcgatgaaggggaagaaggaaccgatgcaagtgtggttcctgagtcggaagaacactggtactgaagagacaaaacaagacgacgactag

SEQ ID NO: 110781 - DNA, 2316 bp, Artificial Sequence
  derived and/or modified sequence
aatcagggcgggccaaggcggctgttctcgctccagctcgatgctgcctccccggcccggttgcgctgtagccgctgccgcctctgcctgggtcccttcggccgtacctctgcgtgggggctgcctccccggctcccggtgcagacaccatgaaaagaggcacagttagatgaagaaggacagtttcttgtcagaataatatatgatgactccaaaacttatgatttggttgctgctgcaagcaaagtcctcaatctcaatgctggagaaatcctccaaatgtttgggaagatgtttttcgtcttttgccaagaatctggttatgatacaatcttgcgtgtcctgggctctaatgtcagagaatttctacagaaccttgatgctctgcacgaccaccttgctaccatctacccaggaatgcgtgcaccttcctttaggtgcactgatgcagaaaagggcaaaggactcattttgcactactactcagagagagaaggacttcaggatattgtcattggaatcatcaaaacagtggcacaacaaatccatggcactgaaatagacatgaaggttattcagcaaagaaatgaagaatgtgatcatactcaatttttaattgaagaaaaagagtcaaaagaagaggatttttatgaagatcttgacagatttgaagaaaatggtacccaggaatcacgcatcagcccatatacattctgcaaagcttttccttttcatataatatttgaccgggacctagtggtcactcagtgtggcaatgctatatacagagttctcccccagctccagcctgggaattgcagccttctgtctgtcttctcgctggttcgtcctcatattgatattagtttccatgggatcctttctcacatcaatactgtttttgtattgagaagcaaggaaggattgttggatgtggagaaattagaatgtgaggatgaactgactgggactgagatcagctgcttacgtctcaagggtcaaatgatctacttacctgaagcagatagcatactttttctatgttcaccaagtgtcatgaacctggacgatttgacaaggagagggctgtatctaagtgacatccctctgcatgatgccacgcgcgatcttgttcttttgggagaacaatttagagaggaatacaaactcacccaagaactggaaatcctcactgacaggctacagctcacgttaagagccctggaagatgaaaagaaaaagacagacacattgctgtattctgtccttcctccgtctgttgccaatgagctgcggcacaagcgtccagtgcctgccaaaagatatgacaatgtgaccatcctctttagtggcattgtgggcttcaatgctttctgtagcaagcatgcatctggagaaggagccatgaagatcgtcaacctcctcaacgacctctacaccagatttgacacactgactgattcccggaaaaacccatttgtttataaggtggagactgttggtgacaagtatatgacagtgagtggtttaccagagccatgcattcaccatgcacgatccatctgccacctggccttggacatgatggaaattgctggccaggttcaagtagatggtgaatctgttcagataacaatagggatacacactggagaggtagttacaggtgtcataggacagcggatgcctcgatactgtctttttgggaatactgtcaacctcacaagccgaacagaaaccacaggagaaaagggaaaaataaatgtgtctgaatatacatacagatgtcttatgtctccagaaaattcagatccacaattccacttggagcacagaggcccagtgtccatgaagggcaaaaaagaaccaatgcaagtttggtttctatccagaaaaaatacaggaacagaggaaacaaagcaggatgatgactgaatcttggattatggggtgaagaggagtacagactaggttccagttttctcctaacacgtgccaagcccaggagcagttcttccctatggatacagattttcttttgtccttgtccattaccccaagactttcttctagatatatctctcactatccgttattcaaccttagctctgctttctattactttttaggctttagtatattatctaaagtttggcttttgatgtggatgatgtgagcttcatgtgtcttaaaatctactacaagcattacctaacatggtgatctgcaagtagtaggcacccaataaatatttgttgaatttagttaaatgaaactgaacagtgtttggccatgtgtatatttatatcatgttta

SEQ ID NO: 110782 - DNA, 2456 bp, Artificial Sequence
  derived and/or modified sequence
agctcgatgctgcctccccggcccggttgcgctgtagccgctgccgcctctgcctgggtcccttcggccgtacctctgcgtgggggctgcctccccggctcccggtgcagacaccatgtacggatttgtgaatcacgccctggagttgctggtgatccgcaattacggccccgaggtgtgggaagacatcaagagagaagaggtcttggtatgtcgcccaggctgttctcaaattcctgagctcaacggatcctcccacctgggcttcccaaagtgctgggataacaggcatgagccaacctgcccagccagaaaagagagattttaatgcttatgtgctttataaaagaggcacagttagatgaagaaggacagtttcttgtcagaataatatatgatgactccaaaacttatgatttggttgctgctgcaagcaaagtcctcaatctcaatgctggagaaatcctccaaatgtttgggaagatgtttttcgtcttttgccaagaatctggttatgatacaatcttgcgtgtcctgggctctaatgtcagagaatttctacagaaccttgatgctctgcacgaccaccttgctaccatctacccaggaatgcgtgcaccttcctttaggtgcactgatgcagaaaagggcaaaggactcattttgcactactactcagagagagaaggacttcaggatattgtcattggaatcatcaaaacagtggcacaacaaatccatggcactgaaatagacatgaaggttattcagcaaagaaatgaagaatgtgatcatactcaatttttaattgaagaaaaagagtcaaaagaagaggatttttatgaagatcttgacagatttgaagaaaatggtacccaggaatcacgcatcagcccatatacattctgcaaagcttttccttttcatataatatttgaccgggacctagtggtcactcagtgtggcaatgctatatacagagttctcccccagctccagcctgggaattgcagccttctgtctgtcttctcgctggttcgtcctcatattgatattagtttccatgggatcctttctcacatcaatactgtttttgtattgagaagcaaggaaggattgttggatgtggagaaattagaatgtgaggatgaactgactgggactgagatcagctgcttacgtctcaagggtcaaatgatctacttacctgaagcagatagcatactttttctatgttcaccaagtgtcatgaacctggacgatttgacaaggagagggctgtatctaagtgacatccctctgcatgatgccacgcgcgatcttgttcttttgggagaacaatttagagaggaatacaaactcacccaagaactggaaatcctcactgacaggctacagctcacgttaagagccctggaagatgaaaagaaaaagacagacacattgctgtattctgtccttcctccgtctgttgccaatgagctgcggcacaagcgtccagtgcctgccaaaagatatgacaatgtgaccatcctctttagtggcattgtgggcttcaatgctttctgtagcaagcatgcatctggagaaggagccatgaagatcgtcaacctcctcaacgacctctacaccagatttgacacactgactgattcccggaaaaacccatttgtttataaggtggagactgttggtgacaagtatatgacagtgagtggtttaccagagccatgcattcaccatgcacgatccatctgccacctggccttggacatgatggaaattgctggccaggttcaagtagatggtgaatctgttcagataacaatagggatacacactggagaggtagttacaggtgtcataggacagcggatgcctcgatactgtctttttgggaatactgtcaacctcacaagccgaacagaaaccacaggagaaaagggaaaaataaatgtgtctgaatatacatacagatgtcttatgtctccagaaaattcagatccacaattccacttggagcacagaggcccagtgtccatgaagggcaaaaaagaaccaatgcaagtttggtttctatccagaaaaaatacaggaacagaggaaacaaagcaggatgatgactgaatcttggattatggggtgaagaggagtacagactaggttccagttttctcctaacacgtgccaagcccaggagcagttcttccctatggatacagattttcttttgtccttgtccattaccccaagactttcttctagatatatctctcactatccgttattcaaccttagctctgctttctattactttttaggctttagtatattatctaaagtttggcttttgatgtggatgatgtgagcttcatgtgtcttaaaatctactacaagcattacctaacatggtgatctgcaagtagtaggcacccaataaatatttgttgaattta

SEQ ID NO: 110783 - DNA, 1656 bp, Artificial Sequence
  derived and/or modified sequence
atgtttgggaagatgttctttgtgttctgccaggagagcggctatgacaccatcctgcgggtgctgggcagcaatgtgcgggagttcctgcagaacctggatgccctgcatgaccacctggccaccatctacccaggcatgagggcccccagcttccgctgcacagatgctgagaagggcaagggcctcatcctgcactactacagcgagcgggagggcctgcaggacatcgtgattggcatcatcaagacagtggcccagcagatccacggcacagaaattgacatgaaggtgatccagcagagaaatgaagaatgtgaccacacccagttcctgattgaggagaaggagagcaaggaggaggacttctatgaggacctggacagatttgaggagaatggcacccaggagagccgcatcagcccctacaccttctgcaaggccttccccttccacatcatctttgaccgggacctggtggtgacccagtgtggaaatgccatctacagagtgctgccccagctgcagcccggcaactgcagcctgctgagcgtcttcagcctggtgcggccccacatcgacatctccttccacggcatcctgagccacatcaacacagtgtttgtgctgcggagcaaggagggcctgctggatgtggagaagctggagtgtgaagatgagctgactggaacagagatcagctgcctgcggctgaagggccagatgatctacctgcctgaggccgacagcatcctcttcctgtgcagccccagcgtgatgaacctggatgacctgacccggcggggcctgtacctgagtgacatccccctgcatgatgccacccgggacctggtgctgctgggggagcagttccgggaggagtacaagctgacccaggagctggagatcctgacagaccggctgcagctgaccctgcgggccctggaggatgagaagaagaagacagacaccctgctgtacagcgtgctgcccccatctgtggccaatgagctgcggcacaagaggcctgtgcctgccaagagatatgacaacgtgaccatcctcttctctggaattgtgggcttcaatgccttctgcagcaagcacgccagcggggagggcgccatgaagatcgtgaacctgctgaatgacctgtacaccaggtttgacaccctgacagacagcaggaagaacccctttgtgtacaaggtggagaccgtgggggacaagtacatgacagtgtctggcctgcctgagccctgcatccaccacgcccggagcatctgccacctggccctggacatgatggagattgctggccaggtgcaggtggatggagagagcgtgcagatcaccatcggcatccacactggagaggtggtgactggagtgattggccagaggatgccccgctactgcctgtttggaaacacagtgaacctgaccagcaggacagagaccaccggggagaagggcaagatcaacgtgtctgagtacacctaccgctgcctgatgagccctgagaacagcgacccccagttccacctggagcaccggggccctgtgtccatgaagggcaagaaggagcccatgcaggtgtggttcctgagcaggaagaacacaggaacagaggagaccaagcaggatgatgactag

SEQ ID NO: 110784 - DNA, 1800 bp, Artificial Sequence
  derived and/or modified sequence
atgctgatgtgcttcatcaaggaggcccagctggatgaggagggccagttcctggtgcgcatcatctatgatgacagcaagacctatgacctggtggccgccgccagcaaggtgctgaacctgaatgctggggagatcctgcagatgtttgggaagatgttctttgtgttctgccaggagagcggctatgacaccatcctgcgggtgctgggcagcaatgtgcgggagttcctgcagaacctggatgccctgcatgaccacctggccaccatctacccaggcatgagggcccccagcttccgctgcacagatgctgagaagggcaagggcctcatcctgcactactacagcgagcgggagggcctgcaggacatcgtgattggcatcatcaagacagtggcccagcagatccacggcacagaaattgacatgaaggtgatccagcagagaaatgaagaatgtgaccacacccagttcctgattgaggagaaggagagcaaggaggaggacttctatgaggacctggacagatttgaggagaatggcacccaggagagccgcatcagcccctacaccttctgcaaggccttccccttccacatcatctttgaccgggacctggtggtgacccagtgtggaaatgccatctacagagtgctgccccagctgcagcccggcaactgcagcctgctgagcgtcttcagcctggtgcggccccacatcgacatctccttccacggcatcctgagccacatcaacacagtgtttgtgctgcggagcaaggagggcctgctggatgtggagaagctggagtgtgaagatgagctgactggaacagagatcagctgcctgcggctgaagggccagatgatctacctgcctgaggccgacagcatcctcttcctgtgcagccccagcgtgatgaacctggatgacctgacccggcggggcctgtacctgagtgacatccccctgcatgatgccacccgggacctggtgctgctgggggagcagttccgggaggagtacaagctgacccaggagctggagatcctgacagaccggctgcagctgaccctgcgggccctggaggatgagaagaagaagacagacaccctgctgtacagcgtgctgcccccatctgtggccaatgagctgcggcacaagaggcctgtgcctgccaagagatatgacaacgtgaccatcctcttctctggaattgtgggcttcaatgccttctgcagcaagcacgccagcggggagggcgccatgaagatcgtgaacctgctgaatgacctgtacaccaggtttgacaccctgacagacagcaggaagaacccctttgtgtacaaggtggagaccgtgggggacaagtacatgacagtgtctggcctgcctgagccctgcatccaccacgcccggagcatctgccacctggccctggacatgatggagattgctggccaggtgcaggtggatggagagagcgtgcagatcaccatcggcatccacactggagaggtggtgactggagtgattggccagaggatgccccgctactgcctgtttggaaacacagtgaacctgaccagcaggacagagaccaccggggagaagggcaagatcaacgtgtctgagtacacctaccgctgcctgatgagccctgagaacagcgacccccagttccacctggagcaccggggccctgtgtccatgaagggcaagaaggagcccatgcaggtgtggttcctgagcaggaagaacacaggaacagaggagaccaagcaggatgatgactag

SEQ ID NO: 110785 - DNA, 1656 bp, Artificial Sequence
  derived and/or modified sequence
atgttcggcaagatgttcttcgtgttctgccaggagagcggctacgacaccatcctgcgagtactcggctctaatgtgagggaatttctgcagaacctcgacgctctgcacgaccaccttgctacaatttaccctggcatgcgggctccaagcttccgatgcaccgatgccgagaagggaaagggactgatcctgcactattacagtgagagagagggcttgcaagacattgttattggcattatcaaaaccgtcgcgcagcagattcacgggaccgaaatcgatatgaaagtaattcagcagagaaacgaggagtgcgatcacacacagttcctgatagaagaaaaagaatccaaagaggaggacttttacgaggacctcgaccggtttgaagaaaacggaacgcaagaatcccgcatttccccttacaccttctgtaaggcatttccttttcacatcatttttgatagggatctggttgtgacacagtgtggcaacgctatatacagggtgctcccccagttacagccggggaattgcagcttgctgtcggtttttagtctcgtgagaccacatatagacatcagctttcacggaattttaagtcacattaatacagtcttcgttcttaggtccaaggaggggctgctcgatgtggaaaaactggaatgcgaggatgaactaacaggcaccgagatatcttgcctgagactcaaggggcaaatgatatatcttccggaagccgatagcatactattcctatgctccccaagcgtgatgaacttggacgacctgacacgccgcgggctgtacctgtctgacatacctctacatgatgccaccagggacctggttcttctgggcgaacagttcagggaggaatacaagttgacacaggagctggagatcctcactgacagactacagttgaccttgagggcgctcgaggatgaaaaaaagaagacagatacactgttgtactccgtcttgcccccttctgtggccaatgagctccgacataagcggccggtgccagccaagaggtatgataatgtcaccatcctgttttctggaatcgtgggttttaacgctttttgctctaagcacgcctctggcgaaggcgctatgaaaatcgttaacctgctgaatgatctgtatacccggtttgatactctcaccgatagcaggaagaacccatttgtgtataaagtggagacggtgggtgataagtacatgacagtttcgggcctcccagaaccatgcatccaccacgcgcgctctatttgtcatttggcactcgacatgatggagatagcaggtcaggtgcaggtggacggagaaagcgtgcaaattacaatcggaatccataccggcgaagtcgttaccggcgtgatcgggcagagaatgcctagatattgcttgttcgggaacacagtgaacctaacatcacggaccgagacaacaggggaaaaaggcaagatcaacgtctcagagtacacctacaggtgcctcatgtctccagagaattctgatcctcagtttcatctggaacaccggggacctgtttcaatgaaggggaagaaggagccgatgcaggtctggtttttatcacgcaaaaataccgggaccgaggagactaaacaggacgatgattag

SEQ ID NO: 110786 - DNA, 1800 bp, Artificial Sequence
  derived and/or modified sequence
atgctgatgtgcttcatcaaggaggcccagctggacgaggagggccaattccttgtgcgtattatttatgatgattcgaaaacctacgatctggtggcggcagctagcaaagtacttaacctcaacgccggcgagatcctgcagatgttcggcaaaatgtttttcgtgttctgtcaagagagtggatatgacactatcctcagagtcctgggaagtaacgttagagagttcttacagaatctggatgccttgcatgaccacctggctacaatctatcctggaatgcgggcccccagctttaggtgtacagacgcagaaaaaggcaaagggctaattctgcactactactccgaacgggaggggctgcaagatatcgtaattggaatcatcaaaactgtggctcaacagattcacggaacagagatcgacatgaaagtcattcagcagcggaacgaagagtgtgatcacactcagtttctgatcgaagaaaaggagagtaaagaggaagatttctacgaagatctggatagatttgaagaaaacgggacccaggaatctagaatttctccatacaccttctgcaaggcttttcccttccacattatttttgatagagatcttgtcgtaactcagtgtggaaatgccatctatagagtcctgcctcagctacagcccggcaattgtagcctgttgagtgtgttctccctggtgcggccccatattgacatatcctttcacggaatccttagccatattaatacagttttcgtgcttcgctcaaaagaggggctcctggacgtcgaaaagcttgaatgtgaagatgagctgactggcactgaaatctcatgtctgagattgaagggacaaatgatctatcttccagaggcggattccatcctgtttctgtgtagcccatccgtgatgaaccttgatgatttgacgcggcgtggactgtacttgagtgacatccctctccacgatgccacacgagacctcgtcctccttggggaacagtttcgcgaggaatataaactgacccaagagctggagattttgactgatagactccagttgacattgagggctctagaggatgaaaaaaaaaaaaccgacactcttctctatagcgtgctccctcctagcgtggccaacgaactccggcataagcgtcccgtccccgccaaacgatacgacaatgtgaccatactgttctccggtatcgtgggattcaatgctttctgctccaagcacgcctctggggagggggccatgaagatagtgaacctccttaatgacctgtatacaagattcgacactcttaccgattctcgcaagaacccctttgtttacaaagtggagactgttggagacaagtacatgactgtatcggggctgcctgaaccttgcatccaccacgctaggagtatctgccaccttgcattggatatgatggaaatcgccggtcaagtgcaggtagacggggagagcgtccagataacgatcgggatacacacaggcgaggttgtcaccggagtgattggccagcgaatgccacgatattgcctattcggaaatactgttaacctaacaagccgcacagagacaacaggagaaaagggcaagattaatgttagcgaatacacctaccgatgccttatgagccccgaaaacagtgacccccagttccatctcgaacatcggggacctgtgtccatgaaaggaaagaaggagcctatgcaggtgtggttcctgtctagaaagaatacaggaaccgaagagacgaagcaggacgatgattag

SEQ ID NO: 110787 - DNA, 1656 bp, Artificial Sequence
  derived and/or modified sequence
atgttcggcaagatgttcttcgtgttctgccaggagagcggctacgatactattcttcgggtactggggtccaatgtaagagaatttctgcagaaccttgacgctttgcatgatcacctcgccacaatttaccccggcatgagagccccctcctttagatgtacggatgctgaaaagggaaagggcctaatcctgcattattactctgagagagaagggctccaggatattgtgatcgggatcattaaaacagttgcccagcagatccacggcacagagatcgacatgaaagtgatacaacaacgcaacgaagagtgcgatcacactcagttcctgatcgaagaaaaggaaagcaaggaagaggatttttacgaagacctggaccgctttgaggagaacgggactcaagaaagcaggatctccccatacacattttgtaaggcgtttccctttcacatcatcttcgacagagatctggtggtgacacaatgtgggaatgcaatctacagggttctgccgcagctccaacccggcaactgcagcttgctctccgtttttagccttgtgagaccccatatcgacatcagctttcatggaatcctttcacacatcaatacagtctttgtccttcggagcaaggaggggctgctggacgtggagaagttggaatgtgaggatgagctcactgggacggaaattagctgcctgagactcaagggacagatgatttatctgccggaagccgactctatcctcttcttatgctcaccatcagtgatgaacctcgatgatttaacccggcggggcctgtatttgtctgatatccccctacacgacgcgacgagggaccttgttctcttaggagagcagttcagggaagaatataagttgactcaggagctggagatcctaactgacagactgcagttgaccctgcgggccctggaagacgaaaagaaaaagactgacacactcttatacagtgtcctgccccctagtgtggccaacgaactccgccacaagaggcctgtacctgcgaaacggtacgataatgtgacgatcttgttctccggaatcgttggctttaacgccttctgtagcaaacatgccagtggcgagggtgccatgaagatcgtcaatttactaaatgatctgtacacacggttcgatacccttaccgactctcggaagaacccctttgtttataaagtagaaactgtcggggataaatatatgactgtctctggtcttccagaaccttgcatccaccatgccaggtccatctgtcacctggccctggacatgatggagattgctggtcaagtgcaggtcgacggcgagtccgtacagatcactattgggatccacactggggaggttgtcactggagtgatcgggcagaggatgcccagatattgcctttttggaaacaccgtaaacctcaccagtagaaccgagaccaccggcgagaaaggcaaaatcaacgtgagcgaatacacctaccgctgtctcatgtcacctgaaaacagcgacccccagtttcatctggagcaccggggtccggtctcaatgaagggcaaaaaggagcccatgcaggtgtggtttttaagtcgcaagaacacgggtactgaagagaccaagcaagatgatgattag

SEQ ID NO: 110788 - DNA, 1656 bp, Artificial Sequence
  derived and/or modified sequence
atgtttggtaaaatgttttttgtattctgtcaggagtcgggatacgataccatccttcgcgtcctcggctctaatgttagagagttcttacaaaacctggacgcactgcatgaccacctggcaacaatatacccaggaatgagagctcctagctttagatgcaccgacgcagaaaaggggaaaggactcatcctccactactattctgaacgggaaggcctccaggacatcgtcattgggataatcaagaccgtggcccaacagatccacggaactgagatcgacatgaaagttatccagcagagaaatgaggaatgcgaccacactcaatttcttattgaggagaaggagtctaaggaagaggacttctacgaggatctggatcgattcgaagagaacggcacacaggagtcgagaatcagtccatacaccttctgtaaggcatttcctttccacataatctttgacagagacctcgtggttactcagtgtggtaacgctatttatagagtgctgcctcagctccagccgggaaactgttcccttctttccgtcttcagcctcgtccgccctcacatagatattagttttcacgggatcctgtctcacatcaacacggtgtttgtgctgcggtcaaaagaaggactcctggacgtggaaaagctcgagtgtgaagatgagctgacaggcactgagataagctgcctgcgattaaagggccagatgatctacctgccagaggccgattcaattctcttcctgtgctccccttccgtaatgaacctagatgacctgactcgcagaggcttgtacctttccgatattccgctgcatgacgccactcgcgacctcgttctcctaggagagcaatttcgcgaggaatacaagcttacacaggaactggagattctcactgatcgcctccagctcaccctgagagcgctcgaagatgagaaaaagaagacggacaccctgttgtattccgttctgcccccttccgtggccaatgagcttcgacataaacgacctgtgcccgctaaaagatatgataacgtgactatcttatttagtgggatcgtaggattcaatgctttctgctccaagcacgcttcgggggaaggcgcaatgaaaattgtcaatctgctaaatgatctttatacccggttcgataccctgaccgattcaagaaaaaatccttttgtatacaaagttgagaccgtgggggacaagtacatgacagtctccggcctcccagaaccttgcatccaccacgcccgttctatctgccacctagctttagacatgatggagatcgcgggacaggtccaggtcgacggcgagtcagtacagatcacaatcgggatacacaccggcgaagtggttacgggcgtgatcggacagagaatgccaagatattgcttgtttggtaacaccgttaacctcacttccagaacagagaccaccggcgaaaaggggaaaatcaatgtgtcagagtacacatatagatgtctgatgtcacccgagaactcggatccacaatttcacttagagcaccggggtccggtgtctatgaaagggaagaaggagcccatgcaggtctggtttctgtccagaaaaaacacaggaactgaagaaaccaagcaggatgacgattag

SEQ ID NO: 110789 - DNA, 1800 bp, Artificial Sequence
  derived and/or modified sequence
atgctgatgtgttttatcaaagaggcgcagttagatgaggaaggccagttcttagtcagaataatctatgacgactcaaagacatacgatctcgtggccgcagccagtaaggtgctgaatttaaacgccggagagatcctccagatgttcggtaagatgttctttgttttttgtcaggagagcgggtacgatactatcctgagggtgctaggttctaacgtgagagagttcctgcagaacttagatgcattgcatgatcacctcgccactatttaccccggtatgagagctccgagttttcggtgtaccgatgctgagaagggcaagggcctgatcctccactactattccgaacgcgaggggctccaggatatagtaatcgggatcattaagactgtggcccaacaaattcacggcacagagatcgatatgaaagttatccagcagcgcaatgaggagtgcgaccatacccagtttctgatcgaagaaaaagaaagtaaggaggaagatttttacgaggacctggatagatttgaagaaaatggaacacaggagtccaggatcagtccttataccttctgtaaggccttccctttccacataatttttgaccgtgacctggtggtgacccaatgcggaaacgcgatttatcgcgttctgccacagcttcagcccggaaattgctcactccttagcgtgttcagccttgtgcgaccccacatagatatctcctttcatggaattctgagccacataaataccgtgttcgtcttgcggtctaaagagggtctcttggacgtcgagaaactggaatgtgaggatgagctgactggcaccgaaatctcatgtctgagactcaagggccaaatgatttatctgcctgaagcggattcaattctgttcctgtgcagcccctcagtcatgaacctggacgatctgactagaagagggctgtacctgtccgacatccctctgcatgacgcaactagggacttagttctcctgggcgagcagtttagagaggaatacaaattaactcaagaactggaaatcctaaccgacaggctgcaactgaccttgagggcactagaagacgagaaaaagaagacagataccctgctttactcagtgttgccaccttccgtggcaaacgaactgcggcacaagcggcctgtgcctgccaagcgctacgacaacgtgaccatccttttctcggggatcgtcggctttaatgctttttgtagcaagcatgcctcaggtgagggcgctatgaagatcgtaaacttattgaatgacctctacaccagattcgacacgctcacagattctcgcaagaaccctttcgtgtacaaggtggaaacagtgggggataagtacatgaccgtgtctggacttcccgaaccctgcatacatcacgctaggtctatttgtcacctggccttggacatgatggagatagcaggacaagtccaggtcgatggagaatcagtacagattactatcggcatacacaccggcgaagtcgtcactggcgtaatcggtcagagaatgccgaggtactgtctgttcggtaataccgtgaatttaacttccagaactgaaacgactggtgagaagggaaaaataaacgtgagtgaatatacctacaggtgcctcatgtccccggagaactccgatcctcaattccatctcgaacataggggccctgtctcgatgaaggggaagaaagagcctatgcaggtttggttcctgagccgtaagaacacaggcacagaggaaaccaaacaggacgacgactag

SEQ ID NO: 110790 - DNA, 1656 bp, Artificial Sequence
  derived and/or modified sequence
atgtttggcaagatgttttttgtgttttgccaagagagtggttacgatacaattctgcgcgttctcgggagcaacgttagggagtttctgcagaacctggatgcactgcatgatcatctggccaccatatatcctggcatgagggccccatcatttcgttgtacagatgctgagaagggtaaagggttgattttgcactactatagtgagcgggagggattacaggacatcgttattgggattattaagacagttgcgcagcagattcatggaaccgaaattgatatgaaagtgatacagcagagaaacgaagagtgcgatcacacccagttcctgatagaggagaaggaatccaaggaggaagacttttatgaggatctggaccggttcgaagagaacggaacccaagagtccaggatcagtccctataccttttgcaaggccttccccttccatattattttcgatcgggatctcgtggttacacaatgtgggaacgctatatatcgggtcctgccgcaattgcagcctggcaactgttccctcctgtccgtcttttctctggtgagaccacatatcgacatctcattccacgggatcctgtcccatatcaacacagtatttgtgttacgcagtaaggaaggcctgctcgatgtcgagaaattggagtgcgaggacgagctgacggggaccgagatctcttgtctgcggctgaaagggcagatgatttatctcccggaggccgatagcatcctgtttctttgcagcccatccgtgatgaacctcgacgacctgacacggcgtgggctgtatctctcagatataccacttcacgatgccacaagagatctggtgttgttgggggagcagtttagagaagagtataaattaactcaggaattagagattctgacagaccgattacagctcaccctgagggccctcgaagacgaaaaaaagaagacggacactctgttatacagcgtattgccaccaagcgttgctaacgagttgcggcataagcggccagtcccggcaaagcgctacgataatgttacaatcctgttctccggaatcgttggtttcaacgcattttgcagcaagcatgcttcgggggaaggagccatgaagatcgtcaacttactgaacgatctttatacaagatttgatacactgaccgattcgagaaagaatccgtttgtttacaaagtcgagactgtgggcgataagtatatgaccgtatcagggctgccagaaccgtgtattcatcatgcgcgttctatctgccatttagcgttggatatgatggagatcgctggacaggttcaggttgacggagaatccgtacagattacaatcggtattcataccggtgaggtcgtgacaggagtgatcggtcagaggatgccgaggtactgccttttcggcaacactgtaaacctgacctcccgcacggaaacaactggagaaaaaggcaaaattaatgtgagcgaatacacatataggtgcttaatgtcgcccgaaaactctgatccccagttccatctggagcacagaggccctgtgtctatgaaaggcaaaaaagaaccaatgcaggtgtggttcctcagtaggaagaacacggggacagaagagaccaagcaggacgacgattag

SEQ ID NO: 110791 - DNA, 1656 bp, Artificial Sequence
  derived and/or modified sequence
atgttcggcaagatgttcttcgtgttctgccaggagagcggctacgacaccatcctgagagtgctgggcagcaacgtgagagagttcctgcagaacctggacgccctgcacgaccacctggccaccatctaccccggcatgagagcccccagcttcagatgcaccgacgccgagaagggcaagggcctgatcctgcactactacagcgagagagagggcctgcaggacatcgtgatcggcatcatcaagaccgtggcccagcagatccacggcaccgagatcgacatgaaggtgatccagcagagaaacgaggagtgcgaccacacccagttcctgatcgaggagaaggagagcaaggaggaggacttctacgaggacctggacagattcgaggagaacggcacccaggagagcagaatcagcccctacaccttctgcaaggccttccccttccacatcatcttcgacagagacctggtggtgacccagtgcggcaacgccatctacagagtgctgccccagctgcagcccggcaactgcagcctgctgagcgtgttcagcctggtgagaccccacatcgacatcagcttccacggcatcctgagccacatcaacaccgtgttcgtgctgagaagcaaggagggcctgctggacgtggagaagctggagtgcgaggacgagctgaccggcaccgagatcagctgcctgagactgaagggccagatgatctacctgcccgaggccgacagcatcctgttcctgtgcagccccagcgtgatgaacctggacgacctgaccagaagaggcctgtacctgagcgacatccccctgcacgacgccaccagagacctggtgctgctgggcgagcagttcagagaggagtacaagctgacccaggagctggagatcctgaccgacagactgcagctgaccctgagagccctggaggacgagaagaagaagaccgacaccctgctgtacagcgtgctgccccccagcgtggccaacgagctgagacacaagagacccgtgcccgccaagagatacgacaacgtgaccatcctgttcagcggcatcgtgggcttcaacgccttctgcagcaagcacgccagcggcgagggcgccatgaagatcgtgaacctgctgaacgacctgtacaccagattcgacaccctgaccgacagcagaaagaaccccttcgtgtacaaggtggagaccgtgggcgacaagtacatgaccgtgagcggcctgcccgagccctgcatccaccacgccagaagcatctgccacctggccctggacatgatggagatcgccggccaggtgcaggtggacggcgagagcgtgcagatcaccatcggcatccacaccggcgaggtggtgaccggcgtgatcggccagagaatgcccagatactgcctgttcggcaacaccgtgaacctgaccagcagaaccgagaccaccggcgagaagggcaagatcaacgtgagcgagtacacctacagatgcctgatgagccccgagaacagcgacccccagttccacctggagcacagaggccccgtgagcatgaagggcaagaaggagcccatgcaggtgtggttcctgagcagaaagaacaccggcaccgaggagaccaagcaggacgacgactag

SEQ ID NO: 110792 - DNA, 1800 bp, Artificial Sequence
  derived and/or modified sequence
atgctgatgtgcttcatcaaggaggcccagctggacgaggagggccagttcctggtgagaatcatctacgacgacagcaagacctacgacctggtggccgccgccagcaaggtgctgaacctgaacgccggcgagatcctgcagatgttcggcaagatgttcttcgtgttctgccaggagagcggctacgacaccatcctgagagtgctgggcagcaacgtgagagagttcctgcagaacctggacgccctgcacgaccacctggccaccatctaccccggcatgagagcccccagcttcagatgcaccgacgccgagaagggcaagggcctgatcctgcactactacagcgagagagagggcctgcaggacatcgtgatcggcatcatcaagaccgtggcccagcagatccacggcaccgagatcgacatgaaggtgatccagcagagaaacgaggagtgcgaccacacccagttcctgatcgaggagaaggagagcaaggaggaggacttctacgaggacctggacagattcgaggagaacggcacccaggagagcagaatcagcccctacaccttctgcaaggccttccccttccacatcatcttcgacagagacctggtggtgacccagtgcggcaacgccatctacagagtgctgccccagctgcagcccggcaactgcagcctgctgagcgtgttcagcctggtgagaccccacatcgacatcagcttccacggcatcctgagccacatcaacaccgtgttcgtgctgagaagcaaggagggcctgctggacgtggagaagctggagtgcgaggacgagctgaccggcaccgagatcagctgcctgagactgaagggccagatgatctacctgcccgaggccgacagcatcctgttcctgtgcagccccagcgtgatgaacctggacgacctgaccagaagaggcctgtacctgagcgacatccccctgcacgacgccaccagagacctggtgctgctgggcgagcagttcagagaggagtacaagctgacccaggagctggagatcctgaccgacagactgcagctgaccctgagagccctggaggacgagaagaagaagaccgacaccctgctgtacagcgtgctgccccccagcgtggccaacgagctgagacacaagagacccgtgcccgccaagagatacgacaacgtgaccatcctgttcagcggcatcgtgggcttcaacgccttctgcagcaagcacgccagcggcgagggcgccatgaagatcgtgaacctgctgaacgacctgtacaccagattcgacaccctgaccgacagcagaaagaaccccttcgtgtacaaggtggagaccgtgggcgacaagtacatgaccgtgagcggcctgcccgagccctgcatccaccacgccagaagcatctgccacctggccctggacatgatggagatcgccggccaggtgcaggtggacggcgagagcgtgcagatcaccatcggcatccacaccggcgaggtggtgaccggcgtgatcggccagagaatgcccagatactgcctgttcggcaacaccgtgaacctgaccagcagaaccgagaccaccggcgagaagggcaagatcaacgtgagcgagtacacctacagatgcctgatgagccccgagaacagcgacccccagttccacctggagcacagaggccccgtgagcatgaagggcaagaaggagcccatgcaggtgtggttcctgagcagaaagaacaccggcaccgaggagaccaagcaggacgacgactag

SEQ ID NO: 110793 - protein, 790 aa, Artificial Sequence
  derived and/or modified sequence
MKITSTSCICPVLVCLCFVQRCYGTAHHSSIKVMRNQTKHIEGETEVHHRPKRGWVWNQFFVLEEHMGPDPQYVGKLHSNSDKGDGSVKYILTGEGAGTIFIIDDTTGDIHSTKSLDREQKTHYVLHAQAIDRRTNKPLEPESEFIIKVQDINDNAPKFTDGPYIVTVPEMSDMGTSVLQVTATDADDPTYGNSARVVYSILQGQPYFSVDPKTGVIRTALHNMDREAREHYSVVIQAKDMAGQVGGLSGSTTVNITLTDVNDNPPRFPQKHYQLYVPESAQVGSAVGKIKANDADTGSNADMTYSIINGDGMGIFSISTDKETREGILSLKKPLNYEKKKSYTLNIEGANTHLDFRFSHLGPFKDATMLKIIVGDVDEPPLFSMPSYLMEVYENAKIGTVVGTVLAQDPDSTNSLVRYFINYNVEDDRFFNIDANTGTIRTTKVLDREETPWYNITVTASEIDNPDLLSHVTVGIRVLDVNDNPPELAREYDIIVCENSKPGQVIHTISATDKDDFANGPRFNFFLDERLPVNPNFTLKDNEDNTASILTRRRRFSRTVQDVYYLPIMISDGGIPSLSSSSTLTIRVCACERDGRVRTCHAEAFLSSAGLSTGALIAILLCVLILLAIVVLFITLRRSKKEPLIISEEDVRENVVTYDDEGGGEEDTEAFDITALRNPSAAEELKYRRDIRPEVKLTPRHQTSSTLESIDVQEFIKQRLAEADLDPSVPPYDSLQTYAYEGQRSEAGSISSLDSATTQSDQDYHYLGDWGPEFKKLAELYGEIESERTT

SEQ ID NO: 110794 - DNA, 2373 bp, Artificial Sequence
  derived and/or modified sequence
atgaagattacctccactagctgtatctgtcctgttctcgtctgtctgtgctttgttcagcggtgttacggaactgcccatcactcatctatcaaggtgatgagaaatcagaccaagcacatcgagggagagacagaagtgcaccacagaccaaaacggggatgggtgtggaaccagtttttcgtgctggaggaacatatgggcccagatccacagtatgtgggcaaacttcatagcaatagcgataaaggcgatggaagcgtgaaatacatacttaccggcgaaggcgccgggacaatatttattatcgacgatacgaccggggacattcattccaccaaaagcttggacagggagcagaagactcactatgtgctccacgcacaggcgatcgacagacgcacaaataaacctctggagcctgagtccgaatttatcatcaaagtacaggatattaatgacaatgctcccaagtttaccgatgggccttacatcgttaccgtgcctgagatgagcgatatgggaacctcagtactgcaagtgactgcaactgatgcagatgaccctacctacggtaattcagcccgagtcgtctactcaattctgcagggtcagccgtatttctccgtggatcccaaaacaggtgtcataagaaccgctctgcacaacatggaccgcgaagcccgagagcactatagcgtggtgatccaggccaaagatatggcgggtcaggtggggggtctgagtgggtctacaacagttaacattactctgacggacgtgaacgacaacccccctaggttcccgcagaagcactaccagctttatgtgcccgagagcgcccaggtgggatcagcagtcggcaaaatcaaggctaatgacgccgatacaggctccaatgcagatatgacatattctatcataaatggtgacgggatgggtatcttttctataagcacggataaggaaactcgtgaaggcatactgtccctgaagaagccactaaattacgagaaaaaaaaaagttacaccctcaatatagagggcgccaacacacatctggacttccgtttctcccacctgggtccttttaaggacgcaactatgctaaaaattatcgtgggggacgtggacgagccacctcttttctcgatgccatcctacctgatggaggtctacgaaaacgccaagatcggaactgtggtgggaaccgtactggcgcaagaccccgacagcacgaactctctggtacgttacttcatcaattacaatgtggaggatgacaggttctttaacatagatgccaatactggtactataagaacaactaaagtgcttgatagggaagaaacgccgtggtataacattaccgtcacagcatcggagattgacaacccagatctcctgagtcatgtgacagtcggtatccgggttcttgacgtgaatgataacccaccagagctggcccgagagtatgatattatcgtttgtgagaatagtaaaccagggcaagttatccacaccatatctgctaccgataaagatgatttcgccaatggtccacgctttaacttcttcctggacgagagactgcctgtgaaccctaatttcaccctcaaggacaatgaagacaataccgctagtatcttgactagacgacgacggtttagtcgtacagtgcaggatgtctattatttacctatcatgattagcgatggcgggattccttctctgagcagtagctccacactaaccattcgggtctgcgcctgtgagagggacggaagagtacgaacttgtcatgctgaagcatttctgagtagtgcgggactgtccacaggagccctcatagcaatcctcctctgcgtgttgatcctcctggccattgtcgttctcttcatcacactccggcgctccaagaaagagcccttgataatctctgaggaggatgtacgcgagaacgtggtgacctatgacgacgagggcgggggcgaggaagacaccgaggcattcgacattaccgccctgaggaaccctagcgccgccgaagagttaaaatatcgcagagacattaggcccgaagtgaaattaacgcctcgccaccagacaagcagcacattagagtctattgacgtccaagagtttattaaacagcggctggccgaagcggaccttgaccccagcgtcccaccatacgactcgctgcagacctatgcctacgagggccagcggagcgaggccggatccatcagtagcctggactcagccacaactcaatccgaccaggattaccattacctgggggactggggaccagaatttaagaagcttgcggaactttatggggagatcgaaagtgagcgaactacctag

SEQ ID NO: 110795 - DNA, 2373 bp, Artificial Sequence
  derived and/or modified sequence
atgaaaattactagtaccagttgcatctgccccgtcctagtgtgtttatgttttgtgcagagatgttatggaactgctcatcactcctccataaaggtgatgcgtaaccagacaaaacatattgagggtgagacggaagtccaccatcggccaaaacgcgggtgggtgtggaatcagttttttgtgcttgaagagcacatgggccccgacccacaatacgtgggcaaactccatagcaattccgacaagggggatggaagcgtcaaatatatccttaccggagagggggctgggactatattcattatcgacgatactactggagatattcattccactaaatctctcgaccgggaacagaaaacccattacgtgctccatgcccaagcgatcgaccgaaggacaaacaagcctctggagcctgaatctgaattcatcatcaaggtacaggatatcaacgataacgcaccaaagttcacagacggcccatatatcgtcaccgtgcccgagatgtccgatatgggcaccagcgttctccaagtcaccgcgactgacgcggatgatccaacgtacggtaactccgcgcgcgtggtctattccatcttgcagggacaaccctacttctccgtcgaccccaaaaccggtgtgattcggaccgcccttcacaacatggatagagaggcaagggaacattatagcgtggtgatccaggccaaagacatggctggacaggtagggggtttatccggtagcacaacggtgaacattacactcactgacgtaaatgataacccccctcgattccctcaaaagcactatcagctctatgtgccagagtccgcacaggtggggagtgcagtggggaagatcaaagcaaacgatgccgataccggaagtaatgcagatatgacctactcaatcataaatggtgacggaatgggaatttttagtatttccactgacaaagaaacacgggagggcattctttccttgaagaagccccttaattacgaaaagaaaaagtcttacactctgaatatcgagggcgctaacacccacctagacttccggttctcgcacctgggcccattcaaagacgccacaatgcttaagatcatcgtaggtgacgtcgatgaaccccctctgttcagtatgccatcctatttgatggaggtctatgagaacgccaaaatcgggactgtggtgggtaccgtgctagctcaggatcccgactctactaattccctggtgaggtactttattaattacaatgttgaggacgaccgcttcttcaatatcgacgctaacactgggacaatacggacgaccaaagtcctggaccgcgaagagacaccatggtataacatcactgtgactgcaagcgaaatcgacaacccagatctccttagccacgtgaccgtggggatccgagtgcttgacgtgaatgacaacccacccgaattggcaagagagtacgacatcatcgtgtgcgagaacagtaagcccggccaagttatccacaccatttccgctaccgacaaggacgacttcgctaatggtcccaggttcaacttcttcctggacgagaggctgcctgtcaaccccaactttaccctcaaggataatgaggacaacacagctagtattttaaccaggcggcgccggttttctcgcacagtccaggacgtgtattacctgcccatcatgatttcagatggcggcatacccagtctgtctagctcatcaaccctgaccatccgcgtctgtgcatgtgagcgagacgggcgagtgcgtacctgccatgcagaagcatttttatcttctgccggcctctcgaccggtgcgctgatagctatactcctgtgcgtgttgatcctcctcgccattgtggtcctattcatcacgctccgcaggtctaagaaggagcctttgatcatcagtgaggaggacgtgagggaaaacgtggtcacatatgacgacgaaggagggggcgaggaggacacagaggccttcgacatcacagccctgcggaatccaagcgccgctgaggaactcaaatatagacgtgatataaggcctgaggtgaagcttacccctaggcatcaaacaagctccaccttagaaagcatagacgtacaagagttcattaaacagcgccttgcggaagccgacctggacccttcagttcctccttatgactctctgcagacgtacgcctatgagggacagagatcagaagccggtagcatcagcagcttggactccgctactacccagtccgaccaggactaccactatctgggggattggggaccagagtttaagaagctcgccgagctctatggagaaatcgagtcggagagaacgacctag

SEQ ID NO: 110796 - DNA, 2373 bp, Artificial Sequence
  derived and/or modified sequence
atgaagattacctccacgagctgcatttgtcccgtactcgtgtgcctgtgtttcgttcagaggtgctacggaaccgcccaccatagctccatcaaggttatgcggaatcaaaccaagcacatcgagggggagactgaagtgcatcatcggccaaagcgtggctgggtctggaaccagttcttcgtcctagaggagcacatgggtcctgacccacagtacgtggggaaactgcacagtaactccgataaaggagacgggtcagtaaagtatatactgaccggggagggcgccggaactatatttattatagatgacaccacaggtgatattcactcaacgaaaagtctggatagagagcaaaaaacacactacgtgctccatgctcaagcaatcgatcgaaggacaaacaaaccactggaacctgagtccgaatttatcatcaaggtgcaagatatcaatgataatgctcctaagttcactgacggaccttacatcgtcactgtcccagagatgtccgatatgggaacatcggtactccaggtcaccgccactgacgccgatgaccccacatatggcaatagcgcaagggtagtgtactccatactgcaaggccagccatacttcagtgtagaccctaaaaccggggttatccgcaccgccctgcacaacatggacagagaggctcgcgaacactacagtgtcgtgatccaggccaaagacatggcaggccaggtggggggcctgagtggttcgacaacagtgaatattaccttaacagacgtgaatgataacccaccacgattccctcagaagcactatcagctttatgttcccgagagtgcccaggtgggtagtgccgttggcaaaattaaggccaatgacgctgatacgggcagcaacgccgacatgacctacagtatcataaacggagacggcatgggcatcttctctatttctaccgataaggagacaagagaggggattctctcacttaagaagcctctgaattacgaaaagaaaaaaagctacactctgaatatcgaaggagccaacacccacctggactttagattcagtcacctgggcccatttaaagatgcaactatgctgaagataattgtaggagatgtcgacgagccacccttattcagcatgcccagctatctcatggaggtatacgagaacgccaaaattggcaccgtggtcggaaccgtcctcgcgcaggaccccgactcaactaacagcctggttcgatactttatcaattacaacgtggaggatgatagattctttaatatcgatgcgaatacaggaacgatacggaccactaaagttttagatcgggaagaaaccccttggtataatattaccgtgacagcttccgagattgataatcctgatctgttgtcacatgttactgtggggataagagtgctcgatgtgaatgacaatccgcccgagctcgccagggaatacgatatcatagtttgcgaaaattcgaaaccaggccaggttattcacaccataagcgcaaccgataaggacgattttgccaatgggcccaggttcaatttttttctggacgagcggctgcccgtcaatccgaacttcactttaaaagataatgaggacaacacagctagtattctgacccggaggcgccggttttcgcggacagtacaagatgtgtactatctgcctatcatgatctccgacgggggcattccaagcctctctagcagcagcacactcactattagagtttgcgcttgtgagagggacgggagagtcagaacctgccacgcagaagcctttctgtcctcagccggcctgtctacaggcgctctgatcgcaattcttttatgtgttctcattctcctcgccattgtcgtactgttcattactcttcgcagatccaaaaaggaacctttgatcattagcgaggaggacgtcagggagaacgtggtgacctatgacgatgaggggggcggggaggaagatacagaggcctttgacattacagccctgcgaaatcctagcgccgctgaagagctgaagtaccgccgggatatcaggcctgaagtaaagctcactcctcgtcatcagaccagctctactttggagagcattgatgtccaggagttcatcaagcagagactagccgaggcagatctcgatccctctgtgcccccttacgactcactgcagacttatgcttacgaagggcagcgctctgaagcagggagtatcagctcactcgattctgcaacgactcagagtgatcaagattaccactatcttggtgattggggcccggaatttaaaaaactcgctgaactctacggcgaaattgaatctgaaagaaccacctag

SEQ ID NO: 110797 - DNA, 2373 bp, Artificial Sequence
  derived and/or modified sequence
atgaagatcacctctaccagctgcatctgtcccgttctcgtttgcctgtgctttgtccagcgctgttatggaacagctcaccacagcagcattaaggttatgagaaaccagacaaaacacatcgaaggcgagaccgaggtgcatcaccgccctaagagggggtgggtgtggaatcagttcttcgtgctcgaggagcatatgggaccagacccgcagtatgtaggaaaacttcacagcaactccgacaaaggcgacgggagcgtgaagtacatactgaccggcgaaggcgccggtaccatctttataatcgatgacacaaccggggacattcactcaacaaaaagtttggatagggagcagaagacccactacgtacttcatgctcaagcaattgataggcgaaccaacaaacccctcgaacccgagtcggagtttataatcaaggttcaggatatcaatgacaacgcacctaagtttactgacggcccctatatcgtcaccgtcccagaaatgtccgatatgggtacctctgtcctgcaagtgacagcaacagacgcggatgaccccacatacggtaactccgcgcgagtcgtctatagtatcctgcagggtcaaccgtacttctccgtggatcctaaaacaggcgtgatccggacagctcttcataatatggacagagaggcgagggagcactattctgtggtgatacaagcgaaggacatggcaggccaggtggggggtctctcaggatctactaccgtgaacattaccctgacggacgttaacgacaacccccccaggtttccgcagaagcactatcagttatacgtacccgagtcagcacaggtcggcagcgcagtgggaaagatcaaggcgaacgacgcagacaccggatcaaatgctgatatgacatactcaattatcaatggcgacgggatgggcattttctccatctcaaccgacaaggaaacgcgtgagggaattctctcattaaagaagccgctgaattatgaaaaaaaaaagtcatatactttgaacatcgaaggagccaacactcatctggatttccgcttctctcatttgggtcccttcaaggacgccacgatgctcaagattattgtgggtgacgtcgacgagccaccccttttttccatgcctagctacctcatggaagtttacgagaatgccaagatcggcaccgtagtggggaccgtcctggcacaggacccggattccacaaattccctggttcgctattttattaactataacgttgaggacgaccgcttttttaatattgacgccaatacagggaccataagaaccactaaagtactcgatcgcgaggagactccctggtacaatattactgtgacagcttccgaaattgataacccagacctcctttcgcatgtaaccgtcggaatccgggtcttggatgtcaatgacaacccacccgagcttgcccgagagtacgatattatagtgtgtgagaactctaaaccaggccaagtcatccatacaatatccgcaaccgataaggatgattttgccaacggaccgaggtttaatttttttcttgacgaacgcctcccagttaaccccaatttcaccctgaaggacaacgaggacaataccgcatcaatactgacaaggcgacgtcgattctcacggacagttcaagacgtgtactatttgccaattatgatctcagatggcggaatcccttccctgagctcctcctccacgctaacaattcgggtgtgcgcgtgtgaacgcgacgggagggtgaggacgtgccacgcagaagcattcctgtcctcggcagggctaagcactggcgccttaattgcaatcttgttgtgcgtgctgattctgttagcaatagtcgtcttgtttattactctaaggcggagcaagaaagagcccctcatcatctccgaagaagacgtgcgagagaatgttgttacatacgacgacgagggtgggggcgaggaagacacagaggcgtttgacattacagctctgcggaatcctagcgccgctgaggaactcaagtatcggcgagacatccggccagaagtaaaattaacaccacgccatcaaacatcatccacactggagagtatagatgttcaggaattcatcaaacagcgtctggcagaagccgaccttgacccctcagtccctccatatgacagtctgcaaacctatgcgtatgagggtcagaggtctgaggctggatctatctctagcctggacagcgcaacaacccagtccgaccaggactatcattacttaggtgactggggtcccgaattcaagaagctcgccgagctatacggcgagatagagagcgagaggactacctag

SEQ ID NO: 110798 - DNA, 2373 bp, Artificial Sequence
  derived and/or modified sequence
atgaagatcaccagcaccagctgcatctgccctgtgctggtgtgcctgtgctttgtgcagcgctgctatggaacagcccaccacagcagcatcaaggtgatgaggaaccagaccaagcacattgaaggagaaacagaggtgcaccaccggcccaagaggggctgggtgtggaaccagttctttgtgctggaggagcacatgggccctgacccccagtatgtgggcaagctgcacagcaacagcgacaagggagatggctctgtgaagtacatcctgactggagagggcgccggcaccatcttcatcattgatgacaccactggagacatccacagcaccaagagcctggaccgggagcagaagacccactacgtgctgcacgcccaggccatcgacaggaggaccaacaagcccctggagcctgagagcgagttcatcatcaaggtgcaggacatcaatgacaatgcccccaagttcacagatggcccctacatcgtgacagtgcctgagatgtctgacatgggcacctctgtgctgcaggtgacagccacagatgctgatgaccccacctacggcaacagcgcccgggtggtgtacagcatcctgcagggccagccctacttctctgtggaccccaagacaggagtcatcagaacagccctgcacaacatggaccgggaggcccgggagcactacagcgtggtgatccaggccaaggacatggccggccaggtgggcggcctgagcggcagcaccaccgtgaacatcaccctgacagatgtgaatgacaaccccccacgcttcccccagaagcactaccagctgtatgtgcctgagagcgcccaggtgggcagcgctgtgggcaagatcaaggccaatgatgctgacaccggcagcaatgctgacatgacctacagcatcatcaatggagatggcatgggcatcttcagcatcagcacagacaaggagacccgggagggcatcctgagcctgaagaagcccctgaactatgagaagaagaagagctacaccctgaacattgaaggagccaacacccacctggacttccgcttcagccacctgggccccttcaaggatgccaccatgctgaagatcatcgtgggagatgtggatgagcccccactcttctccatgcccagctacctgatggaggtgtatgaaaatgccaagattggcaccgtggtgggcaccgtgctggcccaggaccctgacagcaccaacagcctggtgcgctacttcatcaactacaacgtggaggatgaccgcttcttcaacattgatgccaacacaggcaccatccgcaccaccaaggtgctggaccgggaggagaccccctggtacaacatcaccgtgacagccagcgagattgacaacccagacctgctgagccacgtgacagtgggcatccgggtgctggatgtgaatgacaaccccccagagctggcccgggagtatgacatcatcgtgtgtgagaacagcaagccaggccaggtgatccacaccatcagcgccacagacaaggatgactttgccaacggcccccgcttcaacttcttcctggatgagcggctgcctgtgaaccccaacttcaccctgaaggacaatgaagacaacacagccagcatcctgaccaggagaagacgcttcagcaggacagtgcaggatgtgtactacctgcccatcatgatcagtgatggcggcatccccagcctgagcagcagcagcaccctgaccatccgggtgtgtgcctgtgaaagagatggccgggtgaggacctgccacgccgaggccttcctgagcagcgctggcctgagcactggagccctgattgccatcctgctgtgtgtgctgatcctgctggccatcgtggtgctcttcatcaccctgcggcgcagcaagaaggagcccctcatcatcagtgaagaagatgtgagagaaaatgtggtgacctatgatgatgagggcggcggggaggaggacacagaggcctttgacatcacagccctgaggaaccccagcgctgctgaggagctgaagtaccgccgggacatccggcctgaggtgaagctgacccccaggcaccagaccagcagcaccctggagagcattgatgtgcaggagttcatcaagcagaggctggccgaggccgacctggaccccagcgtgcccccctatgacagcctgcagacctacgcctatgagggccagaggtctgaggccggcagcatcagcagcctggacagcgccaccacccagagcgaccaggactaccactacctgggggactggggccctgagttcaagaagctggccgagctgtatggagaaattgagagcgagaggaccacctag

SEQ ID NO: 110799 - DNA, 2373 bp, Artificial Sequence
  derived and/or modified sequence
atgaagatcaccagcaccagctgcatctgccccgtgctggtgtgcctctgtttcgtccagaggtgttatggcacggcacatcacagctctatcaaagtcatgcgcaaccagactaaacacatcgagggcgagaccgaggttcatcatcggcccaagcgggggtgggtatggaaccagttcttcgttctcgaggagcacatgggtcccgacccccagtacgtgggcaaattgcatagtaactctgacaagggggatggcagcgtcaagtacatcctgacaggggagggagcaggaaccatctttatcatagatgatactacaggcgacatacacagtacaaagagtttggaccgagagcagaaaacccactatgtactgcacgcccaggctatagacaggaggacaaataaaccactcgaacccgagtccgagtttattatcaaggtacaagacataaacgacaatgccccaaagttcactgacggcccgtatatcgtaaccgtgcctgaaatgagcgacatgggtacatcagtgttgcaagtcacagccactgacgccgatgatcccacatatggcaactcagccagagttgtctattccattctccaaggacagccatacttctccgtggaccccaagactggggtgattcggaccgctctacataacatggaccgcgaggccagagaacactattctgttgttatccaggccaaggacatggccggccaagtgggtgggctgtccgggtcaactaccgtcaacatcacgcttaccgacgttaatgacaatccccctaggtttccccagaaacactatcaattgtatgtccctgagtccgcacaggtggggtcggccgtaggcaaaatcaaagcaaacgacgccgacacgggcagtaatgccgatatgacatacagcattattaatggcgatggtatgggcattttctccatctcaaccgacaaagagactcgcgaaggtatcttatcattgaagaagcctctcaattacgagaaaaagaagagttacactctcaatatcgagggggccaatacgcatttggatttccggttttcccacctggggccattcaaggacgccacgatgctgaaaatcatagtgggcgacgtggacgagcctcctttgttctccatgccatcctacctcatggaagtttatgaaaatgccaagattgggacagtggtgggcacagtgcttgcccaggacccagactcaacgaacagcttggttcgctattttataaactacaacgtggaagatgaccgtttcttcaacatcgacgctaacaccggcaccattcgcacaaccaaagtattagacagagaagaaaccccttggtacaacatcaccgtgaccgcttctgagattgacaacccagatctgttaagccacgtgacagttggcatccgcgttttggatgtgaacgataaccctccagaacttgcaagagagtatgatatcattgtgtgtgagaactccaaacccggtcaggtcattcatacaatatctgccacagacaaagatgacttcgctaacgggccacgttttaatttcttcttggatgaacgcttgcctgtgaaccctaatttcactctcaaagacaatgaagataacaccgccagcatcctgaccagacggcggcggttctctcggacagttcaagacgtgtattatttgcctattatgatttccgacggaggaatcccatctctgtctagcagctctacattgacgatccgggtctgtgcgtgcgagcgggacggtcgagtcagaacctgtcacgcagaggcattcctgtcaagcgctggcttaagcaccggagccctgatcgcaatcctgctgtgcgttcttatcctactggccatagtggtcttgtttataacgctccggcggtctaagaaagaacctctgatcataagtgaagaagacgtaagagagaacgtggtgacatacgatgatgagggcggaggcgaggaggacaccgaggctttcgatataaccgcattgcggaatccctccgcagcagaggaactgaagtacagaagggacattcgtccggaagttaaactgacccccaggcaccagacttcaagtacactcgagtccatcgatgtccaggagttcatcaaacagcgcctcgccgaggccgatctggatccatcagtacctccttacgattcactccagacatacgcctacgagggccagaggtctgaggcagggtctatctcttctctcgacagtgccaccacgcagagcgatcaggactaccactatctcggcgattggggacctgagttcaaaaagctggctgaactatatggcgagattgaatctgagaggaccacctag

SEQ ID NO: 110800 - DNA, 2373 bp, Artificial Sequence
  derived and/or modified sequence
atgaagatcaccagcaccagctgcatctgccccgtgctggtgtgcctctgcttcgtgcagaggtgttatggcaccgcccatcactcttcgatcaaggttatgagaaatcagacaaagcatatagagggcgaaactgaagtgcaccaccgccctaagcggggctgggtgtggaaccagttctttgttctagaagaacacatgggtcccgacccacagtacgtggggaaattgcattctaattccgataagggagacggcagtgtgaagtacattctgacgggtgaaggcgcgggcaccatcttcatcatcgatgatactaccggtgatatacacagtactaaatctctcgaccgcgaacagaaaacgcattacgttctgcacgcccaggcgatagaccgccgcactaataaaccacttgagcctgagagtgagtttatcattaaagttcaggacatcaatgacaacgctccaaagttcactgatgggccatacatcgtcacagtccccgagatgtctgacatgggcacctcagttctgcaagtgacagccaccgacgcagatgatcccacttacggaaacagcgcccgtgtggtctatagcatccttcaaggacagccctacttcagcgtagatcctaagacaggagtgatcaggaccgctctccacaacatggatagggaggcacgagaacactactccgtggtcattcaggctaaggatatggccggccaggtcggcggcctgtccggatctacgactgtcaacataacactgaccgacgtgaacgataatcctccgcggtttccacagaagcattatcaattgtatgtgcctgaaagcgcccaggtaggatctgctgtgggcaaaatcaaggccaatgatgcggacacaggctcgaacgcggatatgacctactcaataattaacggagacggaatggggatctttagcatttccacggacaaggagactcgcgagggaatcctaagcctgaaaaaaccacttaactacgagaaaaaaaagtcctatactctgaacatcgagggagccaatacccacctggatttcagattcagccacctgggtcccttcaaagatgccacaatgctcaaaataatcgtgggggacgtggacgagccacctttgttttccatgccctcttatctcatggaggtttacgagaatgcaaagatcgggacggtggtcgggactgtcctggcccaggatccggactcaacaaactcgcttgtcaggtattttattaactacaacgtggaggatgacaggttttttaatattgacgccaacacaggaaccatccggactacaaaggtccttgaccgcgaggagactccatggtataatatcactgttactgcgtcagagattgataaccccgacctgctcagccacgtgaccgtgggaatcagggtactggacgtgaatgataatccacctgaactcgcacgggagtacgacattatcgtctgtgaaaattctaagccaggacaggtgattcatacaatcagtgccaccgacaaggatgacttcgcgaacgggccccggtttaactttttcttggatgaaagattgccagttaatccaaattttacgcttaaagacaatgaagacaacactgcaagcattcttacccggcgtcgtcgtttctcacgaaccgtccaggacgtgtactatctgcccattatgatttccgacggaggaatcccgtccctaagctctagctccactctgactatcagagtgtgcgcttgcgaacgggacggccgggttaggacatgccacgcagaagcgttcctctcctccgcaggactgtcgacaggagctcttatcgccattctcctgtgtgtgctgattctcctggcaatcgtcgtactgttcatcactctccgtagaagcaaaaaagagccattaattatctctgaagaggacgttagagaaaatgtagttacatatgacgatgaaggaggcggagaggaggacactgaggccttcgatattaccgcccttcgtaatcctagtgccgctgaagagctgaagtatcgccgggatataaggccagaagttaaactgaccccccggcaccagactagctccaccctcgaatccattgatgtgcaggagtttatcaaacaacgcctagccgaggcagatctggatccatccgtacccccttatgactccctgcagacatacgcttatgaggggcagcgctccgaagccgggtccatttcttccctggactcagccacaacacaaagcgatcaagattatcactacctaggcgattgggggccagaattcaaaaagctcgccgaactgtacggtgagatagaaagtgagcggacaacctag

SEQ ID NO: 110801 - DNA, 2373 bp, Artificial Sequence
  derived and/or modified sequence
atgaagatcaccagcaccagctgcatctgccccgtgctggtgtgcctgtgctttgtacagcggtgttatggcaccgcccatcactcgtctataaaagttatgcgcaaccagaccaaacacattgagggcgagaccgaggtgcaccatcggccaaagcgaggatgggtgtggaatcagtttttcgtcctcgaggagcacatgggaccggatccccaatatgtgggcaaattacactccaactcagataaaggagatggctctgtcaaatatattctgacaggagagggcgcgggtactatctttatcatcgacgatactaccggggatatccactccaccaagtcgctcgatcgcgagcagaaaacacactacgtactccacgcccaggctattgaccggcggaccaataaacccttggagcccgagtcagagttcattataaaagtgcaggacatcaacgacaatgcccccaagtttacagatggaccctatatagtgaccgtgccagagatgagcgatatgggcacttctgtgctgcaagttactgctacagacgccgacgatcccacctacggcaactccgcccgtgttgtgtacagcatactgcagggccaaccatacttcagcgtggacccgaagacaggagtgatccggacggccctgcacaatatggacagagaagcccgtgagcactactccgttgttattcaggcgaaggacatggccggccaagtggggggcctctcaggatccacaaccgtgaacattaccctgacagatgtcaatgataacccaccacggttcccccagaaacactaccaactctatgtcccagaatctgcccaggttggtagtgccgtcggaaaaatcaaggccaatgacgcagatactggctccaacgccgacatgacttactctatcataaacggagacgggatggggatctttagcatcagcaccgataaagaaacaagggagggaatattgtccttaaagaagcctctaaactacgagaagaagaagtcctatactctgaacatagaaggcgcaaacacccacctcgactttcgattttcacacctgggacccttcaaggacgccacaatgctcaagatcattgtcggcgacgtagacgagccacctcttttttcaatgcccagctatctgatggaagtttacgagaacgcaaaaattggtactgtggtgggcacggtcctggcccaggatccggattcaactaactctctcgttagatacttcattaactacaacgtcgaggacgacagattttttaacatcgacgctaacacaggcaccatcaggacaacaaaggttcttgacagagaagagactccttggtataacattacagtgaccgcttcagaaatcgacaaccccgatctactctcacacgttactgttggcatccgggtcctggacgttaatgacaacccacccgagcttgctagagaatatgacatcatagtatgcgaaaatagcaagcctggccaggttatacatacgatcagcgccacggacaaggatgattttgctaatggcccgaggttcaatttcttcctggacgagcggctacccgtgaatcctaactttaccctgaaagataacgaggacaatacagcttcaatactaactaggagacggcgctttagcaggaccgtgcaggacgtctattatcttcccattatgatatcagatggtgggattccgtcattgtcatcttcgtcgacactgactatccgcgtatgtgcatgtgagagggacggccgcgttcgcacctgccacgcagaggcctttttgagttccgccgggctctcaactggagccctcatcgccatcctgctgtgcgtcttaattcttctggctatcgtagttttatttatcactctacggcggagtaaaaaggagccactcattatttctgaagaggacgtgagggagaacgtggttacatatgacgatgaaggaggaggtgaggaggatacagaggccttcgatattactgctcttcggaatcccagcgcagcggaagagctcaagtatcgcagagatattaggccagaggtcaaactcactccaagacatcagacctcgtccacattggagagcatcgacgtccaagagtttataaagcagcggttggccgaggccgatcttgatccgagcgtgccaccatacgacagcctccaaacttacgcatacgagggccaaagatcggaagctggctccatttcatcactggattctgccacgacacaaagtgatcaggactatcattacttgggtgactggggaccagaattcaagaagttggccgagctctatggcgaaatagaatcagaaaggacaacgtag

SEQ ID NO: 110802 - DNA, 2373 bp, Artificial Sequence
  derived and/or modified sequence
atgaagatcaccagcaccagctgcatctgccccgtgctggtgtgcctttgcttcgtccagcggtgttacggcaccgctcaccattccagtatcaaagtgatgcgcaaccagacgaaacatattgaaggcgaaacggaagtgcaccataggccgaagcgcggatgggtctggaaccagttctttgtgttggaagaacatatgggcccagatccccagtacgtcggtaagctgcactcaaattcagataaaggagacggaagcgtgaaatacattctgacgggtgagggggctggcaccattttcattatagatgacaccaccggcgacatccatagcaccaagtccctcgatagagagcagaaaacacactatgtgttgcacgcccaggcgatagaccgccgaaccaataagcctctggagcctgaatccgaatttattattaaggtccaggatatcaacgataatgcccctaagtttaccgacggcccgtacattgtgaccgtaccggagatgtctgatatgggcacatcagttttgcaggtgaccgccacagacgcagatgacccaacatacgggaacagtgcacgcgtggtctattcgattctgcaggggcagccatatttcagtgtcgaccctaaaaccggtgtgattcgtacggcccttcacaacatggacagggaggccagggagcattattccgtggtgatacaggctaaagacatggccggccaggtgggcggcctgagtggatctaccaccgttaacatcacactgacggacgttaatgacaacccacccagatttcctcaaaaacattaccaattatacgttccagaatccgctcaggtgggtagtgcagtcggtaaaattaaggccaatgatgctgacacaggaagcaacgccgacatgacatactctattattaacggtgatggtatgggtatattctcaatcagtaccgacaaggaaaccagggagggaatccttagtttgaaaaagcccctgaattacgaaaaaaagaaaagctacaccctcaatattgaaggagcgaatacccatctcgatttccgcttcagccatctcgggcccttcaaggatgcaaccatgctcaaaattatcgtaggggacgtggatgaaccaccattgttttcaatgccgtcttacttgatggaagtgtatgagaatgcaaagattggcaccgtcgtcggaaccgtgttggcacaggacccggattccacaaattccctggtgcgctacttcatcaactataacgttgaagacgacaggtttttcaacattgacgccaatacaggtactatccgcaccactaaagtactggaccgggaggagaccccttggtataacatcaccgtcacagcctcggagattgataaccccgacctgcttagtcatgtgaccgtgggcatccgagtgctcgatgtgaatgacaacccccctgaactagctcgcgagtatgatataatcgtttgcgagaattccaagcctggccaggtaattcacaccatttctgccacagacaaggatgacttcgcaaacggcccaagattcaatttctttcttgatgagaggctgcccgtgaaccccaatttcactttgaaagacaatgaggacaataccgcgtcgattcttactcgacgccggcgcttctcgcggacggttcaggacgtgtattacctgcctataatgatttctgatggcgggatccctagtttaagctcatcttccacacttacaatccgtgtctgcgcttgcgagagagacggcagagttcgcacctgccatgcggaggccttcctctcctcagccggactatccaccggcgctttgattgcaatccttttgtgtgtcctaatcctcctggcaattgtcgttctgttcattaccctgagaagatctaaaaaagaacccctgatcatctccgaggaggacgtcagggaaaatgtggttacatacgacgatgaagggggcggtgaggaagacacagaagccttcgacattactgcactgcgcaatccatcagccgcggaagagcttaagtataggcgagacatccggccagaagttaaactcactcccaggcatcagacttcgagcacgcttgaatctattgatgttcaggaatttatcaagcaaaggctggctgaagccgatctggacccgagcgtacccccatacgactctctacagacgtatgcctatgagggtcagcgaagcgaggctggctctatttcatccctggactccgccactacccagagcgaccaggactatcattatctgggtgattgggggccagagtttaagaagctggccgagttatacggtgagatagagtccgagcgcaccacctag

SEQ ID NO: 110803 - DNA, 2373 bp, Artificial Sequence
  derived and/or modified sequence
atgaagatcaccagtacctcttgtatatgccccgtactagtctgtctatgcttcgtccagcgttgttatggtaccgcgcaccacagtagtatcaaggtgatgcgaaaccagacgaaacacatcgagggagaaactgaggtccatcacagaccaaaaaggggctgggtctggaaccagtttttcgttctggaggaacacatgggccctgaccctcagtatgtgggaaaactccattctaacagcgacaagggcgacgggtctgtaaagtatatcctcacaggtgaaggcgctggtactattttcatcatcgatgatacgacgggcgatatccacagcaccaaatccttggatcgggagcagaagacccactacgtcctgcatgcccaggcaatcgaccggcgaaccaataagccgcttgaaccggagagtgaattcataattaaagtccaggatataaacgataacgcccctaagtttaccgacgggccttatatcgtgacggtgcccgaaatgtcagacatgggcacttccgtcctacaagtcacagcaactgacgctgacgatcccacctacgggaactcagctagggtcgtttatagcatccttcagggacagccttacttttcggtcgacccaaagacaggagtgattcgaacagcactgcacaacatggatcgggaggccagggagcattattctgtggtaatccaggctaaggacatggctggacaggtgggcggtctcagcggctcaaccacagttaatattaccctgacagacgtcaatgacaaccctccgagattcccacagaagcactatcaactctatgtccccgaaagcgcacaggtggggtcggctgttggcaaaattaaggcaaacgacgctgatacagggtccaacgccgacatgacttattccatcatcaatggcgatggcatggggatttttagcattagtaccgataaagagacaagagaggggattctctctttaaaaaaaccgctcaactatgaaaagaaaaagtcgtacacccttaacattgagggtgccaatacccacctggacttccgcttctcccacctaggaccctttaaagacgccacgatgcttaaaataatagtgggcgatgtggacgagcctcccctgttttctatgccaagctatctgatggaagtttatgagaacgccaaaatcgggaccgtggttgggaccgtccttgcacaggatccagacagcaccaactctctcgtacggtacttcatcaactacaatgtggaggatgatcgcttttttaatatagacgcaaatacaggtacaatccgcaccactaaggtgctcgatagagaggagacaccatggtacaatattaccgttaccgcctcagaaatcgacaatcctgatctgctctcgcatgtgaccgtggggattagagtgcttgacgtgaacgataatccacctgaactcgccagggagtatgacatcatcgtatgcgagaactcgaaacctggacaagtgattcacactatctccgccactgacaaagacgatttcgcgaacggacctcggttcaacttcttccttgacgaacgactcccagtgaaccccaactttaccctgaaagataacgaagacaataccgcttctatcttgacccgcagaagacgattctctcgcacggtgcaggacgtctattaccttcccatcatgatctccgatggcggtatacccagcctctcctcctcatccaccctgacgatccgcgtgtgcgcgtgcgagagagatgggagggtacggacttgtcacgcagaggcattcctgagctctgcaggcctcagcaccggcgctctaattgcaattctactttgcgtgctcattttgctggcaatcgtggtgttgtttattaccctgagaaggagcaaaaaagagcccttgatcatttctgaagaggacgtgcgcgaaaatgttgtgacctacgatgatgaaggaggcggagaagaagacaccgaagccttcgatattaccgccctaaggaacccctctgccgcagaagaattaaagtaccggcgtgacatacggccagaggtgaagctgactcctagacaccaaacctccagtacactggaaagcatagacgtgcaggagtttataaaacagcgcctcgctgaggctgacctggatccctctgtgccaccttacgatagccttcaaacctatgcctacgagggccaacgctcagaagccggatctatctcttccctggactccgcaactacacagagcgatcaggattaccattacctgggcgattggggtcccgaattcaaaaaacttgctgaactgtatggtgagatagagagcgaaaggaccacttag

SEQ ID NO: 110804 - DNA, 2373 bp, Artificial Sequence
  derived and/or modified sequence
atgaaaatcactagcactagctgtatctgtcctgtgctggtatgcctgtgttttgtgcaacggtgctacggaacagctcaccacagcagcataaaggtgatgagaaatcaaaccaagcatatcgagggcgaaaccgaagtccaccataggccaaagcgtggttgggtgtggaatcagttctttgtcctcgaagaacacatgggcccagatcctcagtatgtgggcaagcttcatagtaatagcgacaaaggagacgggtccgttaagtacatactgaccggagagggtgctggcaccatattcataatcgatgatacaactggcgatatccacagcacaaaatctctggacagggagcagaaaacccactacgtattgcatgcacaggccatcgaccgcaggaccaacaagcctttagaaccagagagcgagttcattatcaaggttcaggacataaacgataacgccccaaagtttaccgatgggccttacattgttacggtgccagaaatgtcagacatgggcaccagtgtcctgcaagtaactgctaccgacgcagacgacccaacctacggcaatagcgcccgagtcgtttactccattctgcaggggcagccctacttctcggtggatcctaaaactggagtgatccggacagcgttacacaacatggatagagaagcacgcgaacactattctgtggtgatccaggccaaagatatggctggtcaggtggggggtcttagcggctcgaccaccgtcaacatcaccctgactgatgtgaatgataatcctccaagatttcctcagaagcactatcaactgtatgtgccagaatctgcccaggtcggctctgccgtgggaaaaatcaaagccaatgatgccgataccggaagtaacgctgatatgacttatagcataatcaatggggacggcatggggattttctccattagcactgataaggaaacaagggaagggattttgagtctcaaaaaaccgctgaactacgaaaagaaaaaatcttacacactgaacatcgaaggtgccaacacgcacctcgactttcgctttagccatctcggtccttttaaggatgcaactatgttgaaaattattgtgggagatgtggatgaacccccactgttcagtatgccatcttatttaatggaggtttatgaaaacgcaaagatcggcacagtggtgggaaccgttctggctcaagaccctgatagtactaatagcctggtgcgctatttcattaactacaatgttgaagatgacaggttctttaatattgatgccaataccgggacaatccgcaccaccaaagtactcgatcgagaagaaaccccctggtataacatcactgtcactgcctccgaaatcgacaatcccgatctcctgtcgcacgtgacagtaggcattcgcgtgctcgacgtgaacgacaatcccccagagttggctagagagtatgacatcatagtttgcgagaatagtaaaccaggccaggtgatacacaccatcagcgcaacagacaaggacgattttgctaatggccctcgtttcaattttttcttggacgagcgcctaccggtaaaccccaactttaccttgaaagacaatgaggataacaccgcatccatcctcacccggagacggaggttcagccgcaccgtacaggacgtgtactacctcccgataatgatctcggacgggggaattccctctctctcatcttcttctacccttactatacgagtgtgcgcctgtgaaagggatggtagagtgcgaacctgtcacgcagaggccttcctgtcttccgccggactctccacaggtgcactgatcgcgatacttctctgcgtcttgatccttttagccatcgttgtactgtttataacgctccggaggtccaagaaggagccactgatcattagcgaagaagacgtgcgggaaaatgtggtgacatatgatgacgaaggcggaggagaagaggacaccgaggcttttgatatcaccgcgctgcggaatccctccgctgccgaagagcttaagtaccggcgagacattagacctgaggttaagttgactcctagacaccagactagctctacacttgaatccatagacgtccaggagttcatcaaacaacgcttggccgaagccgatttggatcctagcgtccctccctatgactctctgcaaacatacgcatacgaagggcagcgcagtgaggcaggttcaatctcctcccttgactctgctaccacccagtccgaccaggactaccactacctaggagattggggccctgagttcaagaagctggccgaattgtacggggaaattgaaagcgagcgaactacttag

SEQ ID NO: 110805 - DNA, 2373 bp, Artificial Sequence
  derived and/or modified sequence
atgaaaatcacatccacctcatgtatttgccctgtgctggtgtgtctgtgttttgtacagcggtgttacgggaccgcacaccactcatccattaaggtgatgagaaaccagaccaagcatatcgagggcgaaaccgaagtgcatcatagaccaaaaagaggatgggtctggaaccaattcttcgtgctggaggaacacatgggcccagatccccagtacgttggcaagctccattctaatagcgataaaggggatggttcggtgaagtacatactgaccggggagggcgcaggcactatcttcatcatagatgatacaaccggcgatattcatagcactaagagtttggaccgcgaacagaaaacacattacgtgctccatgcccaagcaattgaccgcagaaccaacaagcctctggagccagagagtgagttcatcattaaggtccaggacattaatgataatgctccaaaatttacagatggaccatatatcgtcacggtaccagaaatgtctgacatgggcaccagcgtattgcaggtaaccgctactgacgctgacgatcctacttatggcaacagtgctagagtggtgtactctatcctgcaaggccagccatattttagcgtggaccctaagacaggcgtcatcagaaccgctctccacaacatggatcgtgaggccagagagcattattcagtggtcatacaggcaaaagacatggctggtcaggtgggaggcctcagcggctccactaccgtgaacatcacacttactgacgtgaatgataacccacctcgatttccgcagaagcactatcagctgtacgtccctgagagcgcccaggtcggaagcgccgtcggcaagattaaagccaatgatgccgacaccggcagcaacgccgacatgacgtactctataatcaacggcgatggaatgggaatcttcagtatttcaaccgacaaggagaccagagagggcatcctgtctctcaagaagccgctaaattacgagaaaaagaagtcttatacactaaacatagaaggagcgaatacgcacttggactttcgcttctcccacctcggacctttcaaagatgctaccatgctcaaaattattgtcggggacgtcgacgaacccccactcttctctatgccctcatatctgatggaagtgtacgaaaatgcaaagattgggacagtagtggggactgtcctcgcccaggatccagactctactaactcactggtcaggtacttcataaactataacgtcgaggacgaccggttcttcaacatcgacgcgaataccgggaccattcgcactaccaaggtcctcgatagggaggagactccttggtataatatcacagtgaccgcttccgaaatcgataatccggatttactttcccacgtgaccgtgggcatccgcgtcctcgatgtcaacgacaatcccccagagctcgcaagagaatatgatatcatagtctgtgaaaacagtaaacctgggcaggtcatccataccatatcggccaccgacaaggatgacttcgcaaatggacccaggttcaacttctttttagatgagaggttgccggtgaatcccaactttacactgaaagataatgaggataatactgcaagtattttgacccggaggcgcagattctctagaacagttcaggacgtgtattatttgcctattatgatctcagacggcggtattccatccctctcttcatccagcactcttacaattcgtgtgtgtgcctgtgaaagggatggccgagtacgtacgtgccacgccgaggctttcctctcttcggcaggactgagtaccggagctctaattgcgatattgctgtgcgtcttgattttgctggcaatagtcgtgctgttcatcacccttcgcaggagtaaaaaggagcccctaatcatcagtgaggaagacgtgcgggaaaacgtggtgacatacgatgacgagggcggtggtgaggaggatacggaagctttcgacatcaccgctctccgtaacccttctgccgctgaggagctgaagtatcgcagggatataaggcctgaggttaagctgactccgcgacaccagacctctagcactttagaatccatcgatgtgcaagagttcatcaagcagcgactcgccgaggcggatctcgaccctagcgtccccccttatgacagtttacaaacctacgcctatgaaggacagagatctgaggcgggaagcatctcttccttagactccgctacaacacagtctgatcaggactatcattacctcggtgattggggccctgagttcaaaaagttagctgagctgtatggcgaaattgagtctgagcgcaccacatag

SEQ ID NO: 110806 - DNA, 2373 bp, Artificial Sequence
  derived and/or modified sequence
atgaagatcacaagtactagttgcatttgtcctgtcttggtctgcctctgtttcgtccagcggtgctacggaactgcccaccatagtagtatcaaggtgatgcggaatcagaccaagcacatagaaggcgagactgaagtccaccacaggccgaagcgtgggtgggtgtggaaccagttcttcgtgctcgaagagcacatgggaccggatccccaatatgttggcaagttacatagcaactcagataagggcgacgggagcgtgaagtatattctcactggggagggagccggaacaattttcattattgatgacaccactggggatattcacagcacaaagtcactggaccgcgagcaaaagactcattacgttcttcatgctcaggccattgaccgcaggacaaacaagccattagagccggaaagcgagttcattatcaaagtccaagacatcaatgataatgccccaaaattcacagacgggccatatatcgtgacagtccctgagatgagcgacatgggcactagcgtgcttcaggtgaccgccacggatgccgacgatccaacgtacggaaatagtgctagagtggtgtactctattctgcagggccagccctacttttctgtggaccccaagactggcgtgatccgaaccgcactgcacaatatggatcgcgaggccagagaacactactccgtggtgattcaagcaaaggacatggcaggacaggtcggcggtttgtcagggtccacaaccgtgaatattaccctaaccgacgtgaacgataatcctcctagatttccacagaaacactaccagttgtatgtacctgagagcgctcaagtggggtcagccgtgggcaaaatcaaagcaaatgacgctgacactggaagtaatgccgatatgacatactctattatcaatggggatggcatgggcatcttctcgatttctacagacaaggaaactagggagggcatcctttcactaaagaagcctctgaactacgaaaagaagaagtcctacacgttgaatattgaaggtgctaatacgcatctcgattttcggttctctcatttagggccttttaaggacgcaactatgctgaagatcatagtgggcgacgttgacgagcccccattgtttagcatgccctcatatctgatggaggtctacgaaaacgcgaagattgggactgtggtgggaacagttctggcccaagatccggactcgaccaacagtctcgtcaggtatttcattaattacaacgtcgaagacgaccgcttcttcaacatcgatgccaacaccggtactattcggacgacaaaagtactcgatcgcgaagagactccttggtacaatattacggtcacagcttccgagatcgacaacccagatctgctgagtcacgtgacagttgggatcagggtgctggacgtcaacgataatccccctgaattggcacgcgagtacgacatcatcgtatgcgagaattccaagccgggacaagtgatccacacaatttccgctacggataaagacgattttgccaatggccctaggttcaacttcttcctggatgaacgtcttccagtgaaccctaattttacattaaaagacaacgaagataacacggcatctattttgaccaggagacgccgtttttctaggacagtccaggacgtctattacctgccaattatgatctccgatgggggtatcccctccctttcttcgtcaagtacgttaaccatcagagtgtgtgcctgcgagcgagacggtcgggtacggacgtgccatgcggaggctttcctctcctctgctggtctctccactggcgcactgatcgcgatcctcttatgcgtccttatcttgcttgcaattgtcgtactgtttatcacattaagacggtcgaagaaggaacctctcattatcagcgaggaggacgtgcgagaaaatgtcgtcacatacgacgacgaagggggaggcgaggaggacaccgaggcatttgatatcaccgctttgaggaacccgagtgccgctgaggaactgaagtatcggagagatattcgcccagaggtgaaactgacgcctaggcaccaaacatctagtaccctggaatccattgacgtccaggaattcatcaagcaacgcttagcagaggccgatttggatccttctgtgccaccttatgactctttgcagacctacgcatacgagggtcaacggtctgaggctggcagcatttcctcactggattcagccacaacgcagtctgaccaggattaccattacctcggggactggggtcccgagtttaagaaattggctgagctctacggcgaaatcgaatccgaaaggacaacttag

SEQ ID NO: 110807 - DNA, 2885 bp, Artificial Sequence
  derived and/or modified sequence
tttaagtactgcagtcatctaatgtacttcaccagcagaatctaaattctagatccaagaaagattattgtcagctggctttattcagggtccaattctgagcccagtatcaagtaataaagattgagtggtgtgataattagagatgcttcaaccaaagttttcaaaaatgggaacatattgaacccttggttctacaactaccttcttacaacgaagttagtatgcagtgctctccaagtcaataaggaaagtggttgaaaatggttgcttgtgttcaactactgtgaagagttggaatcagacaactacggctttgattttccaagtggttcagaatgtaaatatgatctgacctttccctgatggacagttaaatcatggacacgctaaacaatttactttggactgtccttcctaaagatgctctggcttctctcttgaatgctcactaagctttcgtagctgacaaggaaaggaaggaaaactgtgaactggaaagttatcttacaatgaaaattactagcacatcttgcatctgtccagtcctagtgtgtctctgttttgtgcagaggtgttatggaactgctcaccacagctccatcaaggtgatgagaaaccaaaccaaacacattgaaggtgaaaccgaagtccatcatcgtcccaaaaggggatgggtatggaatcagttctttgttttagaagaacatatgggaccagatcctcagtatgttggaaagctgcactccaattctgacaaaggtgatggatctgtcaagtacatccttactggagagggtgctgggactatatttatcattgacgataccacgggtgatatccactcaacaaaaagcctagacagagagcagaagacccactatgtgcttcatgctcaagctattgatagacgtacaaacaaacctcttgagcctgaatccgagttcatcatcaaagtgcaagacatcaatgacaacgctccaaaattcacagatggaccatacattgttactgtgcctgaaatgtcagatatgggtacctctgttctacaggtgacagctactgatgcagatgaccctacctatggaaacagcgctcgggtggtttacagcattctccaaggacaaccctacttctccgtcgaccctaaaacaggagttattagaacggccttacataacatggacagagaagccagagaacattactccgtagtcattcaagccaaagacatggctgggcaagttggagggctttcaggatctacaacagtcaacatcaccttaaccgatgtcaatgacaacccaccacgctttcctcaaaaacactatcagctatatgttcctgagtcagctcaagttggttcagctgttgggaaaatcaaggcaaatgatgctgacactggctcaaatgctgacatgacctactccatcataaatggtgatggcatgggaatattctcaatctccactgacaaagagaccagagaaggaatcctttctttaaagaagccactgaactatgagaaaaagaagtcatataccctcaacatagaaggagcaaatacacatcttgattttcgcttttctcacttgggtccttttaaagatgctactatgctgaagatcattgttggggatgtagatgaaccaccactattttccatgccttcctacctcatggaagtctacgaaaatgccaagattgggaccgtcgttggtacagttttggcacaagatcctgacagtactaacagcttagtaagatacttcatcaactacaatgttgaagacgacagatttttcaacattgatgccaatactgggaccattaggactacaaaggttctcgacagagaagaaactccatggtacaacatcacagtcactgcttcagaaattgataatcctgatttgctgagccatgtcacagtgggtattagagttctggatgtcaatgacaatccacccgaacttgccagggaatatgatattattgtatgtgaaaattctaagcctggccaggttattcataccatcagtgccactgataaagatgattttgccaatggaccaaggtttaacttctttcttgatgaacgcctgcctgtaaatccaaacttcactctgaaggacaatgaagataacacagccagcattctgacaaggcggaggagatttagtcgaactgttcaggatgtgtattatctgcccattatgatctctgatggtggaatcccctctctcagcagcagcagcaccctcaccatcagggtttgtgcatgcgagagagatgggcgtgtgcggacctgccatgcagaagccttcctgtcctcggctggtttgagtacaggagccttaatcgctattcttctctgtgttctcattctcctggcaattgtggtactttttatcaccctgaggcgcagcaaaaaagagcccttgatcatttcagaagaggatgtacgggagaacgtggtcacctatgatgatgaaggaggcggagaggaagacacagaggcctttgacatcacagccttgaggaatccttctgctgctgaggagctcaagtaccggagggatatcagacctgaagtgaagctcactcccagacaccagacatcatccaccctggaaagcatagatgttcaggaatttattaagcaaagactggcagaagcagacctagaccctagcgttcccccttatgactctcttcagacttatgcctatgagggtcagagatcagaagctgggtctatcagctcgctggattcagcaacgacacaatcagaccaggattatcactaccttggagactggggacccgagtttaaaaagttagctgaactctatggagaaatagaatctgaaagaacaacttag

SEQ ID NO: 110808 - DNA, 3087 bp, Artificial Sequence
  derived and/or modified sequence
ggagcccagggctcgaggtgcgcggagcctgagtctgggctttccgaggacggcgagcagctgtgcccagagctctgggaaagtcccctctctttgcttcttataaattaagttcctttccaccagttagggcaagtccgccaagatagactgaagaggagcaagaacagaaacagggagccagttacagatctatcccaagaattctggggagagatgatggtgtctgcagcagagtgacagcagtggagattgagagaaaaggttgaaaatggttgcttgtgttcaactactgtgaagagttggaatcagacaactacggctttgattttccaagtggttcagaatgtaaatatgatctgacctttccctgatggacagttaaatcatggacacgctaaacaatttactttggactgtccttcctaaagatgctctggcttctctcttgaatgctcactaagctttcgtagctgacaaggaaaggaaggaaaactgtgaactggaaagttatcttacaatgaaaattactagcacatcttgcatctgtccagtcctagtgtgtctctgttttgtgcagaggtgttatggaactgctcaccacagctccatcaaggtgatgagaaaccaaaccaaacacattgaaggtgaaaccgaagtccatcatcgtcccaaaaggggatgggtatggaatcagttctttgttttagaagaacatatgggaccagatcctcagtatgttggaaagctgcactccaattctgacaaaggtgatggatctgtcaagtacatccttactggagagggtgctgggactatatttatcattgacgataccacgggtgatatccactcaacaaaaagcctagacagagagcagaagacccactatgtgcttcatgctcaagctattgatagacgtacaaacaaacctcttgagcctgaatccgagttcatcatcaaagtgcaagacatcaatgacaacgctccaaaattcacagatggaccatacattgttactgtgcctgaaatgtcagatatgggtacctctgttctacaggtgacagctactgatgcagatgaccctacctatggaaacagcgctcgggtggtttacagcattctccaaggacaaccctacttctccgtcgaccctaaaacaggagttattagaacggccttacataacatggacagagaagccagagaacattactccgtagtcattcaagccaaagacatggctgggcaagttggagggctttcaggatctacaacagtcaacatcaccttaaccgatgtcaatgacaacccaccacgctttcctcaaaaacactatcagctatatgttcctgagtcagctcaagttggttcagctgttgggaaaatcaaggcaaatgatgctgacactggctcaaatgctgacatgacctactccatcataaatggtgatggcatgggaatattctcaatctccactgacaaagagaccagagaaggaatcctttctttaaagaagccactgaactatgagaaaaagaagtcatataccctcaacatagaaggagcaaatacacatcttgattttcgcttttctcacttgggtccttttaaagatgctactatgctgaagatcattgttggggatgtagatgaaccaccactattttccatgccttcctacctcatggaagtctacgaaaatgccaagattgggaccgtcgttggtacagttttggcacaagatcctgacagtactaacagcttagtaagatacttcatcaactacaatgttgaagacgacagatttttcaacattgatgccaatactgggaccattaggactacaaaggttctcgacagagaagaaactccatggtacaacatcacagtcactgcttcagaaattgataatcctgatttgctgagccatgtcacagtgggtattagagttctggatgtcaatgacaatccacccgaacttgccagggaatatgatattattgtatgtgaaaattctaagcctggccaggttattcataccatcagtgccactgataaagatgattttgccaatggaccaaggtttaacttctttcttgatgaacgcctgcctgtaaatccaaacttcactctgaaggacaatgaagataacacagccagcattctgacaaggcggaggagatttagtcgaactgttcaggatgtgtattatctgcccattatgatctctgatggtggaatcccctctctcagcagcagcagcaccctcaccatcagggtttgtgcatgcgagagagatgggcgtgtgcggacctgccatgcagaagccttcctgtcctcggctggtttgagtacaggagccttaatcgctattcttctctgtgttctcattctcctggcaattgtggtactttttatcaccctgaggcgcagcaaaaaagagcccttgatcatttcagaagaggatgtacgggagaacgtggtcacctatgatgatgaaggaggcggagaggaagacacagaggcctttgacatcacagccttgaggaatccttctgctgctgaggagctcaagtaccggagggatatcagacctgaagtgaagctcactcccagacaccagacatcatccaccctggaaagcatagatgttcaggaatttattaagcaaagactggcagaagcagacctagaccctagcgttcccccttatgactctcttcagacttatgcctatgagggtcagagatcagaagctgggtctatcagctcgctggattcagcaacgacacaatcagaccaggattatcactaccttggagactggggacccgagtttaaaaagttagctgaactctatggagaaatagaatctgaaagaacaacttagggggtcagttcttgcaaccttgtggaatttgcttcctgagtaagtggatatacaacctcagcaatgacaaggaagaagtgtggaaacagtacttggaactgaggaagctggacacagctcctgtagaaacaagtgcccttttcatgatcgaaactgggttatttaattggaagaaagtaaaaaaaaaaaaaaaa

SEQ ID NO: 110809 - DNA, 3542 bp, Artificial Sequence
  derived and/or modified sequence
tagattgattatacagcagcagcatgagctgagtctcagagctgagcgagcgtcagggtgaaaaggaaagagagaaagagagagagagagaaaaaaaagcggggagagagagagagagaggaacacaaggtggggaggaagccagtgcacgttccatagcatcactactgtgactgcttgtacccgataatcttgctctgcagctccctcagtgaacaacttactgaggtgcctttctttttacaagaggatgtcagctctgagctccagcaagaaataacagacttcaccttggaatagctcatcttactcctgcatcattaaagcggattttcaaaagaaaacaaaaatcaagtcccctttccagttccactttcttccagcattgaacaggaacagtttcacgctccaggactcaaccacagcaatatgtaagaagaacacacaccaaacattcctgaagtgatttaaaagatggaatctcgctctgtctcccaggctggagtgcagtggcgcaatctcagctcattgcaacctccacctcctgggttcacgccattctcctgcctcagcctcctgagtagctgggactacaggcgcccgccaccacgccaggatagactgaagaggagcaagaacagaaacagggagccagttacagatctatcccaagaattctggggagagatgatggtgtctgcagcagagtgacagcagtggagattgagagaaaaggttgaaaatggttgcttgtgttcaactactgtgaagagttggaatcagacaactacggctttgattttccaagtggttcagaatgtaaatatgatctgacctttccctgatggacagttaaatcatggacacgctaaacaatttactttggactgtccttcctaaagatgctctggcttctctcttgaatgctcactaagctttcgtagctgacaaggaaaggaaggaaaactgtgaactggaaagttatcttacaatgaaaattactagcacatcttgcatctgtccagtcctagtgtgtctctgttttgtgcagaggtgttatggaactgctcaccacagctccatcaaggtgatgagaaaccaaaccaaacacattgaaggtgaaaccgaagtccatcatcgtcccaaaaggggatgggtatggaatcagttctttgttttagaagaacatatgggaccagatcctcagtatgttggaaagctgcactccaattctgacaaaggtgatggatctgtcaagtacatccttactggagagggtgctgggactatatttatcattgacgataccacgggtgatatccactcaacaaaaagcctagacagagagcagaagacccactatgtgcttcatgctcaagctattgatagacgtacaaacaaacctcttgagcctgaatccgagttcatcatcaaagtgcaagacatcaatgacaacgctccaaaattcacagatggaccatacattgttactgtgcctgaaatgtcagatatgggtacctctgttctacaggtgacagctactgatgcagatgaccctacctatggaaacagcgctcgggtggtttacagcattctccaaggacaaccctacttctccgtcgaccctaaaacaggagttattagaacggccttacataacatggacagagaagccagagaacattactccgtagtcattcaagccaaagacatggctgggcaagttggagggctttcaggatctacaacagtcaacatcaccttaaccgatgtcaatgacaacccaccacgctttcctcaaaaacactatcagctatatgttcctgagtcagctcaagttggttcagctgttgggaaaatcaaggcaaatgatgctgacactggctcaaatgctgacatgacctactccatcataaatggtgatggcatgggaatattctcaatctccactgacaaagagaccagagaaggaatcctttctttaaagaagccactgaactatgagaaaaagaagtcatataccctcaacatagaaggagcaaatacacatcttgattttcgcttttctcacttgggtccttttaaagatgctactatgctgaagatcattgttggggatgtagatgaaccaccactattttccatgccttcctacctcatggaagtctacgaaaatgccaagattgggaccgtcgttggtacagttttggcacaagatcctgacagtactaacagcttagtaagatacttcatcaactacaatgttgaagacgacagatttttcaacattgatgccaatactgggaccattaggactacaaaggttctcgacagagaagaaactccatggtacaacatcacagtcactgcttcagaaattgataatcctgatttgctgagccatgtcacagtgggtattagagttctggatgtcaatgacaatccacccgaacttgccagggaatatgatattattgtatgtgaaaattctaagcctggccaggttattcataccatcagtgccactgataaagatgattttgccaatggaccaaggtttaacttctttcttgatgaacgcctgcctgtaaatccaaacttcactctgaaggacaatgaagataacacagccagcattctgacaaggcggaggagatttagtcgaactgttcaggatgtgtattatctgcccattatgatctctgatggtggaatcccctctctcagcagcagcagcaccctcaccatcagggtttgtgcatgcgagagagatgggcgtgtgcggacctgccatgcagaagccttcctgtcctcggctggtttgagtacaggagccttaatcgctattcttctctgtgttctcattctcctggcaattgtggtactttttatcaccctgaggcgcagcaaaaaagagcccttgatcatttcagaagaggatgtacgggagaacgtggtcacctatgatgatgaaggaggcggagaggaagacacagaggcctttgacatcacagccttgaggaatccttctgctgctgaggagctcaagtaccggagggatatcagacctgaagtgaagctcactcccagacaccagacatcatccaccctggaaagcatagatgttcaggaatttattaagcaaagactggcagaagcagacctagaccctagcgttcccccttatgactctcttcagacttatgcctatgagggtcagagatcagaagctgggtctatcagctcgctggattcagcaacgacacaatcagaccaggattatcactaccttggagactggggacccgagtttaaaaagttagctgaactctatggagaaatagaatctgaaagaacaacttagggggtcagttcttgcaaccttgtggaatttgcttcctgagtaagtggatatacaacctcagcaatgacaaggaagaagtgtggaaacagtacttggaactgaggaagctggacacagctcctgtagaaacaagtgcccttttcatgatcgaaactgggttatttaattggaagaaagt

SEQ ID NO: 110810 - DNA, 3544 bp, Artificial Sequence
  derived and/or modified sequence
tagattgattatacagcagcagcatgagctgagtctcagagctgagcgagcgtcagggtgaaaaggaaagagagaaagagagagagagagaaaaaaaagcggggagagagagagagagaggaacacaaggtggggaggaagccagtgcacgttccatagcatcactactgtgactgcttgtacccgataatcttgctctgcagctccctcagtgaacaacttactgaggtgcctttctttttacaagaggatgtcagctctgagctccagcaagaaataacagacttcaccttggaatagctcatcttactcctgcatcattaaagcggattttcaaaagaaaacaaaaatcaagtcccctttccagttccactttcttccagcattgaacaggaacagtttcacgctccaggagctcaagaccataaataattttgtagcagcaaacaatacacttttatgtatttattgagaaggtggagtctcgctctgtctcccaggctggagtgcagtggcgcaatctcagctcattgcaacctccacctcctgggttcacgccattctcctgcctcagcctcctgagtagctgggactacaggcgcccgccaccacgccaggatagactgaagaggagcaagaacagaaacagggagccagttacagatctatcccaagaattctggggagagatgatggtgtctgcagcagagtgacagcagtggagattgagagaaaaggttgaaaatggttgcttgtgttcaactactgtgaagagttggaatcagacaactacggctttgattttccaagtggttcagaatgtaaatatgatctgacctttccctgatggacagttaaatcatggacacgctaaacaatttactttggactgtccttcctaaagatgctctggcttctctcttgaatgctcactaagctttcgtagctgacaaggaaaggaaggaaaactgtgaactggaaagttatcttacaatgaaaattactagcacatcttgcatctgtccagtcctagtgtgtctctgttttgtgcagaggtgttatggaactgctcaccacagctccatcaaggtgatgagaaaccaaaccaaacacattgaaggtgaaaccgaagtccatcatcgtcccaaaaggggatgggtatggaatcagttctttgttttagaagaacatatgggaccagatcctcagtatgttggaaagctgcactccaattctgacaaaggtgatggatctgtcaagtacatccttactggagagggtgctgggactatatttatcattgacgataccacgggtgatatccactcaacaaaaagcctagacagagagcagaagacccactatgtgcttcatgctcaagctattgatagacgtacaaacaaacctcttgagcctgaatccgagttcatcatcaaagtgcaagacatcaatgacaacgctccaaaattcacagatggaccatacattgttactgtgcctgaaatgtcagatatgggtacctctgttctacaggtgacagctactgatgcagatgaccctacctatggaaacagcgctcgggtggtttacagcattctccaaggacaaccctacttctccgtcgaccctaaaacaggagttattagaacggccttacataacatggacagagaagccagagaacattactccgtagtcattcaagccaaagacatggctgggcaagttggagggctttcaggatctacaacagtcaacatcaccttaaccgatgtcaatgacaacccaccacgctttcctcaaaaacactatcagctatatgttcctgagtcagctcaagttggttcagctgttgggaaaatcaaggcaaatgatgctgacactggctcaaatgctgacatgacctactccatcataaatggtgatggcatgggaatattctcaatctccactgacaaagagaccagagaaggaatcctttctttaaagaagccactgaactatgagaaaaagaagtcatataccctcaacatagaaggagcaaatacacatcttgattttcgcttttctcacttgggtccttttaaagatgctactatgctgaagatcattgttggggatgtagatgaaccaccactattttccatgccttcctacctcatggaagtctacgaaaatgccaagattgggaccgtcgttggtacagttttggcacaagatcctgacagtactaacagcttagtaagatacttcatcaactacaatgttgaagacgacagatttttcaacattgatgccaatactgggaccattaggactacaaaggttctcgacagagaagaaactccatggtacaacatcacagtcactgcttcagaaattgataatcctgatttgctgagccatgtcacagtgggtattagagttctggatgtcaatgacaatccacccgaacttgccagggaatatgatattattgtatgtgaaaattctaagcctggccaggttattcataccatcagtgccactgataaagatgattttgccaatggaccaaggtttaacttctttcttgatgaacgcctgcctgtaaatccaaacttcactctgaaggacaatgaagataacacagccagcattctgacaaggcggaggagatttagtcgaactgttcaggatgtgtattatctgcccattatgatctctgatggtggaatcccctctctcagcagcagcagcaccctcaccatcagggtttgtgcatgcgagagagatgggcgtgtgcggacctgccatgcagaagccttcctgtcctcggctggtttgagtacaggagccttaatcgctattcttctctgtgttctcattctcctggcaattgtggtactttttatcaccctgaggcgcagcaaaaaagagcccttgatcatttcagaagaggatgtacgggagaacgtggtcacctatgatgatgaaggaggcggagaggaagacacagaggcctttgacatcacagccttgaggaatccttctgctgctgaggagctcaagtaccggagggatatcagacctgaagtgaagctcactcccagacaccagacatcatccaccctggaaagcatagatgttcaggaatttattaagcaaagactggcagaagcagacctagaccctagcgttcccccttatgactctcttcagacttatgcctatgagggtcagagatcagaagctgggtctatcagctcgctggattcagcaacgacacaatcagaccaggattatcactaccttggagactggggacccgagtttaaaaagttagctgaactctatggagaaatagaatctgaaagaacaacttagggggtcagttcttgcaaccttgtggaatttgcttcctgagtaagtggatatacaacctcagcaatgacaaggaagaagtgtggaaacagtacttggaactgaggaagctggacacagctcctgtagaaacaagtgcccttttcatgatcgaaactgggttatttaattggaagaaagt

SEQ ID NO: 110811 - DNA, 2373 bp, Artificial Sequence
  derived and/or modified sequence
atgaagatcaccagcaccagctgcatctgccccgtgctggtgtgcctgtgcttcgtgcagagatgctacggcaccgcccaccacagcagcatcaaggtgatgagaaaccagaccaagcacatcgagggcgagaccgaggtgcaccacagacccaagagaggctgggtgtggaaccagttcttcgtgctggaggagcacatgggccccgacccccagtacgtgggcaagctgcacagcaacagcgacaagggcgacggcagcgtgaagtacatcctgaccggcgagggcgccggcaccatcttcatcatcgacgacaccaccggcgacatccacagcaccaagagcctggacagagagcagaagacccactacgtgctgcacgcccaggccatcgacagaagaaccaacaagcccctggagcccgagagcgagttcatcatcaaggtgcaggacatcaacgacaacgcccccaagttcaccgacggcccctacatcgtgaccgtgcccgagatgagcgacatgggcaccagcgtgctgcaggtgaccgccaccgacgccgacgaccccacctacggcaacagcgccagagtggtgtacagcatcctgcagggccagccctacttcagcgtggaccccaagaccggcgtgatcagaaccgccctgcacaacatggacagagaggccagagagcactacagcgtggtgatccaggccaaggacatggccggccaggtgggcggcctgagcggcagcaccaccgtgaacatcaccctgaccgacgtgaacgacaacccccccagattcccccagaagcactaccagctgtacgtgcccgagagcgcccaggtgggcagcgccgtgggcaagatcaaggccaacgacgccgacaccggcagcaacgccgacatgacctacagcatcatcaacggcgacggcatgggcatcttcagcatcagcaccgacaaggagaccagagagggcatcctgagcctgaagaagcccctgaactacgagaagaagaagagctacaccctgaacatcgagggcgccaacacccacctggacttcagattcagccacctgggccccttcaaggacgccaccatgctgaagatcatcgtgggcgacgtggacgagccccccctgttcagcatgcccagctacctgatggaggtgtacgagaacgccaagatcggcaccgtggtgggcaccgtgctggcccaggaccccgacagcaccaacagcctggtgagatacttcatcaactacaacgtggaggacgacagattcttcaacatcgacgccaacaccggcaccatcagaaccaccaaggtgctggacagagaggagaccccctggtacaacatcaccgtgaccgccagcgagatcgacaaccccgacctgctgagccacgtgaccgtgggcatcagagtgctggacgtgaacgacaacccccccgagctggccagagagtacgacatcatcgtgtgcgagaacagcaagcccggccaggtgatccacaccatcagcgccaccgacaaggacgacttcgccaacggccccagattcaacttcttcctggacgagagactgcccgtgaaccccaacttcaccctgaaggacaacgaggacaacaccgccagcatcctgaccagaagaagaagattcagcagaaccgtgcaggacgtgtactacctgcccatcatgatcagcgacggcggcatccccagcctgagcagcagcagcaccctgaccatcagagtgtgcgcctgcgagagagacggcagagtgagaacctgccacgccgaggccttcctgagcagcgccggcctgagcaccggcgccctgatcgccatcctgctgtgcgtgctgatcctgctggccatcgtggtgctgttcatcaccctgagaagaagcaagaaggagcccctgatcatcagcgaggaggacgtgagagagaacgtggtgacctacgacgacgagggcggcggcgaggaggacaccgaggccttcgacatcaccgccctgagaaaccccagcgccgccgaggagctgaagtacagaagagacatcagacccgaggtgaagctgacccccagacaccagaccagcagcaccctggagagcatcgacgtgcaggagttcatcaagcagagactggccgaggccgacctggaccccagcgtgcccccctacgacagcctgcagacctacgcctacgagggccagagaagcgaggccggcagcatcagcagcctggacagcgccaccacccagagcgaccaggactaccactacctgggcgactggggccccgagttcaagaagctggccgagctgtacggcgagatcgagagcgagagaaccacctag

SEQ ID NO: 110812 - protein, 240 aa, Artificial Sequence
  derived and/or modified sequence
MDQDGDQQLGPSRILAPQTLKEIDDVYEKYKKEDDLNQKKRLQQLLQRALINSQELGDEKIQIVTQMLELVENRARQMELHSQCFQDPAESERASDKAKMDSSQPERSSRRPRRQRTSESRDLCHMANGIEDCDDQPPKEKKSKSAKKKKRSKAKQEREASPVEFAIDPNEPTYCLCNQVSYGEMIGCDNEQCPIEWFHFSCVSLTYKPKGKWYCPKCRGDNEKTMDKSTEKTKKDRRSR

SEQ ID NO: 110813 - DNA, 723 bp, Artificial Sequence
  derived and/or modified sequence
atggatcaggatggtgatcagcaactggggcccagcagaattctggcaccccagaccctgaaagagatcgacgatgtatacgagaaatataagaaggaggatgacctgaatcagaagaaacgtctgcagcagttactgcagcgggccctgatcaatagtcaagagctgggagatgaaaaaatacagattgtcacccagatgttggagctggttgagaatcgtgctcgccaaatggagcttcatagccaatgcttccaggaccctgctgagtccgaacgcgcttcagataaggcaaagatggactctagtcaacctgagaggtcctcccgaagaccacggcggcagcggacttccgagagtagggacctttgtcatatggctaatggaattgaagactgtgatgaccagcctcccaaggagaagaaatctaagtcagcaaaaaaaaaaaagagaagcaaggctaagcaggagcgagaagcctcgcctgtggaattcgccatagaccctaatgagccgacatactgcctatgtaaccaggtgagctacggagaaatgataggttgtgacaatgagcagtgtcccatcgagtggttccatttcagctgtgtgtctctaacctacaagcccaaggggaagtggtactgccccaagtgccggggggacaacgagaagactatggacaagagcaccgagaagaccaagaaggaccgcagaagtaggtag

SEQ ID NO: 110814 - DNA, 783 bp, Artificial Sequence
  derived and/or modified sequence
agtccgaatcggggtttgcagcatgttttgcggtgatgtttccaacctctttcccagtcaatggatcaggacggcgatcagcagctcggaccgtcgcggatcctggctccgcaaacgttaaaggaaattgatgatgtctacgaaaaatataagaaagaagatgatttaaaccagaagaaacgtctacagcagcttctccagagagcactaattaatagtcaagaattgggagatgaaaaaatacagattgttacacaaatgctcgaattggtggaaaatcgggcaagacaaatggagttacactcacagtgtttccaagatcctgctgaaagtgaacgagcctcagataaagcaaagatggattccagccaaccagaaagatcttcaagaagaccccgcaggcagcggaccagtgaaagccgtgatttatgtcacatggcaaatgggattgaagactgtgatgatcagccacctaaagaaaagaaatccaagtcagcaaagaaaaagaaacgctccaaggccaagcaggaaagggaagcttcacctgttgagtttgcaatagatcctaatgaacctacatactgcttatgcaaccaagtgtcttatggggagatgataggatgtgacaatgaacagtgtccaattgaatggtttcacttttcatgtgtttcacttacctataaaccaaaggggaaatggtattgcccaaagtgcaggggagataatgagaaaacaatggacaaaagtactgaaaagacaaaaaaggatagaagatcgaggtag

SEQ ID NO: 110815 - DNA, 723 bp, Artificial Sequence
  derived and/or modified sequence
atggaccaggatggagaccagcagctgggccccagccgcatcctggccccccagaccctgaaggagattgatgatgtgtatgagaagtacaagaaggaggatgacctgaaccagaagaagaggctgcagcagctgctgcagagggccctgatcaacagccaggagctgggagatgagaagatccagatcgtgacccagatgctggagctggtggagaacagagcccggcagatggagctgcacagccagtgcttccaggaccctgctgagagcgagcgggccagtgacaaggccaagatggacagcagccagcctgagaggagcagccggcggccccggcggcagaggaccagcgagagccgggacctgtgccacatggccaacggcatcgaggactgtgatgaccagccccccaaggagaagaagagcaagagcgccaagaagaagaagaggagcaaggccaagcaggagcgggaggccagccctgtggagtttgccatcgaccccaatgagcccacctactgcctgtgcaaccaggtgtcctatggagagatgattggctgtgacaatgagcagtgccccatcgagtggttccacttcagctgtgtgtccctgacctacaagcccaagggcaagtggtactgccccaagtgccgcggggacaatgagaagaccatggacaagagcacagagaagaccaagaaggacagaagaagcaggtag

SEQ ID NO: 110816 - DNA, 723 bp, Artificial Sequence
  derived and/or modified sequence
atggaccaggacggcgaccagcagctgggccccagccggatcctggcaccccagaccctgaaagaaattgacgacgtgtacgaaaagtacaagaaagaggatgacttgaatcagaagaagcgcttgcagcagttgcttcaacgggctttgatcaattctcaggaacttggcgatgagaaaatccagattgttactcagatgttagagctggtggaaaatcgtgctcggcagatggaacttcatagccagtgcttccaggatcctgctgagtcagaacgggcctctgataaagcgaagatggactcttcacagcccgaacgctcttcacgaagacctcgcagacaacgcacttccgaaagtcgcgatctatgccacatggctaatggaattgaagattgtgatgaccaacccccaaaagagaaaaaatccaagtcggcaaaaaaaaagaagcggtctaaggccaaacaagaacgcgaagcctcccccgtggagttcgcaattgaccctaatgagcccacatattgtctatgtaaccaggtgtcctatggcgagatgattggctgcgacaacgagcagtgccctatcgaatggttccatttttcctgcgtttctctaacatacaagcccaagggcaaatggtactgccctaaatgcagaggggataacgaaaaaaccatggacaaaagcactgaaaagacgaagaaagaccggcgctctcggtag

SEQ ID NO: 110817 - DNA, 723 bp, Artificial Sequence
  derived and/or modified sequence
atggatcaggatggagatcagcaactggggccttctaggatcctggccccacagacgctcaaggagatcgacgacgtgtatgagaagtacaaaaaagaagacgacttaaaccagaaaaagagacttcagcaactcctccagagggctttgattaactcacaggagttgggcgacgagaagatccagatcgtaacacagatgcttgaactggtggagaatagggcaaggcagatggagcttcatagtcagtgctttcaagaccccgcagagtctgagcgcgcatccgataaggccaagatggactcaagtcagccagaacggagctctcgtcgaccaagaaggcaaaggacctccgaatcacgcgatctctgtcatatggctaatgggatcgaggattgcgatgatcagcccccaaaggaaaaaaagagcaaatccgcaaagaagaagaagcggtcaaaggctaagcaggaaagagaagctagtcccgtggagttcgccattgatccgaatgagccaacctactgcttgtgcaatcaggtaagttatggcgagatgataggctgtgataatgaacagtgtcctatcgaatggtttcacttttcctgtgtgagtctgacgtataagcccaaaggaaaatggtattgtcctaagtgtagaggtgataacgaaaagacaatggacaagagcaccgaaaagacaaagaaggataggagatctcggtag

SEQ ID NO: 110818 - DNA, 723 bp, Artificial Sequence
  derived and/or modified sequence
atggaccaggacggcgaccagcagctgggccccagcagaatcctggccccccagaccctgaaggagatcgacgacgtgtacgagaagtacaagaaggaggacgacctgaaccagaagaagagactgcagcagctgctgcagagagccctgatcaacagccaggagctgggcgacgagaagatccagatcgtgacccagatgctggagctggtggagaacagagccagacagatggagctgcacagccagtgcttccaggaccccgccgagagcgagagagccagcgacaaggccaagatggacagcagccagcccgagagaagcagcagaagacccagaagacagagaaccagcgagagcagagacctgtgccacatggccaacggcatcgaggactgcgacgaccagccccccaaggagaagaagagcaagagcgccaagaagaagaagagaagcaaggccaagcaggagagagaggccagccccgtggagttcgccatcgaccccaacgagcccacctactgcctgtgcaaccaggtgagctacggcgagatgatcggctgcgacaacgagcagtgccccatcgagtggttccacttcagctgcgtgagcctgacctacaagcccaagggcaagtggtactgccccaagtgcagaggcgacaacgagaagaccatggacaagagcaccgagaagaccaagaaggacagaagaagcagatag

SEQ ID NO: 110819 - protein, 20 aa, Artificial Sequence
  derived and/or modified sequence
YSTGMVHLLLQVTIDGRNYI

SEQ ID NO: 110820 - protein, 290 aa, Artificial Sequence
  derived and/or modified sequence
MDIEAYLERIGYKKSRNKLDLETLTDILQHQIRAVPFENLNIHCGDAMDLGLEAIFDQVVRRNRGGWCLQVNHLLYWALTTIGFETTMLGGYVYSTPAKKYSTGMIHLLLQVTIDGRNYIVDAGFGRSYQMWQPLELISGKDQPQVPCVFRLTEENGFWYLDQIRREQYIPNEEFLHSDLLEDSKYRKIYSFTLKPRTIEDFESMNTYLQTSPSSVFTSKSFCSLQTPDGVHCLVGFTLTHRRFNYKDNTDLIEFKTLSEEEIEKVLKNIFNISLQRKLVPKHGDRFFTI

SEQ ID NO: 110821 - protein, 352 aa, Artificial Sequence
  derived and/or modified sequence
MLLLLLHKEAALEPQGPAVGYNSLPVSDDHHVSGIQARKKQQSVFWIKTEDQPTFNLLRKGIMDIEAYLERIGYKKSRNKLDLETLTDILQHQIRAVPFENLNIHCGDAMDLGLEAIFDQVVRRNRGGWCLQVNHLLYWALTTIGFETTMLGGYVYSTPAKKYSTGMIHLLLQVTIDGRNYIVDAGFGRSYQMWQPLELISGKDQPQVPCVFRLTEENGFWYLDQIRREQYIPNEEFLHSDLLEDSKYRKIYSFTLKPRTIEDFESMNTYLQTSPSSVFTSKSFCSLQTPDGVHCLVGFTLTHRRFNYKDNTDLIEFKTLSEEEIEKVLKNIFNISLQRKLVPKHGDRFFTI

SEQ ID NO: 110822 - DNA, 1059 bp, Artificial Sequence
  derived and/or modified sequence
atgctcctgctcctcctgcacaaggaggccgcccttgagccccagggtccagcggtcgggtacaacagcctcccggtaagcgacgatcaccatgtgagcggaatccaggcccgaaaaaaacaacaaagcgttttctggattaagacagaggaccaacccacgttcaatcttctgcgtaagggaattatggatattgaagcttacctcgagaggatcgggtataagaaatccaggaacaaactagacctggagacccttactgacattctccagcatcagatcagagccgttccctttgaaaacttgaatatccactgtggcgatgcaatggacctcggcctcgaggccatctttgatcaggtcgtaaggcgaaacagaggtgggtggtgcctgcaggtcaaccacttactgtattgggccttaacaaccatcggtttcgagacaaccatgttaggcggctacgtgtacagtacccctgccaagaagtattcaaccggtatgatccatctgcttttgcaggtcacaatcgacgggaggaattacattgttgacgctgggttcggacgatcttaccagatgtggcagccactggaactcatcagcggaaaagatcaaccacaggtgccgtgcgtgtttagattgacagaagagaacggattttggtatctggaccagatccggcgagaacaatacatcccaaacgaggagttcctgcatagcgacttgctggaagattctaagtatcgtaaaatctacagctttactctgaaaccacggaccatcgaagactttgagtccatgaacacatacttgcagacaagcccgtccagtgtctttacttctaagagcttctgctcactgcaaacacccgacggcgttcactgcttggtggggtttacactcacccaccggagatttaactacaaggataacacagacttaattgaattcaagacactgagtgaggaggagatcgagaaggttctgaaaaatatcttcaacataagtctgcagcgaaagcttgtgccaaaacatggggatcgatttttcactatttag

SEQ ID NO: 110823 - DNA, 1059 bp, Artificial Sequence
  derived and/or modified sequence
atgctgctgctgctgctgcacaaggaggccgccctggagccccagggccctgctgtgggctacaacagcctgcctgtgtctgatgaccaccacgtgtctggcatccaggccaggaagaagcagcagagcgtcttctggatcaagacagaggaccagcccaccttcaacctgctgaggaagggcatcatggacatcgaggcctacctggagcgcatcggctacaagaagagcaggaacaagctggacctggagaccctgacagacatcctgcagcaccagatccgggctgtgccctttgagaacctgaacatccactgtggagatgccatggacctgggcctggaggccatctttgaccaggtggtgagaagaaacagaggaggctggtgcctgcaggtgaaccacctgctgtactgggccctgaccaccatcggctttgagaccaccatgctgggcggctacgtgtacagcaccccagccaagaagtacagcacaggcatgatccacctgctgctgcaggtgaccattgatggaagaaactacatcgtggatgctggcttcggccgcagctaccagatgtggcagcccctggagctgatcagcggcaaggaccagccccaggtgccctgtgtgttccggctgacagaagaaaatggcttctggtacctggaccagatcagaagagagcagtacatccccaatgaggagttcctgcacagcgacctgctggaggacagcaagtacaggaagatctacagcttcaccctgaagcccaggaccatcgaggactttgagagcatgaacacctacctgcagaccagccccagctctgtgttcaccagcaagagcttctgcagcctgcagaccccagatggagtgcactgcctggtgggcttcaccctgacccaccggcgcttcaactacaaggacaacacagacctgattgagttcaagaccctgtctgaggaggagattgagaaggtgctgaagaacatcttcaacatcagcctgcagaggaagctggtgcccaagcatggagaccgcttcttcaccatctag

SEQ ID NO: 110824 - DNA, 1815 bp, Artificial Sequence
  derived and/or modified sequence
ctttggaagtgagagcacttcctcatagaccttggatgtgggaggattgcattcagtctagttcctggttgccggctgaaataacctgaattcaagccaggaagaagcagcaatctgtcttctggattaaaactgaagatcaacctactttcaacttactaagaaaggggatcatggacattgaagcatatcttgaaagaattggctataagaagtctaggaacaaattggacttggaaacattaactgacattcttcaacaccagatccgagctgttccctttgagaaccttaacatccattgtggggatgccatggacttaggcttagaggccatttttgatcaagttgtgagaagaaatcggggtggatggtgtctccaggtcaatcatcttctgtactgggctctgaccactattggttttgagaccacgatgttgggagggtatgtttacagcactccagccaaaaaatacagcactggcatgattcaccttctcctgcaggtgaccattgatggcaggaactacattgtcgatgctgggtttggacgctcataccagatgtggcagcctctggagttaatttctgggaaggatcagcctcaggtgccttgtgtcttccgtttgacggaagagaatggattctggtatctagaccaaatcagaagggaacagtacattccaaatgaagaatttcttcattctgatctcctagaagacagcaaataccgaaaaatctactcctttactcttaagcctcgaacaattgaagattttgagtctatgaatacatacctgcagacatctccatcatctgtgtttactagtaaatcattttgttccttgcagaccccagatggggttcactgtttggtgggcttcaccctcacccataggagattcaattataaggacaatacagatctaatagagttcaagactctgagtgaggaagaaatagaaaaagtgctgaaaaatatatttaatatttccttgcagagaaagcttgtgcccaaacatggtgatagattttttactatttagaataaggagtaaaacaatcttgtctatttgtcatccagctcaccagttatcaactgacgacctatcatgtatcttctgtacccttaccttattttgaagaaaatcctagacatcaaatcatttcacctataaaaatgtcatcatatataattaaacagctttttaaagaaacataaccacaaaccttttcaaataataataataataataataaaaaatgtattttaaagatggcctgtggttatcttggaaattggtgatttatgctagaaagcttttaatgttggtttattgttgaattcctagaaaagttttattggtagatgagtaaataaaatattgtaaaaaaacttattgtctataaagtatattaaaacattgttggctaatataatttgaaaaaaagtggttttttggaagacttaggatattatggtgctacataatttttcctcgatgctctcttcctctcatctttcttgtctcttaaattgctttacttccttgcacactttgccatacaagaatgaacatgagcttttcttgtgtagatctgagttgaaatcctgtggacactgggcgaattactttttagatctgtagctctgactcctcaggcataaaatgggaataatgcttttacagtttagtggcggaactaaactcccaaaattatttgttatatggatcaagtaataacgtcagtaatgtttttggtacaaagtcattatttaataaaagttattgttccatcttgcttgccccccca

SEQ ID NO: 110825 - DNA, 2280 bp, Artificial Sequence
  derived and/or modified sequence
caagtcacatagggataaatcacaatagttggtcaactgttgaatcttgatccttcaactaaacaatattcatgaactctgcagaaaaacaccagcattttgctcaacattcaggaccctctagaagttgcctcattctactctcctttcttacctttcttttacacagctctccaaaatgtccacaaaagtgacttaagtcaggttcccccaaaccagacaccaagacaagaatccatgtgtgtgtgactgaaggaagtgctgggagagccccagctgcagcctggatgtgaactgcaactccaaagtgtgtccagactcaaggcaagggcactaggctttccagacctcctactaagtcattgatccagcactgccctgccaggacataaatccctggcacctcttgctctctgcaaaggagggcaaagcagcttcaggagcccttgggagtcctccaaagagagtctagggtacaggtccgaaagtagaagaacacagaaggcaggccaggggcactgtgagatggtaaaagagatctgaagggatccagaattcaagccaggaagaagcagcaatctgtcttctggattaaaactgaagatcaacctactttcaacttactaagaaaggggatcatggacattgaagcatatcttgaaagaattggctataagaagtctaggaacaaattggacttggaaacattaactgacattcttcaacaccagatccgagctgttccctttgagaaccttaacatccattgtggggatgccatggacttaggcttagaggccatttttgatcaagttgtgagaagaaatcggggtggatggtgtctccaggtcaatcatcttctgtactgggctctgaccactattggttttgagaccacgatgttgggagggtatgtttacagcactccagccaaaaaatacagcactggcatgattcaccttctcctgcaggtgaccattgatggcaggaactacattgtcgatgctgggtttggacgctcataccagatgtggcagcctctggagttaatttctgggaaggatcagcctcaggtgccttgtgtcttccgtttgacggaagagaatggattctggtatctagaccaaatcagaagggaacagtacattccaaatgaagaatttcttcattctgatctcctagaagacagcaaataccgaaaaatctactcctttactcttaagcctcgaacaattgaagattttgagtctatgaatacatacctgcagacatctccatcatctgtgtttactagtaaatcattttgttccttgcagaccccagatggggttcactgtttggtgggcttcaccctcacccataggagattcaattataaggacaatacagatctaatagagttcaagactctgagtgaggaagaaatagaaaaagtgctgaaaaatatatttaatatttccttgcagagaaagcttgtgcccaaacatggtgatagattttttactatttagaataaggagtaaaacaatcttgtctatttgtcatccagctcaccagttatcaactgacgacctatcatgtatcttctgtacccttaccttattttgaagaaaatcctagacatcaaatcatttcacctataaaaatgtcatcatatataattaaacagctttttaaagaaacataaccacaaaccttttcaaataataataataataataataaaaaatgtattttaaagatggcctgtggttatcttggaaattggtgatttatgctagaaagcttttaatgttggtttattgttgaattcctagaaaagttttattggtagatgagtaaataaaatattgtaaaaaaacttattgtctataaagtatattaaaacattgttggctaatataatttgaaaaaaagtggttttttggaagacttaggatattatggtgctacataatttttcctcgatgctctcttcctctcatctttcttgtctcttaaattgctttacttccttgcacactttgccatacaagaatgaacatgagcttttcttgtgtagatctgagttgaaatcctgtggacactgggcgaattactttttagatctgtagctctgactcctcaggcataaaatgggaataatgcttttacagtttagtggcggaactaaactcccaaaattatttgttatatggatcaagtaataacgtcagtaatgtttttggtacaaagtcattatttaataaaagttattgttccatcttgcttgccccccca

SEQ ID NO: 110826 - DNA, 2162 bp, Artificial Sequence
  derived and/or modified sequence
gtgggaggattgcattcagtctagttcctggttgccggctgaaataacctgctctccaaaatgtccacaaaagtgacttaagtcaggttcccccaaaccagacaccaagacaagaatccatgtgtgtgtgactgaaggaagtgctgggagagccccagctgcagcctggatgtgaactgcaactccaaagtgtgtccagactcaaggcaagggcactaggctttccagacctcctactaagtcattgatccagcactgccctgccaggacataaatccctggcacctcttgctctctgcaaaggagggcaaagcagcttcaggagcccttgggagtcctccaaagagagtctagggtacaggtccgaaagtagaagaacacagaaggcaggccaggggcactgtgagatggtaaaagagatctgaagggatccagaattcaagccaggaagaagcagcaatctgtcttctggattaaaactgaagatcaacctactttcaacttactaagaaaggggatcatggacattgaagcatatcttgaaagaattggctataagaagtctaggaacaaattggacttggaaacattaactgacattcttcaacaccagatccgagctgttccctttgagaaccttaacatccattgtggggatgccatggacttaggcttagaggccatttttgatcaagttgtgagaagaaatcggggtggatggtgtctccaggtcaatcatcttctgtactgggctctgaccactattggttttgagaccacgatgttgggagggtatgtttacagcactccagccaaaaaatacagcactggcatgattcaccttctcctgcaggtgaccattgatggcaggaactacattgtcgatgctgggtttggacgctcataccagatgtggcagcctctggagttaatttctgggaaggatcagcctcaggtgccttgtgtcttccgtttgacggaagagaatggattctggtatctagaccaaatcagaagggaacagtacattccaaatgaagaatttcttcattctgatctcctagaagacagcaaataccgaaaaatctactcctttactcttaagcctcgaacaattgaagattttgagtctatgaatacatacctgcagacatctccatcatctgtgtttactagtaaatcattttgttccttgcagaccccagatggggttcactgtttggtgggcttcaccctcacccataggagattcaattataaggacaatacagatctaatagagttcaagactctgagtgaggaagaaatagaaaaagtgctgaaaaatatatttaatatttccttgcagagaaagcttgtgcccaaacatggtgatagattttttactatttagaataaggagtaaaacaatcttgtctatttgtcatccagctcaccagttatcaactgacgacctatcatgtatcttctgtacccttaccttattttgaagaaaatcctagacatcaaatcatttcacctataaaaatgtcatcatatataattaaacagctttttaaagaaacataaccacaaaccttttcaaataataataataataataataaaaaatgtattttaaagatggcctgtggttatcttggaaattggtgatttatgctagaaagcttttaatgttggtttattgttgaattcctagaaaagttttattggtagatgagtaaataaaatattgtaaaaaaacttattgtctataaagtatattaaaacattgttggctaatataatttgaaaaaaagtggttttttggaagacttaggatattatggtgctacataatttttcctcgatgctctcttcctctcatctttcttgtctcttaaattgctttacttccttgcacactttgccatacaagaatgaacatgagcttttcttgtgtagatctgagttgaaatcctgtggacactgggcgaattactttttagatctgtagctctgactcctcaggcataaaatgggaataatgcttttacagtttagtggcggaactaaactcccaaaattatttgttatatggatcaagtaataacgtcagtaatgtttttggtacaaagtcattatttaataaaagttattgttccatcttgcttgccccccca

SEQ ID NO: 110827 - DNA, 1446 bp, Artificial Sequence
  derived and/or modified sequence
gctgtttatcatttgactcatcatttaatcttgatttccagcttctcacacttgaaagaagacataatacatttctcacaggattctgggactattaactgaacttatgtgtgtaaaaggaattcatacaatgaaagcactagaaataattattatacttataaccattgtatttttacatgtttaaaatatagccataattagcctactcaaatccaagtgtaaaagtaaaatgatttgctttcgttttgttttccttgcttaggggatcatggacattgaagcatatcttgaaagaattggctataagaagtctaggaacaaattggacttggaaacattaactgacattcttcaacaccagatccgagctgttccctttgagaaccttaacatccattgtggggatgccatggacttaggcttagaggccatttttgatcaagttgtgagaagaaatcggggtggatggtgtctccaggtcaatcatcttctgtactgggctctgaccactattggttttgagaccacgatgttgggagggtatgtttacagcactccagccaaaaaatacagcactggcatgattcaccttctcctgcaggtgaccattgatggcaggaactacattgtcgatgctgggtttggacgctcataccagatgtggcagcctctggagttaatttctgggaaggatcagcctcaggtgccttgtgtcttccgtttgacggaagagaatggattctggtatctagaccaaatcagaagggaacagtacattccaaatgaagaatttcttcattctgatctcctagaagacagcaaataccgaaaaatctactcctttactcttaagcctcgaacaattgaagattttgagtctatgaatacatacctgcagacatctccatcatctgtgtttactagtaaatcattttgttccttgcagaccccagatggggttcactgtttggtgggcttcaccctcacccataggagattcaattataaggacaatacagatctaatagagttcaagactctgagtgaggaagaaatagaaaaagtgctgaaaaatatatttaatatttccttgcagagaaagcttgtgcccaaacatggtgatagattttttactatttagaataaggagtaaaacaatcttgtctatttgtcatccagctcaccagttatcaactgacgacctatcatgtatcttctgtacccttaccttattttgaagaaaatcctagacatcaaatcatttcacctataaaaatgtcatcatatataattaaacagctttttaaagaaacataaccacaaaccttttcaaataataataataataataataaaaaatgtattttaaagatggcctgtggttatcttggaaattggtgatttatgctagaaagcttttaatgttggtttattgttgaattc

SEQ ID NO: 110828 - DNA, 1967 bp, Artificial Sequence
  derived and/or modified sequence
aacagattgacccagtcgacaggatctgaacttccagtgaccatcccaggaacagaaagcaactgtgttaccagttctgcttttcctggacctgttccaagctctcacgttccacatcacacatgggacatctagtgtcaggctcccagagagcaggaaccaggtgaaatataagagcacagtcctcccagccggtggcatggggataatcggacaatacaactctccacccttttttatgaattcaagccaggaagaagcagcaatctgtcttctggattaaaactgaagatcaacctactttcaacttactaagaaaggggatcatggacattgaagcatatcttgaaagaattggctataagaagtctaggaacaaattggacttggaaacattaactgacattcttcaacaccagatccgagctgttccctttgagaaccttaacatccattgtggggatgccatggacttaggcttagaggccatttttgatcaagttgtgagaagaaatcggggtggatggtgtctccaggtcaatcatcttctgtactgggctctgaccactattggttttgagaccacgatgttgggagggtatgtttacagcactccagccaaaaaatacagcactggcatgattcaccttctcctgcaggtgaccattgatggcaggaactacattgtcgatgctgggtttggacgctcataccagatgtggcagcctctggagttaatttctgggaaggatcagcctcaggtgccttgtgtcttccgtttgacggaagagaatggattctggtatctagaccaaatcagaagggaacagtacattccaaatgaagaatttcttcattctgatctcctagaagacagcaaataccgaaaaatctactcctttactcttaagcctcgaacaattgaagattttgagtctatgaatacatacctgcagacatctccatcatctgtgtttactagtaaatcattttgttccttgcagaccccagatggggttcactgtttggtgggcttcaccctcacccataggagattcaattataaggacaatacagatctaatagagttcaagactctgagtgaggaagaaatagaaaaagtgctgaaaaatatatttaatatttccttgcagagaaagcttgtgcccaaacatggtgatagattttttactatttagaataaggagtaaaacaatcttgtctatttgtcatccagctcaccagttatcaactgacgacctatcatgtatcttctgtacccttaccttattttgaagaaaatcctagacatcaaatcatttcacctataaaaatgtcatcatatataattaaacagctttttaaagaaacataaccacaaaccttttcaaataataataataataataataaaaaatgtattttaaagatggcctgtggttatcttggaaattggtgatttatgctagaaagcttttaatgttggtttattgttgaattcctagaaaagttttattggtagatgagtaaataaaatattgtaaaaaaacttattgtctataaagtatattaaaacattgttggctaatataatttgaaaaaaagtggttttttggaagacttaggatattatggtgctacataatttttcctcgatgctctcttcctctcatctttcttgtctcttaaattgctttacttccttgcacactttgccatacaagaatgaacatgagcttttcttgtgtagatctgagttgaaatcctgtggacactgggcgaattactttttagatctgtagctctgactcctcaggcataaaatgggaataatgcttttacagtttagtggcggaactaaactcccaaaattatttgttatatggatcaagtaataacgtcagtaatgtttttggtacaaagtcattatttaataaaagttattgttccatcttgcttgccccccc

SEQ ID NO: 110829 - DNA, 2332 bp, Artificial Sequence
  derived and/or modified sequence
acttcctcatagaccttggatgtgggaggattgcattcagtctagttcctggttgccggctgaaataacctgaccgagagcatcaccccctgaacatggacttgcagaattccacagaagagaggagactggcctagacagacagccccaggagctgagggcccaacaggctttctaccctggatgctgctcccatgccctgacatgaggcccactacaatgctctccaaaatgtccacaaaagtgacttaagtcaggttcccccaaaccagacaccaagacaagaatccatgtgtgtgtgactgaaggaagtgctgggagagccccagctgcagcctggatgtgaactgcaactccaaagtgtgtccagactcaaggcaagggcactaggctttccagacctcctactaagtcattgatccagcactgccctgccaggacataaatccctggcacctcttgctctctgcaaaggagggcaaagcagcttcaggagcccttgggagtcctccaaagagagtctagggtacaggtccgaaagtagaagaacacagaaggcaggccaggggcactgtgagatggtaaaagagatctgaagggatccagaattcaagccaggaagaagcagcaatctgtcttctggattaaaactgaagatcaacctactttcaacttactaagaaaggggatcatggacattgaagcatatcttgaaagaattggctataagaagtctaggaacaaattggacttggaaacattaactgacattcttcaacaccagatccgagctgttccctttgagaaccttaacatccattgtggggatgccatggacttaggcttagaggccatttttgatcaagttgtgagaagaaatcggggtggatggtgtctccaggtcaatcatcttctgtactgggctctgaccactattggttttgagaccacgatgttgggagggtatgtttacagcactccagccaaaaaatacagcactggcatgattcaccttctcctgcaggtgaccattgatggcaggaactacattgtcgatgctgggtttggacgctcataccagatgtggcagcctctggagttaatttctgggaaggatcagcctcaggtgccttgtgtcttccgtttgacggaagagaatggattctggtatctagaccaaatcagaagggaacagtacattccaaatgaagaatttcttcattctgatctcctagaagacagcaaataccgaaaaatctactcctttactcttaagcctcgaacaattgaagattttgagtctatgaatacatacctgcagacatctccatcatctgtgtttactagtaaatcattttgttccttgcagaccccagatggggttcactgtttggtgggcttcaccctcacccataggagattcaattataaggacaatacagatctaatagagttcaagactctgagtgaggaagaaatagaaaaagtgctgaaaaatatatttaatatttccttgcagagaaagcttgtgcccaaacatggtgatagattttttactatttagaataaggagtaaaacaatcttgtctatttgtcatccagctcaccagttatcaactgacgacctatcatgtatcttctgtacccttaccttattttgaagaaaatcctagacatcaaatcatttcacctataaaaatgtcatcatatataattaaacagctttttaaagaaacataaccacaaaccttttcaaataataataataataataataaaaaatgtattttaaagatggcctgtggttatcttggaaattggtgatttatgctagaaagcttttaatgttggtttattgttgaattcctagaaaagttttattggtagatgagtaaataaaatattgtaaaaaaacttattgtctataaagtatattaaaacattgttggctaatataatttgaaaaaaagtggttttttggaagacttaggatattatggtgctacataatttttcctcgatgctctcttcctctcatctttcttgtctcttaaattgctttacttccttgcacactttgccatacaagaatgaacatgagcttttcttgtgtagatctgagttgaaatcctgtggacactgggcgaattactttttagatctgtagctctgactcctcaggcataaaatgggaataatgcttttacagtttagtggcggaactaaactcccaaaattatttgttatatggatcaagtaataacgtcagtaatgtttttggtacaaagtcattatttaataaaagttattgttccatcttgcttgccccccc

SEQ ID NO: 110830 - DNA, 1948 bp, Artificial Sequence
  derived and/or modified sequence
acttcctcatagaccttggatgtgggaggattgcattcagtctagttcctggttgccggctgaaataacctgaccgagagcatcaccccctgaacatggacttgcagaattccacagaagagaggagactggcctagacagacagccccaggagctgagggcccaacaggctttctaccctggatgctgctcccatgccctgacatgaggcccactacaatgaattcaagccaggaagaagcagcaatctgtcttctggattaaaactgaagatcaacctactttcaacttactaagaaaggggatcatggacattgaagcatatcttgaaagaattggctataagaagtctaggaacaaattggacttggaaacattaactgacattcttcaacaccagatccgagctgttccctttgagaaccttaacatccattgtggggatgccatggacttaggcttagaggccatttttgatcaagttgtgagaagaaatcggggtggatggtgtctccaggtcaatcatcttctgtactgggctctgaccactattggttttgagaccacgatgttgggagggtatgtttacagcactccagccaaaaaatacagcactggcatgattcaccttctcctgcaggtgaccattgatggcaggaactacattgtcgatgctgggtttggacgctcataccagatgtggcagcctctggagttaatttctgggaaggatcagcctcaggtgccttgtgtcttccgtttgacggaagagaatggattctggtatctagaccaaatcagaagggaacagtacattccaaatgaagaatttcttcattctgatctcctagaagacagcaaataccgaaaaatctactcctttactcttaagcctcgaacaattgaagattttgagtctatgaatacatacctgcagacatctccatcatctgtgtttactagtaaatcattttgttccttgcagaccccagatggggttcactgtttggtgggcttcaccctcacccataggagattcaattataaggacaatacagatctaatagagttcaagactctgagtgaggaagaaatagaaaaagtgctgaaaaatatatttaatatttccttgcagagaaagcttgtgcccaaacatggtgatagattttttactatttagaataaggagtaaaacaatcttgtctatttgtcatccagctcaccagttatcaactgacgacctatcatgtatcttctgtacccttaccttattttgaagaaaatcctagacatcaaatcatttcacctataaaaatgtcatcatatataattaaacagctttttaaagaaacataaccacaaaccttttcaaataataataataataataataaaaaatgtattttaaagatggcctgtggttatcttggaaattggtgatttatgctagaaagcttttaatgttggtttattgttgaattcctagaaaagttttattggtagatgagtaaataaaatattgtaaaaaaacttattgtctataaagtatattaaaacattgttggctaatataatttgaaaaaaagtggttttttggaagacttaggatattatggtgctacataatttttcctcgatgctctcttcctctcatctttcttgtctcttaaattgctttacttccttgcacactttgccatacaagaatgaacatgagcttttcttgtgtagatctgagttgaaatcctgtggacactgggcgaattactttttagatctgtagctctgactcctcaggcataaaatgggaataatgcttttacagtttagtggcggaactaaactcccaaaattatttgttatatggatcaagtaataacgtcagtaatgtttttggtacaaagtcattatttaataaaagttattgttccatcttgcttgccccccc

SEQ ID NO: 110831 - DNA, 2066 bp, Artificial Sequence
  derived and/or modified sequence
acttcctcatagaccttggatgtgggaggattgcattcagtctagttcctggttgccggctgaaataacctgaccgagagcatcaccccctgaacatggacttgcagaattccacagaagagaggagactggcctagacagacagccccaggagctgagggcccaacaggctttctaccctggatgctgctcccatgccctgacatgaggcccactacaatgacgtgtacagaagggccatgctgttattactcttacacaaggaggcagccctcgagccacagggtccagctgttggctataatagcctaccggtctctgatgatcaccatgtttctggaattcaagccaggaagaagcagcaatctgtcttctggattaaaactgaagatcaacctactttcaacttactaagaaaggggatcatggacattgaagcatatcttgaaagaattggctataagaagtctaggaacaaattggacttggaaacattaactgacattcttcaacaccagatccgagctgttccctttgagaaccttaacatccattgtggggatgccatggacttaggcttagaggccatttttgatcaagttgtgagaagaaatcggggtggatggtgtctccaggtcaatcatcttctgtactgggctctgaccactattggttttgagaccacgatgttgggagggtatgtttacagcactccagccaaaaaatacagcactggcatgattcaccttctcctgcaggtgaccattgatggcaggaactacattgtcgatgctgggtttggacgctcataccagatgtggcagcctctggagttaatttctgggaaggatcagcctcaggtgccttgtgtcttccgtttgacggaagagaatggattctggtatctagaccaaatcagaagggaacagtacattccaaatgaagaatttcttcattctgatctcctagaagacagcaaataccgaaaaatctactcctttactcttaagcctcgaacaattgaagattttgagtctatgaatacatacctgcagacatctccatcatctgtgtttactagtaaatcattttgttccttgcagaccccagatggggttcactgtttggtgggcttcaccctcacccataggagattcaattataaggacaatacagatctaatagagttcaagactctgagtgaggaagaaatagaaaaagtgctgaaaaatatatttaatatttccttgcagagaaagcttgtgcccaaacatggtgatagattttttactatttagaataaggagtaaaacaatcttgtctatttgtcatccagctcaccagttatcaactgacgacctatcatgtatcttctgtacccttaccttattttgaagaaaatcctagacatcaaatcatttcacctataaaaatgtcatcatatataattaaacagctttttaaagaaacataaccacaaaccttttcaaataataataataataataataaaaaatgtattttaaagatggcctgtggttatcttggaaattggtgatttatgctagaaagcttttaatgttggtttattgttgaattcctagaaaagttttattggtagatgagtaaataaaatattgtaaaaaaacttattgtctataaagtatattaaaacattgttggctaatataatttgaaaaaaagtggttttttggaagacttaggatattatggtgctacataatttttcctcgatgctctcttcctctcatctttcttgtctcttaaattgctttacttccttgcacactttgccatacaagaatgaacatgagcttttcttgtgtagatctgagttgaaatcctgtggacactgggcgaattactttttagatctgtagctctgactcctcaggcataaaatgggaataatgcttttacagtttagtggcggaactaaactcccaaaattatttgttatatggatcaagtaataacgtcagtaatgtttttggtacaaagtcattatttaataaaagttattgttccatcttgcttgccccccc

SEQ ID NO: 110832 - DNA, 1059 bp, Artificial Sequence
  derived and/or modified sequence
atgctgctgctgctgctgcacaaggaggccgccctggagccccagggtcctgcagttgggtataactccctgcccgtgagtgatgaccaccatgtctctggcatacaggccaggaagaagcagcagtcagtgttttggatcaagactgaggatcaaccaacatttaacctcctgagaaaaggcattatggacattgaagcatatctggaaagaattgggtataaaaagagccgcaacaagctcgacctggaaactctgacagacatcctccagcaccagatacgcgccgtcccgtttgaaaacctgaacatccattgtggggatgccatggacttgggcctggaggcaatttttgaccaggtcgtgaggaggaaccgcgggggatggtgcctgcaggtcaatcacctcctgtactgggccctgaccacgatcggtttcgagacaacaatgttaggtggctatgtgtacagcaccccagccaagaaatacagtactggcatgattcaccttctgctccaggtgacaatcgatggacggaattatattgtggatgccggattcggccgctcataccagatgtggcagcctctggagctgattagcggtaaggaccagccccaagtgccctgcgtctttcgcctgacagaggagaacggcttttggtacctcgaccagataaggcgggaacagtatatacctaacgaggaattcctccacagtgatctcctggaggatagcaaatatcgcaaaatatactcattcaccctgaaacctcgcacaatcgaggactttgagagtatgaacacatatctgcaaacaagccctagctcagtcttcaccagcaagtcgttctgtagtcttcagactccggacggggtccattgtctggtgggcttcacactgactcatcgcaggttcaactacaaagataacacagacctcatcgagttcaagacactctctgaggaggaaattgaaaaggtccttaaaaacatattcaacattagcttacagaggaaattggtccccaaacacggtgatcggttcttcacaatatag

SEQ ID NO: 110833 - DNA, 1059 bp, Artificial Sequence
  derived and/or modified sequence
atgctccttctgctcctgcacaaggaggcagctctggagccacagggaccagctgtcgggtacaactcccttcccgtgagcgatgatcaccacgtgagcggcattcaggccagaaaaaaacagcagagtgtcttctggatcaagacggaagatcagcctaccttcaacctcttaagaaagggaattatggacatcgaagcttacctggagaggattggatacaaaaaatcgcgaaacaagctggacctcgagaccctcaccgacatccttcagcaccagattagagctgttccctttgaaaatcttaatatccattgtggcgacgccatggatctgggactcgaggcaattttcgaccaggtcgtgcgtcggaatagaggtggatggtgcctccaggttaatcatctgctttactgggctctgaccaccatcggctttgagaccactatgctcggaggatacgtctacagcactccagcaaaaaaatacagcaccggcatgattcacttactgcttcaggtaacaatcgacgggaggaattatatcgtagatgctggcttcggcaggtcttaccaaatgtggcagcctttagagctgatctcaggcaaggatcagccgcaggtaccatgcgtgttccgtctcaccgaagaaaacgggttctggtatctggaccagatacggagggaacagtatatccccaatgaagagttcctccattccgacctcttggaggactccaagtaccggaaaatttacagcttcactttaaagcccagaacaatcgaagacttcgaatcaatgaacacatatctacagacctctccaagcagcgtgtttacaagcaaaagtttctgctccctgcagactcctgacggggttcactgtctggtgggctttacattaacacacagacggtttaactataaggacaatactgacctgatagagtttaaaacactctccgaggaggaaatcgagaaggttcttaaaaatattttcaacatttccctgcagcggaagctagtcccgaagcatggtgatcgtttcttcactatctag

SEQ ID NO: 110834 - DNA, 1059 bp, Artificial Sequence
  derived and/or modified sequence
atgctgctgctgctgctgcacaaggaggccgccctggagccccagggccccgccgtgggctacaacagcctgcccgtgagcgacgaccaccacgtgagcggcatccaggccagaaagaagcagcagagcgtgttctggatcaagaccgaggaccagcccaccttcaacctgctgagaaagggcatcatggacatcgaggcctacctggagagaatcggctacaagaagagcagaaacaagctggacctggagaccctgaccgacatcctgcagcaccagatcagagccgtgcccttcgagaacctgaacatccactgcggcgacgccatggacctgggcctggaggccatcttcgaccaggtggtgagaagaaacagaggcggctggtgcctgcaggtgaaccacctgctgtactgggccctgaccaccatcggcttcgagaccaccatgctgggcggctacgtgtacagcacccccgccaagaagtacagcaccggcatgatccacctgctgctgcaggtgaccatcgacggcagaaactacatcgtggacgccggcttcggcagaagctaccagatgtggcagcccctggagctgatcagcggcaaggaccagccccaggtgccctgcgtgttcagactgaccgaggagaacggcttctggtacctggaccagatcagaagagagcagtacatccccaacgaggagttcctgcacagcgacctgctggaggacagcaagtacagaaagatctacagcttcaccctgaagcccagaaccatcgaggacttcgagagcatgaacacctacctgcagaccagccccagcagcgtgttcaccagcaagagcttctgcagcctgcagacccccgacggcgtgcactgcctggtgggcttcaccctgacccacagaagattcaactacaaggacaacaccgacctgatcgagttcaagaccctgagcgaggaggagatcgagaaggtgctgaagaacatcttcaacatcagcctgcagagaaagctggtgcccaagcacggcgacagattcttcaccatctag

SEQ ID NO: 110835 - DNA, 2339 bp, Artificial Sequence
  derived and/or modified sequence
ggctgcgccacgtcggcgcgcggcggccgcgcccccttaacggcagtggcactcacccggctcgcgcggccccggcgccccacgcgcgcgcgtcgttctcccgcccgctcgctccccggcgctcacacctgagctcactcgcgcacgcccgcccggcccgagaaccgcgccgccgcctcggccccgcggaagccccgccgcgtcatgtcttcgcctcccgaagggaaactagagactaaagctggacacccgcccgccgtgaaagctggtggaatgcgaattgtgcagaaacacccacatacaggagacaccaaagaagagaaagacaaggatgaccaggaatgggaaagccccagtccacctaaacccactgtgttcatctctggggtcatcgcccggggtgacaaagatttccccccggcggctgcgcaggtggctcaccagaagccgcatgcctccatggacaagcatccttccccaagaacccagcacatccagcagccacgcaagtgagcctggagtccaccagcctgccccatggccccggctctgctgcacttggtatttccctgacagagagaaccagcagtttcgcccaaatcctactctgctgggaaatctaaggcaaaaccaagtgctctgtcctttgccttacatttccatatttaaaactagaaacagctccagcccaaaccttgtttatggggagtctggttggatgtcatttgaggatcattgtgcccctagaggtgccattagcagaatttgccaagatccgagaaaaattttagctttagttctatttcagcagtcacctgacgtccttgtctatggtcttaaaaacaagaaggcacacatttgagaagatgagattaaggttaggagaaaacctcagtcattgcatgctttttagtatgggccaataaaatctcaacacctgtgggagagtaagaactaagggaatgagtttgggcggcccctcataaaggaccttagaggcagggaacagcaatgccaaatttccctctctcgtgagatgggggatcctgtgcaggctgatgaggcacccatgagaaaagccgaaaaagcatgcatcttagaaatagcccctcaattccaggagtcaacatgccaaagaatgaggctggagacaggtagctccgagggaggacttctggcatgagatctcggcacggcaagcccagcatcgcctcagcccagacaggctccaccaggagatcaagcaagggctgcctttcaggagtcacctcctgagccacttcagagttctggaagtgaccacggaccagggtggaggaatagacttctagttcattctgggacacttgagccagagagttgaaagcttggaaagaccagataagaaacctgccctttgtctccctagggacatgagacaccacattccatttgtgctagaaaaacctatccactgatgagtctaactgttccaaacgcctcccacctggtgtgcacagctgcctgggtccattgtcacttgggtgcatcaggttgtcctccgatttttagatgagtttcctgtctagagatgtcctagtctgctcactggctggtggcagtagggtaccctgcgtcctcgaaaagccagagggttcacctagtcagacgaaactccagaacagtgcttgtggagggcctgactgtcctgctcacccacagccgatctgctgcaggtcagcaactgtgtcgtgagcagctgccaaccaccagcctttctggtgctgttctccagttcacgtctgccagctggtgagggcagaggcagacctggtcagacccagcgcccctcctccctgagggagcatggcacagcctcacacttgaaagacggtgtttggtttcccatctaatcaacttaagggaagccggcatgtacccttcaaggccctgtcaccacctatttcctgatcagttggtataaactgagggtggcttttagagacccagacttggttggcagcgctgccatggaacaccccagcaagcacctcccagcctgcctttcggagcagcacccaggaggggatgccgcgctccagcaacaccaggtcaggcctgtgcagacccctgccctgccgctgcagaaatccagaagcatccttaatgcttctcagtcttcagccagagggagggctgttatttccagaggtgcgctttttatgtacttttagctagatgtggcatgcatctgtgagctttagatcattaaatccaaaatgtttgcctaaatgagtttatcagttgttaacttcaagaatattaaatgatttataataaagctcctgcatttctctcca

SEQ ID NO: 110836 - protein, 499 aa, Artificial Sequence
  derived and/or modified sequence
MPLVKRNIEPRHLCRGALPEGITSELECVTNSTLAAIIRQLSSLSKHAEDIFGELFNEANNFYIRANSLQDRIDRLAVKVTQLDSTVEEVSLQDINMKKAFKSSTVQDQQVVSKNSIPNPVADIYNQSDKPPPLNILTPYRDDKKDGLKFYTDPSYFFDLWKEKMLQDTEDKRKEKRRQKREKHKLNPNRNQQVNVRKVRTRKEEWERRKMGIEFMSDAKKLEQAGSAKEDRVPSGSHASDVTDYSYPATPNHSLHPQPVTPSYAAGDVPPHGPASQAAEHEYRPPSASARHMALNRPQQPPPPPPPQAPEGSQASAPMAPADYGMLPAQIIEYYNPSGPPPPPPPPVIPSAQTAFVSPLQMPMQPPFPASASSTHAAPPHPPSTGLLVTAPPPPGPPPPPPGPPGPGSSLSSSPMHGPPVAEAKRQEPAQPPISDARSDLLAAIRMGIQLKKVQEQREQEAKREPVGNDVATILSRRIAVEYSDSDDDSEFDENDWSD

SEQ ID NO: 110837 - DNA, 1500 bp, Artificial Sequence
  derived and/or modified sequence
atgcccctggtgaagagaaacatcgagcccagacacctgtgcagaggcgccctgcccgagggcatcaccagcgagctggagtgcgtgaccaacagcaccctggccgccatcatcagacagctgagcagcctgagcaagcacgccgaggacatcttcggcgagctgttcaacgaggccaacaacttctacatcagagccaacagcctgcaggacagaatcgacagactggccgtgaaggtgacccagctggacagcaccgtggaggaggtgagcctgcaggacatcaacatgaagaaggccttcaagagcagcaccgtgcaggaccagcaggtggtgagcaagaacagcatccccaaccccgtggccgacatctacaaccagagcgacaagcccccccccctgaacatcctgaccccctacagagacgacaagaaggacggcctgaagttctacaccgaccccagctacttcttcgacctgtggaaggagaagatgctgcaggacaccgaggacaagagaaaggagaagagaagacagaagagagagaagcacaagctgaaccccaacagaaaccagcaggtgaacgtgagaaaggtgagaaccagaaaggaggagtgggagagaagaaagatgggcatcgagttcatgagcgacgccaagaagctggagcaggccggcagcgccaaggaggacagagtgcccagcggcagccacgccagcgacgtgaccgactacagctaccccgccacccccaaccacagcctgcacccccagcccgtgacccccagctacgccgccggcgacgtgcccccccacggccccgccagccaggccgccgagcacgagtacagaccccccagcgccagcgccagacacatggccctgaacagaccccagcagccccccccccccccccccccccaggcccccgagggcagccaggccagcgcccccatggcccccgccgactacggcatgctgcccgcccagatcatcgagtactacaaccccagcggcccccccccccccccccccccccccgtgatccccagcgcccagaccgccttcgtgagccccctgcagatgcccatgcagccccccttccccgccagcgccagcagcacccacgccgcccccccccacccccccagcaccggcctgctggtgaccgccccccccccccccggcccccccccccccccccccggcccccccggccccggcagcagcctgagcagcagccccatgcacggcccccccgtggccgaggccaagagacaggagcccgcccagccccccatcagcgacgccagaagcgacctgctggccgccatcagaatgggcatccagctgaagaaggtgcaggagcagagagagcaggaggccaagagagagcccgtgggcaacgacgtggccaccatcctgagcagaagaatcgccgtggagtacagcgacagcgacgacgacagcgagttcgacgagaacgactggagcgactag

SEQ ID NO: 110838 - DNA, 1500 bp, Artificial Sequence
  derived and/or modified sequence
atgcctttagtcaagagaaacattgagccccgccacctgtgcaggggcgccctgcccgaaggcatcacaagcgagctggagtgcgtcacgaactccacccttgccgctataattcgccagctgtctagcttatcaaagcacgctgaagacatcttcggagagttatttaatgaagcaaacaacttctacatcagggcaaatagcttgcaagatcggatcgatcggctcgccgtgaaggtcacacagctggatagcacggtggaggaagtcagcctgcaggatatcaatatgaagaaagctttcaagagctcaacagtgcaagaccagcaggtcgtaagtaaaaactctattcccaatccggttgcagatatttacaatcagagcgataagcctccccctctgaacatattgaccccttatcgcgatgacaagaaagatggcctgaaattttataccgacccaagttacttctttgatctatggaaggaaaagatgctgcaagatactgaggataagaggaaggagaaacgccgacagaaacgggagaaacacaaactcaaccccaatcgaaaccagcaagtgaatgttcggaaggttaggacacgcaaggaagaatgggagaggcgcaaaatgggcattgagtttatgtctgatgccaagaagcttgagcaggctggaagtgctaaggaggatagagtgccgtccggatcccatgcgtcagatgtgaccgactacagctatccagccacaccgaaccacagcctccatccacagcctgttaccccaagctatgccgctggagacgtccccccccatggcccagcttcccaagcagccgagcacgagtataggcccccgtcagcatcggctcggcacatggctctcaatcgcccacagcaaccacctcctccaccgcccccacaagcacccgagggaagccaagcaagtgcgcccatggccccagctgactatggaatgttgcccgctcaaatcattgagtattataaccccagcggcccgcctcccccacctcccccacccgtgatcccttccgcacagactgcgtttgtctcccctctccaaatgccaatgcaacctccatttcccgcttccgcctcatctactcatgctgcaccaccacatcctccatctaccggcctcttagtgacagctccacccccgccaggacctcccccaccacctcccgggccaccgggacctggctctagcctcagctcttctcctatgcacggtccccctgtagccgaagccaaaagacaggaacccgcccagcctccgatctcagatgcaagaagcgatctgctggccgctatacgtatgggcatacagctgaagaaagtccaggagcagcgagaacaggaggccaaacgggagccagtgggcaatgatgtggcaactattctgtcacggcggatagcggtcgaatactctgacagtgacgacgactccgagttcgatgagaacgactggtcagactag

SEQ ID NO: 110839 - DNA, 1500 bp, Artificial Sequence
  derived and/or modified sequence
atgcccctggtgaagaggaacatcgagcccaggcacctgtgccgcggggccctgcctgagggcatcaccagcgagctggagtgtgtgaccaacagcaccctggccgccatcatccggcagctgagcagcctgagcaagcatgctgaggacatctttggagagctgttcaatgaggccaacaacttctacatccgggccaacagcctgcaggacagaattgaccggctggccgtgaaggtgacccagctggacagcacagtggaggaggtgtccctgcaggacatcaacatgaagaaggccttcaagagcagcacagtgcaggaccagcaggtggtgtccaagaacagcatccccaaccctgtggccgacatctacaaccagagcgacaagcccccacccctgaacatcctgaccccctacagagatgacaagaaggatggcctgaagttctacacagaccccagctacttctttgacctgtggaaggagaagatgctgcaggacacagaggacaagaggaaggagaagaggcggcagaagcgggagaagcacaagctgaaccccaacagaaaccagcaggtgaatgtgaggaaggtgaggaccaggaaggaggagtgggagaggaggaagatgggcatcgagttcatgtctgatgccaagaagctggagcaggccggcagcgccaaggaggacagagtgcccagcggcagccacgccagtgatgtgacagactacagctacccagccacccccaaccacagcctgcacccccagcctgtgacccccagctatgctgctggagatgtgcccccccacggccctgccagccaggccgctgagcacgagtacagacctccttctgccagcgcccggcacatggccctgaaccggccccagcagcccccacctcctcctccaccccaggcccctgagggcagccaggccagcgcccccatggccccagctgactatggcatgctgcctgcccagatcatcgagtactacaaccccagcggccccccacctcctcctcctcctcctgtgatccccagcgcccagacagcctttgtgagccccctgcagatgcccatgcagccccccttccctgccagcgccagcagcacccatgctgccccaccccacccccccagcacaggcctgctggtgacagcccctcctcctcctggccccccacctcctcctcctggccccccaggccctggcagcagcctgagcagcagccccatgcacggcccccctgtggccgaggccaagaggcaggagcccgcccagccccccatcagtgatgcccggagtgacctgctggccgccatccgcatgggcatccagctgaagaaggtgcaggagcagcgggagcaggaggccaagcgggagcctgtgggcaatgatgtggccaccatcctgagcagaagaattgctgtggagtacagcgacagtgatgatgacagcgagtttgatgaaaatgactggagcgactag

SEQ ID NO: 110840 - DNA, 1500 bp, Artificial Sequence
  derived and/or modified sequence
atgcccctggtgaagcggaacatcgagccccggcacctgtgccggggggctctgcccgaggggatcacctccgaacttgaatgcgtgactaattcgacactggcggccattatccggcaactatcgagtctgtcgaaacacgccgaggatatttttggtgagctctttaatgaggctaacaacttctatatacgggccaacagcctgcaggatcggatagatcgtctggctgtgaaggtgacacagttagatagcactgttgaggaggtgtcattgcaggatataaatatgaaaaaggcgtttaagtcatctactgttcaggaccagcaggtggtctctaaaaactcaattccaaaccccgtcgctgatatttacaaccaatctgacaagcctcctcccctaaacattttgacgccctatcgggacgataagaaggatggactgaagttctatactgatccctcctatttctttgacctctggaaggagaagatgctgcaggacactgaagacaaacgcaaggaaaaacgccgacagaaacgcgagaagcataagctgaacccgaacaggaatcagcaagtgaatgtcaggaaggtgcgtacccggaaggaagaatgggagagacgcaaaatggggatcgagttcatgagtgatgcaaaaaagctggagcaggctgggagcgcaaaagaggacagggtcccttctgggtcccacgcgtccgacgtcacagactattcctatccagctactccaaatcactctctccaccctcagccagtgacacccagttacgctgctggcgacgtgcctccacacgggccagcttcccaagcagcagagcatgagtacagacctcctagcgcatctgctcgccatatggctctcaaccgtccacaacagccacctcccccaccccccccacaagcaccagaaggcagccaagcaagtgctcccatggcacccgcagattatggtatgctgcccgctcagattatcgagtactacaacccgtccggcccgccacctccgccacccccccccgtcataccctcagcgcagacagcatttgtttctcccctgcaaatgccaatgcaaccgccatttcctgcttctgcgtcatccactcatgcagctccacctcacccgccatctaccggtttgctggtcaccgcaccaccgcctccaggccccccgccgccacccccaggaccccccgggcccggaagcagcctgagttcttcacctatgcacgggccccctgtggccgaggcaaagagacaggaaccagcccagcccccaatatccgatgcacgatctgatctgctggcggcaatcaggatgggcatacagctgaagaaggtccaggagcagagggaacaggaggcaaagagggagcccgttggtaatgacgtagccactatcctgtcccggcggattgccgtggagtattcggatagcgatgacgattccgagttcgatgaaaatgactggtcagattag

SEQ ID NO: 110841 - DNA, 1500 bp, Artificial Sequence
  derived and/or modified sequence
atgccattggttaaacgcaatatcgagccgcgacacctttgccgcggagcactcccagagggaattacttctgaactggaatgtgtcaccaactctactcttgcagccattatccgccagttgtcaagcctgtcaaagcatgcagaggacatcttcggtgagttatttaatgaggcaaataatttttacattcgggctaattccctacaggatcggatcgatcgcctggctgttaaagttacccagctcgacagcacagttgaggaggtgagccttcaagacatcaatatgaagaaggcctttaagtcatccaccgtgcaggaccaacaggtggtgagcaaaaattccattcctaatccagttgccgatatctacaatcagtcagacaagccaccgccacttaatatcctgacaccttatagagacgataaaaaggatggcctgaagttctacaccgatcctagttacttctttgacctgtggaaagagaaaatgctgcaggacacagaggacaaaagaaaggagaagaggcgccaaaaacgtgaaaaacataaactgaatccaaatcgaaaccagcaggtgaatgtgcggaaggtccgtacacgcaaggaagagtgggagcggagaaaaatggggatcgagttcatgtctgacgccaagaagctggagcaggctgggtccgctaaggaagatagagtgccatctggctctcatgcctctgacgtgacggactattcttacccagcaacgccaaaccactcccttcacccacaacctgtgaccccctcctacgccgctggggatgtccctcctcatggtccagcgtcacaggccgctgaacacgagtacagacccccatccgccagtgcacgtcatatggctctcaaccgtcctcagcagccccctcccccaccaccgccacaggctccagaaggatcacaggcttctgcccctatggcacctgctgactatgggatgctgccagcacaaatcatcgaatactataatccttcgggaccccctccaccaccccctcctcctgtgataccctccgctcagaccgcctttgtctctccattacagatgcctatgcaacccccattccctgctagcgcttctagcacgcacgcggcacctccccaccctccatcaactggcctgctggtaaccgcacccccaccacccggaccaccccctccaccacctgggcctcccggacccggatcatctctgtcatcctcacctatgcatggtccccctgtcgctgaggcaaagcgacaggagcctgcgcaaccccctatcagcgacgccaggagcgacttgctcgcggcaattcggatgggtattcagctcaaaaaggtgcaggagcagagggaacaagaagcaaagcgcgaacccgtgggtaacgacgtggcgacaattctgtccaggcggatcgctgtggaatacagcgacagcgatgacgactccgagtttgacgaaaatgactggtcggactag

SEQ ID NO: 110842 - DNA, 4805 bp, Artificial Sequence
  derived and/or modified sequence
gtcgctcgcgccgctgcgtgcggtgtggtgcgaggcgggtgcgccgggcggccgcggcgcggcgggaccatggagctcagagcgcagccccggcgccggcggcgggaccgcggaccgttttagttttgattgctgttaactactactgataactgagccaaagtggtgatgctacttgaggggaatttctgcaacccatagtcaacgattacatgattgtgaaccatgcctttagtgaagaggaacattgagccccggcacttgtgccggggagctctgcctgaagggattaccagcgaacttgaatgtgtaaccaatagtactcttgccgctatcatacgccagctgagcagtctgagcaaacatgctgaagacatatttggtgagttgtttaatgaggctaacaacttctacatcagagcaaattctcttcaagacagaattgatcgccttgctgtcaaagtcacccagctggattcaacagtggaagaggtctcactacaggatatcaacatgaaaaaagctttcaaaagttccacagtccaagaccagcaagtggtttcaaagaacagcattcctaatcctgttgctgatatttacaaccagagtgataagccaccgcctctgaacatcctgacaccatacagagatgacaagaaggatgggctgaagttctatactgatccttcctatttctttgacctctggaaagaaaaaatgctacaggacacagaagacaaaaggaaagagaaaaggcgtcaaaagagagagaaacacaagctgaaccctaacagaaaccagcaagtaaatgtgagaaaagtcagaacaagaaaagaagagtgggagagaaggaaaatgggcattgagtttatgagtgacgcaaagaaactggagcaggcagggagcgccaaagaggacagagtgcccagcgggtcacatgcatcggacgttacggattactcttacccggctactcccaaccattctctgcacccccagcctgtgaccccttcctatgcagctggtgacgtgccaccacacgggcctgcaagccaggctgcggagcatgagtaccggcccccatctgcctcggcgaggcacatggccctcaacagacctcagcagccgccccccccgcctccccctcaggccccagaggggtcccaggcctctgcaccgatggctccagcagactacgggatgctcccagcgcagataattgagtattacaacccatccggaccacctcctccgccacctcctcctgtgattccctcagcacaaactgccttcgtcagccctctccagatgcccatgcagcccccgttccctgcatcagccagctccacgcacgcagctcctcctcacccaccctccaccgggctcctggtcacagccccgccacccccgggcccaccacctcccccgccaggccctcctggtcccgggtcttctctttcgtcctccccaatgcatggccccccagtagctgaggcgaagcggcaagagcctgcacagccaccaatcagtgatgctcgaagcgacctcctcgctgctattcgaatgggaattcaactgaaaaaggtgcaggagcagcgggagcaggaggccaagcgggagccagtggggaatgacgtggccacgatcctgtcccggcgcattgccgtggagtacagcgactctgacgacgactcagagttcgacgagaacgactggtccgactgagcaaaggccggcggagaggccgcgtgtgggagcgtgttgaagattttaagtggtctctacacccaaatagtggtattctaatcccgtagcatagcaccttttgtataaacaatgtgatattgcttctgcacatccaaaaattctgggtcttttcagtatttactgtgtaatacttaagtgccactaaacatagcaaattgtgctgcacatgaggaaataggctgtcactatcacattgtcctgaaaacagcatctgctttcctcttggccatgagagtatttagtgcagtttgggtttactcttactgatcaatataactctgcagacttgctgtgtgtttgtgaagctgcctggtgttaggtctctgcaagactaatgactatgtcagagtgatgtcttccaaccagtaagtgatattgtttcaccgctttggtttttccttttgtttttttaaaggatgtgtttctgaataagttggttttagagggaaaggttcaacaaacagggagaatccagtgtttctgctttcagtttcttggcttggtagcctctgagtgaatctgatgctctgctgaataatttcattacctctgcacatgcctgtcaaatatgaaattggaagggcccttttcaggctgggttccctgtgggcatttgcttagtaaatgcctgttgatggtttttgcaagagaattcagcagctcaacagtaatgaaagtgaagaacagagtccattttccttcctggggccattggggatgacactcaagatacttgccagtctctccagtgtgggcaccagccggccagaacagatgcgagcagtccatgactctgggagctacaccgctgagctgggcagagctgcggcacagggcctgggctgcaaaggagccctgctcctttagtttcctgacacctgtgtcctgagtgagccgcaggagttcttagctcctcagcgagcaacagagagcactttagatggcacctttcaccacttggtcagaattttaaaagcttaggtttaggtgaaagtagatattgacagctattcacctttcacggtgctggggccagattagggatcactcccgtgaggagggccttcaccctgttctagaagcacatggttgtcctcctgttgttggcacattaaatgataaaaagcacctcatgagattcccttgatcagccctgcagctgtagtacagtgctgtgccctcacctccacccttcctgttgttcccacgtgggcaataccagggacccatggggaaactcaagaatgacagcttctatattttgtaattctggatgaaagataactgtgttgaacaaacaggtgctccaggctttgattatagatacgacttcaaaaatatgctaagacgcttgacttattaaggactttaacctactcaacagtatttcatatccattgtggttagttactcagttatgttgagaagaatctggagctaaaagcagagatgtttgaggtgacggtaggaatgtgagcaggatggtgatgggggtttttgttaaaatgcatctgagcaagtcagccagccccgaagtcccctcagtgtgtgtgtctcgagtggctacctgttgggcttgtgggcagtgattgtacagagcctgtccattgggtgcagtcatgtagatctgaagccctgaaaagcctcatgtctgcatcccctttccaaggctgcttccctggtgtgtctgttctctcctctgtcccaggtgctgggagcgtcctcttcagcgtcttttcctagagctggtcaccactaggctgtcactataaattccttgaatataagtaacagttattaatgaacttctaaatttctaatttctctctctctctcttttttttttttttgttgttgttaaaaagggcctactacattggcgctattcttaggacttctgcaacttttaaagtcttacttgtctttcttgttgcttttgtattaggagttccccgtgtgggtctagaactcccctttggtaatgcttctttgtttttttatggcccttctgttctcaggatggagagaacacagaagctactatccatgtcaggatttattctatttatatcttattacaataaaattagtggcactttattcataaatattcatgagcctgttaattgttagttgtcttcctgtagctgaatcaacaagttattttcaactcaattttatgacttgcgaaaaagcttttgccctgttgtgtaccataacatttaaaagaatggaaaatgactgaaatccaatttagattatttttagagtatttttccagcaaattcaatttattctgaaatttaaatccagatcttttctaatatggtattacaatgaaaagaataaagagaagatttgaattttcagtttcattttcaaaaactatttaccaaaacaaatggagaagaaacatccaaaagcacatttcatttctccaaactttgtgttttaaattatagttataaattgtaaggtaattttaaattgtccctcgtattatttctccacgtctgttttagtttaatgtctcctaagcttttctctcatagcgtagacctagggaagggatgggaagattgcccagtccccgatggctgcgcacacaggaggcggcggagcacaaggcaagtgagtttgcactgtcagccccagaccgtaagcttggctacactgatgtttttctttactaaggatactattcaaaaattaacattttcatctcagtaagtttttagaacatcaaaatgttttctgagctccaagtggctaggttgtaaaagttttataataatttgcaattaaaatacatgatacatattaatccattaaagactagtgggaatgtatcagccagagtagcaagtaatttttgttttataaatcatagtatctgtcatcttgcagtattaccaatgctgttgtaaattgaatttaaagtggtattaaaaaaaactgttaaacaatttttatctgtttgtatatcttactatagattatgtacaagtaacatctaaataaaattacacttttaaccc

SEQ ID NO: 110843 - protein, 72 aa, Artificial Sequence
  derived and/or modified sequence
MWADDAKKLCPDLLLAQVRESRGKANLTKYREASVEVMEIMSRFAVIERASIDEAYVDLTSAVQERLQKLQG

SEQ ID NO: 110844 - DNA, 1245 bp, Artificial Sequence
  derived and/or modified sequence
atggccactggccaggaccgcgtcgtggctcttgtagacatggactgcttcttcgtccaggtcgagcaaaggcagaaccctcatctgcggaacaagccatgcgctgtggtccagtacaaaagctggaaaggcgggggcatcatcgcggtcagttatgaagctcgggcgttcggggttacaaggtccatgtgggcagatgacgccaagaagttatgcccagacctgctcttggcccaagtgcgcgagtcccgtggaaaggcaaaccttaccaaataccgagaggcaagcgtggaagtgatggagatcatgagccgctttgcggtaatcgagcgcgcctctatcgatgaagcatacgtggacctgacatccgcggttcaagagaggttacaaaaactccagggccaaccaataagcgctgatctgctccctagcacatatattgaaggactgccgcaagggcctacaactgctgaagaaactgtccagaaggaaggaatgagaaagcaggggctgttccagtggctcgacagtttacagatcgacaacctaacctcccccgacctccaactgaccgtcggagccgtcatcgtggaggaaatgagagctgctattgaacgagaaactgggtttcagtgcagtgctggcatcagtcataataaggtgctggcgaagttggcctgcggtctgaataagccaaatagacaaaccctcgtttcccatggatcagttccacaactcttcagccaaatgccaattcgcaagatccggagtttaggaggaaagttgggcgccagcgtgatcgagatcctgggtatcgagtatatgggggaattgacacagtttaccgaaagccaactacagtcccactttggcgaaaaaaacggctcttggctgtacgcaatgtgccgtggcatcgagcacgacccggttaagcctcgacagctacctaagactatcggatgctctaagaacttccctgggaagacagctctggccactcgggagcaggtgcaatggtggttgttgcagttagcacaggaacttgaggagcggctcacgaaggaccgcaatgataatgacagggtggccactcagttggtggtctcgataagagtgcagggtgataagcgactgagttcactcaggagatgctgcgctctgactcgctacgatgctcataagatgtctcacgatgctttcaccgtgatcaagaactgtaacacatctggcattcagacagagtag

SEQ ID NO: 110845 - DNA, 219 bp, Artificial Sequence
  derived and/or modified sequence
atgtgggcagatgacgcaaaaaagctgtgcccagatttgcttctagctcaggtaagagaatccaggggtaaagcaaaccttacaaagtacagggaagcaagcgtggaggttatggagattatgtccagatttgccgtcatagagagagccagtattgacgaggcctatgtggacctgacttcggctgtgcaggaacgactccagaagttgcaggggtag

SEQ ID NO: 110846 - DNA, 1245 bp, Artificial Sequence
  derived and/or modified sequence
atggccaccggccaggacagagtggtggccctggtggacatggactgcttctttgtgcaggtggagcagaggcagaacccccacctgaggaacaagccctgtgctgtggtgcagtacaagtcctggaagggcggcggcatcatcgctgtgtcctatgaggcccgggcctttggagtgaccaggtccatgtgggcagatgatgccaagaagctgtgcccagacctgctgctggcccaggtgcgggagagccggggcaaggccaacctgaccaagtaccgggaggcctctgtggaggtgatggagatcatgagcagatttgctgtgattgagcgggccagcattgatgaggcctacgtggacctgaccagcgctgtgcaggagcggctgcagaagctgcagggccagcccatctctgctgacctgctgcccagcacctacatcgagggcctgccccagggccccaccacagctgaggagaccgtgcagaaggagggcatgaggaagcagggcctcttccagtggctggacagcctgcagattgacaacctgaccagcccagacctgcagctgactgtgggcgccgtcatcgtggaggagatgagagctgccatcgagcgggagaccggcttccagtgcagcgctggcatcagccacaacaaggtgctggccaagctggcctgtggcctgaacaagcccaaccggcagaccctggtgagccacggctctgtgccccagctgttcagccagatgcccatcaggaagatccgcagcctgggcggcaagctgggcgcctctgtgattgagatcctgggcatcgagtacatgggagagctgacccagttcacagagagccagctgcagagccactttggagagaagaatggctcctggctgtatgccatgtgccggggcattgaacatgaccctgtgaagccccggcagctgcccaagaccatcggctgcagcaagaacttccctgggaagacagccctggccacccgggagcaggtgcagtggtggctgctgcagctggcccaggagctggaggagcggctgaccaaggacagaaatgacaatgacagagtggccacccagctggtggtgtccatccgggtgcagggcgacaagaggctgagcagcctgcggcgctgctgtgccctgaccaggtatgatgcccacaagatgagccatgatgccttcaccgtcatcaagaactgcaacaccagcggcatccagacagaatag

SEQ ID NO: 110847 - DNA, 219 bp, Artificial Sequence
  derived and/or modified sequence
atgtgggcagatgatgccaagaagctgtgcccagacctgctgctggcccaggtgcgggagagccggggcaaggccaacctgaccaagtaccgggaggcctctgtggaggtgatggagatcatgagcagatttgctgtgattgagcgggccagcattgatgaggcctacgtggacctgaccagcgctgtgcaggagcggctgcagaagctgcagggctag

SEQ ID NO: 110848 - DNA, 1245 bp, Artificial Sequence
  derived and/or modified sequence
atggccaccggccaggaccgggtggtggccctggtggacatggactgtttcttcgtccaggtcgagcaacggcagaacccacatctccgcaacaaaccttgcgccgtagtgcaatataagtcctggaaagggggaggtataatagccgtgagttacgaagcaagggcatttggagttacaaggagcatgtgggctgatgatgccaagaagctttgtcccgatctgctgcttgcacaggtgcgcgagtcccgaggaaaggcaaatttgacaaaataccgggaggcctcagtagaggttatggagatcatgtcgcgcttcgctgtgatagaacgagcttctatcgatgaggcttacgttgaccttacatcagccgtacaggagaggttgcagaagttgcagggccagcccatctccgccgacctcctcccatccacatacatcgaaggcctgccgcagggtcctacaacagcagaagaaacagttcaaaaagagggaatgcgcaagcaaggactgtttcagtggcttgatagcctccagatcgataatctgacttcgcctgacttacaactgactgtgggagctgtgattgttgaagagatgagggccgctattgagcgggaaaccggcttccagtgttctgcaggcatctctcataacaaagtactcgcaaagctcgcctgtggacttaataagccaaacagacagacactggtaagtcatgggtctgttccccagctcttttctcagatgcccattaggaaaatcagaagtctgggtggaaagctcggggcctccgtgattgagatcttagggatagagtatatgggcgagcttacccaattcacagagtctcagctgcaatcccactttggtgagaagaatggcagctggttgtatgctatgtgccgtggaatcgaacacgatccagtcaaaccgcggcagctacctaagacaataggatgttccaaaaactttccaggcaaaacagctctcgctaccagagagcaggtgcaatggtggctgttgcagctggcccaagagttagaagagagactcaccaaagatcgtaatgataacgatagggtagccacgcagctggtggtatctatccgggtgcaaggtgataaaaggcttagctctctgcgaagatgctgcgcacttacccggtacgatgcccacaagatgtcacatgatgccttcactgtcattaagaactgtaatacctccggaatccaaacagaatag

SEQ ID NO: 110849 - DNA, 219 bp, Artificial Sequence
  derived and/or modified sequence
atgtgggccgacgacgccaagaagctgtgccccgacctgctgctggctcaggtccgggaaagccgcggaaaggcaaacctcaccaaatatagggaggcctccgtggaggtgatggagataatgtcaaggttcgcggtaattgagcgagctagcatcgacgaggcatacgtagatcttacatcagctgtccaggagcgcctgcagaaactgcaagggtag

SEQ ID NO: 110850 - DNA, 3322 bp, Artificial Sequence
  derived and/or modified sequence
ataaatctcgctcgaaactcactggaccgctcctagaaaggcgaaaagatattcaggagcccttccattttccttccagtaggcaccgaacccagcattttcggcaaccgctgctggcagttttgccaggtgtttgttaccttgaaaaatggctactggacaggatcgagtggttgctctcgtggacatggactgtttttttgttcaagtggagcagcggcaaaatcctcatttgaggaataaaccttgtgcagttgtacagtacaaatcatggaagggtggtggaataattgcagtgagttatgaagctcgtgcatttggagtcactagaagtatgtgggcagatgatgctaagaagttatgtccagatcttctactggcacaagttcgtgagtcccgtgggaaagctaacctcaccaagtaccgggaagccagtgttgaagtgatggagataatgtctcgttttgctgtgattgaacgtgccagcattgatgaggcttacgtagatctgaccagtgctgtacaagagagactacaaaagctacaaggtcagcctatctcggcagacttgttgccaagcacttacattgaagggttgccccaaggccctacaacggcagaagagactgttcagaaagaggggatgcgaaaacaaggcttatttcaatggctcgattctcttcagattgataacctcacctctccagacctgcagctcaccgtgggagcagtgattgtggaggaaatgagagcagccatagagagggagactggttttcagtgttcagctggaatttcacacaataaggtcctggcaaaactggcctgtggactaaacaagcccaaccgccaaaccctggtttcacatgggtcagtcccacagctcttcagccaaatgcccattcgcaaaatccgtagtcttggaggaaagctaggggcctctgtcattgagatcctagggatagaatacatgggtgaactgacccagttcactgaatcccagctccagagtcattttggggagaagaatgggtcttggctatatgccatgtgccgagggattgaacatgatccagttaaacccaggcaactacccaaaaccattggctgtagtaagaacttcccaggaaaaacagctcttgctactcgggaacaggtacaatggtggctgttgcaattagcccaggaactagaggagagactgactaaagaccgaaatgataatgacagggtagccacccagctggttgtgagcattcgtgtacaaggagacaaacgcctcagcagcctgcgccgctgctgtgcccttacccgctatgatgctcacaagatgagccatgatgcatttactgtcatcaagaactgtaatacttctggaatccagacagaatgacatcaccagcttcttgagcagtgacccaagttctctgccaaaggtgccagttaccagctcagaagctaagacccagggaagtggcccagcggtgacagccactaagaaagcaaccacgtctctggaatcattcttccaaaaagctgcagaaaggcagaaagttaaagaagcttcgctttcatctcttactgctcccactcaggctcccatgagcaattcaccatccaagccctcattaccttttcaaaccagtcaaagtacaggaactgagcccttctttaagcagaaaagtctgcttctaaagcagaaacagcttaataattcttcagtttcttccccccaacaaaacccatggtccaactgtaaagcattaccaaactctttaccaacagagtatccagggtgtgtccctgtttgtgaaggggtgtcgaagctagaagaatcctctaaagcaactcctgcagagatggatttggcccacaacagccaaagcatgcacgcctcttcagcttccaaatctgtgctggaggtgactcagaaagcaaccccaaatccaagtcttctagctgctgaggaccaagtgccctgtgagaagtgtggctccctggtaccggtatgggatatgccagaacacatggactatcattttgcattggagttgcagaaatcctttttgcagccccactcttcaaacccccaggttgtttctgccgtatctcatcaaggcaaaagaaatcccaagagccctttggcctgcactaataaacgccccaggcctgagggcatgcaaacattggaatcattttttaagccattaacacattagtgctgccctcaggcttgcctgtaggatttaatattttttatctttacagatctttatctttaatattttatctttacagatttccctgagaaagggaattatgaaatttttaatacaaaaaataatccatttaggtgctgagttacggtcccatctcttcacaggcatggattctaatcccactgctgacagagatgtaaaaattcatcctaccagagtttttaatctttagcatttagggaggcagtgtcataaagtaaaaagtgtgtgggccttggagtctaagagacgtggttgcaaacttagctctggttattgcaatgagggccttgaacaagtcattttcttcacattctcatctgtaaaatggagataataccttacagattattgcagattaataacaatgtattcaaattatgtaactcggccgggtacaatggctcacgcctgtaatcctaacactttgggaggccgaggcagacagatcacctgaggtcaggagtttgagaccagcctggccaacatggcaaaaccatctctactaaaaatagaaaaattagccaggcacgttccaggcacctgtgatcccagctacttagaggctgaggcagaagaattgctttaaccttggaggcggaggttgcattgagctgagatcatgctagtgcgctccagcctgggcaacagagcgagacttcatctcagaaaataaaaaataggggccaggcacagtggctcatacctgtaatgccagcactttgggaggccaaggcgggcagatcacgaggtcaggagtttcagaccaatatggtgaaaccccatctctactaaaattacaaaaaaaattatccaggcgtggtggtgcacgcctgtaatcccagctactcaggaggctaaggcaggagaatcacttgaacccaggaggcagaggttggagtgagctgagatcgcgccaccgcactccagcctgggcaacagagcgagactccatctcaaacaaaaacaagaacaaaaacaaacataaagttggcacagaaaagggaccaagtttaaaaaagggttttaaatgtaatgagacttgcatagttaaaaaaaaaaaa

SEQ ID NO: 110851 - DNA, 331 bp, Artificial Sequence
  derived and/or modified sequence
agtaggcaccgaacccagcattttcggcaaccgctgctggcagttttgccaggtgtttgttaccttgaataattgcagtgagttatgaagctcgtgcatttggagtcactagaagtatgtgggcagatgatgctaagaagttatgtccagatcttctactggcacaagttcgtgagtcccgtgggaaagctaacctcaccaagtaccgggaagccagtgttgaagtgatggagataatgtctcgttttgctgtgattgaacgtgccagcattgatgaggcttacgtagatctgaccagtgctgtacaagagagactacaaaagctacaagg

SEQ ID NO: 110852 - DNA, 1245 bp, Artificial Sequence
  derived and/or modified sequence
atggctaccgggcaggaccgagtcgtcgcactggtggacatggattgcttctttgtgcaggtggaacagagacaaaatccgcatctgcgcaataaaccgtgcgcggttgttcagtataagtcctggaagggcggaggtatcattgctgtgtcttatgaagcgagagcatttggagttacccgctctatgtgggccgacgacgccaaaaagctatgtccagatctgctgttggcacaggttagagagagtcgcggtaaagccaacctaacgaagtaccgggaggccagtgttgaggtgatggaaatcatgtcccgcttcgcagtgatcgagagggctagtattgatgaagcctatgtggacctgacatccgccgtacaggaacgtttacagaagctacagggtcagcctatctccgctgatctgctcccgtctacttacatcgagggtctaccccaggggcctacaaccgctgaagagaccgtgcagaaggaaggcatgcgaaaacagggtctgttccagtggttagacagcctgcagattgataacctgactagtcctgacttgcagctgactgtcggcgctgtgattgtggaagagatgagagccgcaattgaaagagagacaggcttccagtgctccgccggaatctctcataacaaagtgctcgctaaactggcctgcggcctgaacaaacctaaccgccagacccttgtgagccacggaagtgtccctcagttgtttagccagatgccaattaggaagattcggagcctgggaggcaagctgggtgcctccgttatcgagatcttgggcattgaatatatgggtgagctgacacaattcaccgaatcacagttacagtctcattttggcgagaagaacgggagctggctgtacgccatgtgccgcggtattgaacacgatccggtcaagcctcggcagctgccaaagaccattgggtgcagcaagaacttcccaggcaaaaccgctctggccacccgcgagcaagttcaatggtggctactgcagcttgcccaggagctggaagagcgcctcaccaaagatcggaacgataatgatagggtggctacccagctggttgtgtccatccgggtacaaggcgataagagactttcttctttacgcaggtgctgtgccctcactcgttatgatgcccataaaatgtcccatgacgccttcactgttatcaagaattgtaacacaagcggaatccagacagagtag

SEQ ID NO: 110853 - DNA, 219 bp, Artificial Sequence
  derived and/or modified sequence
atgtgggcggatgatgccaaaaagctctgccctgatctgttgctagctcaggtgagagagagcagggggaaagccaatcttaccaagtatagagaagcatctgtggaagtcatggagattatgtctagattcgcagtcatcgaacgggctagtatcgacgaggcttacgtggatctgacatctgccgtccaagaaaggctgcagaagctccagggttag

SEQ ID NO: 110854 - DNA, 1245 bp, Artificial Sequence
  derived and/or modified sequence
atggccaccggccaggacagagtggtggccctggtggacatggactgcttcttcgtgcaggtggagcagagacagaacccccacctgagaaacaagccctgcgccgtggtgcagtacaagagctggaagggcggcggcatcatcgccgtgagctacgaggccagagccttcggcgtgaccagaagcatgtgggccgacgacgccaagaagctgtgccccgacctgctgctggcccaggtgagagagagcagaggcaaggccaacctgaccaagtacagagaggccagcgtggaggtgatggagatcatgagcagattcgccgtgatcgagagagccagcatcgacgaggcctacgtggacctgaccagcgccgtgcaggagagactgcagaagctgcagggccagcccatcagcgccgacctgctgcccagcacctacatcgagggcctgccccagggccccaccaccgccgaggagaccgtgcagaaggagggcatgagaaagcagggcctgttccagtggctggacagcctgcagatcgacaacctgaccagccccgacctgcagctgaccgtgggcgccgtgatcgtggaggagatgagagccgccatcgagagagagaccggcttccagtgcagcgccggcatcagccacaacaaggtgctggccaagctggcctgcggcctgaacaagcccaacagacagaccctggtgagccacggcagcgtgccccagctgttcagccagatgcccatcagaaagatcagaagcctgggcggcaagctgggcgccagcgtgatcgagatcctgggcatcgagtacatgggcgagctgacccagttcaccgagagccagctgcagagccacttcggcgagaagaacggcagctggctgtacgccatgtgcagaggcatcgagcacgaccccgtgaagcccagacagctgcccaagaccatcggctgcagcaagaacttccccggcaagaccgccctggccaccagagagcaggtgcagtggtggctgctgcagctggcccaggagctggaggagagactgaccaaggacagaaacgacaacgacagagtggccacccagctggtggtgagcatcagagtgcagggcgacaagagactgagcagcctgagaagatgctgcgccctgaccagatacgacgcccacaagatgagccacgacgccttcaccgtgatcaagaactgcaacaccagcggcatccagaccgagtag

SEQ ID NO: 110855 - DNA, 219 bp, Artificial Sequence
  derived and/or modified sequence
atgtgggccgacgacgccaagaagctgtgccccgacctgctgctggcccaggtgagagagagcagaggcaaggccaacctgaccaagtacagagaggccagcgtggaggtgatggagatcatgagcagattcgccgtgatcgagagagccagcatcgacgaggcctacgtggacctgaccagcgccgtgcaggagagactgcagaagctgcagggctag

SEQ ID NO: 110856 - DNA, 1215 bp, Artificial Sequence
  derived and/or modified sequence
atgatctctctgattattccacccaaagaccagatctcacgagtcgcaaaaatgctcgcagatgaatttgggacagccagcaacattaagtctcgagttaaccgcctcagtgtcctgggggctatcacatctgtccagcaacgcctgaaactgtacaataaggtgcctcccaatggtctggttgtgtattgcggcacaattgtgaccgaggagggaaaagaaaaaaaggtgaatattgacttcgaacctttcaagccaattaatacatcattatatctttgtgacaataaattccacactgaagccttaaccgccctgctctccgatgacagtaagttcggtttcatcgtcatagacgggagcggcgccctgttcgggaccctgcagggcaatactcgggaggtcctacacaagttcaccgtggatttacctaagaagcacggaagaggcgggcagagtgccctgcgtttcgctaggttaaggatggaaaagcgccacaattatgtgcggaaggtggccgagacggcagttcagctttttattagcggcgacaaagtaaacgtggccgggctcgtgctcgccggaagtgccgatttcaagacagagctctctcaaagtgacatgttcgaccaacgcctacagtccaaggtgttgaaactcgttgatattagttatgggggggaaaacggattcaaccaggcaatagagttatcaacggaggtcctcagcaacgtgaaatttatccaggaaaagaaactgattgggagatatttcgacgaaattagccaggataccgggaaatactgcttcggcgtggaggatacgctgaaagccctcgagatgggggccgtggagatattgatagtttacgagaacctggacataatgcgttatgtgctgcattgtcagggaacggaggaagagaaaattctctaccttaccccagagcaggagaaggataagtcccacttcacggataaggagaccggccaggaacatgagttgattgaatcaatgcctctgttggaatggtttgcaaacaattataaaaaattcggagcaaccctcgaaatcgtgaccgacaagagccaggagggttctcagttcgtaaagggttttggaggaattggcgggatattacggtaccgtgtagacttccagggaatggagtatcaggggggcgatgacgaattcttcgacctggatgattactag

SEQ ID NO: 110857 - DNA, 1215 bp, Artificial Sequence
  derived and/or modified sequence
atgatcagcctcatcatcccccccaaggaccagatcagccgggtggccaagatgctggctgatgaatttggaacagccagcaacatcaagagccgggtgaaccggctgtctgtgctgggcgccatcacctctgtgcagcagaggctgaagctgtacaacaaggtgccccccaacggcctggtggtgtactgcggcaccatcgtgacagaggagggcaaggagaagaaggtgaacatcgactttgagcccttcaagcccatcaacaccagcctgtacctgtgtgacaacaagttccacacagaggccctgacagccctgctgagtgatgacagcaagtttggcttcatcgtgattgatggcagcggggccctgtttggcaccctgcagggcaacacccgggaggtgctgcacaagttcaccgtggacctgcccaagaagcacggccggggcggccagagcgccctgcgctttgcccggctgaggatggagaagaggcacaactacgtgaggaaggtggccgagacagctgtgcagctgttcatcagcggggacaaggtgaatgtggccggcctggtgctggccggcagcgctgacttcaagacagagctgagccagagcgacatgtttgaccagaggctgcagagcaaggtgctgaagctggtggacatctcctatggaggagaaaatggcttcaaccaggccatcgagctgagcacagaggtgctgagcaatgtgaagttcatccaggagaagaagctgattggccgctactttgatgagatcagccaggacaccgggaagtactgcttcggcgtggaggacaccctgaaggccctggagatgggcgctgtggagatcctgattgtgtatgagaacctggacatcatgagatatgtgctgcactgccagggcacagaggaggagaagatcctgtacctgaccccagagcaggagaaggacaagagccacttcacagacaaggagaccggccaggagcacgagctgattgagagcatgcccctgctggagtggtttgccaacaactacaagaagtttggagccaccctggagatcgtgacagacaagagccaggagggcagccagtttgtgaagggctttggaggcatcggcggcatcctgcgctacagagtggacttccagggcatggagtaccagggcggagatgatgagttctttgacctggatgactactag

SEQ ID NO: 110858 - DNA, 1215 bp, Artificial Sequence
  derived and/or modified sequence
atgatcagcctgatcatcccccccaaggaccagatcagccgggtggccaagatgttggctgatgagttcgggacagctagcaacatcaagtcacgcgtcaaccggctaagtgttctgggcgcgatcacatccgttcagcagaggcttaaactgtataacaaagtgcctccgaatggtttggtcgtttactgtggcacaattgtaactgaggaaggcaaggagaaaaaggtgaatatagactttgagccctttaagcctatcaatacctcattgtatctttgcgataacaagtttcacaccgaggccctcacagccctgctgtccgatgacagcaagtttggctttatcgtaatagatggctcaggagctctgtttggaaccctgcaggggaatactagggaggtattgcacaaattcactgtcgacctgccaaagaagcacgggaggggcggccagagcgctctgcgcttcgcacggctcaggatggagaagagacacaattatgtaagaaaggtggctgagacagctgtccagctattcatctcgggcgacaaagtgaacgtggcggggctcgtgctggccggctccgcggatttcaagacggagttgtcccagagcgatatgttcgatcagaggcttcagagtaaagtcctgaaactcgtcgatatttcctatggaggagaaaatggatttaatcaggccatagagctttccacagaggtcttaagcaacgtgaaattcatccaagagaagaagctgatagggaggtactttgatgaaattagtcaggatacagggaagtactgctttggagtggaggataccctcaaagccctggaaatgggcgctgttgaaatcctgatagtgtatgaaaatcttgatatcatgcgctatgtgctgcactgccaaggaaccgaggaggagaagatcctgtacctgacccccgaacaggagaaggataagtcccactttactgacaaggagaccgggcaggaacacgaactcatcgaaagtatgccgctgctcgaatggttcgccaacaattacaagaaattcggagccacactggagatagtcaccgacaagtcacaggagggttctcagttcgtgaaaggcttcggaggcatcggagggatactaaggtacagagtggatttccagggaatggagtatcaggggggtgatgacgaattcttcgacttggacgactattag

SEQ ID NO: 110859 - DNA, 1215 bp, Artificial Sequence
  derived and/or modified sequence
atgatttctctcatcattccccctaaggatcaaatatctagagtcgccaagatgctggcggacgagtttggaaccgcctctaatatcaagtcccgggtgaatcgtctgtcagtgttgggagccatcacgagtgtacagcaaagattaaaactgtacaacaaagtccctcccaatgggctggttgtctactgtggaaccatagtaaccgaagaaggcaaagaaaagaaggtgaatatagattttgagccgtttaaacctatcaacacttccttgtacttatgcgataacaagttccacaccgaggcactaactgctctactgagtgatgattcaaaatttggcttcattgtgatcgatggctcgggtgctctcttcgggacacttcagggcaacaccagagaggtactgcacaaattcactgttgacttgcccaagaagcacgggaggggtggccagtcggccctgcgtttcgctcggttgagaatggagaaaaggcacaattacgttagaaaggtcgcagagaccgctgtccaactgtttatatctggcgacaaggtgaacgtggctggcctagtactcgcagggagcgcagatttcaagaccgaactgtcccagagcgatatgttcgaccagagattacagtctaaagtgctcaaacttgtggatatctcttatggcggagaaaacgggttcaatcaggcgatcgaactgtcaaccgaggtgttatcaaatgtcaagttcatccaagaaaaaaaactgatcgggagatattttgacgaaatttctcaggacactggcaagtactgcttcggggtcgaggacactcttaaggcccttgaaatgggtgctgttgagatactgattgtgtacgagaacctggatatcatgcggtacgtgctgcactgtcagggaactgaggaggaaaagatactctacctgactcctgagcaggagaaagataaaagccatttcaccgataaggaaaccgggcaggagcatgagcttatagagagcatgcctctcctggaatggtttgcaaataactataagaaattcggggcaacactggaaatagtgacagacaaatcacaggagggcagtcagtttgttaaggggttcgggggaatagggggaatcctgagataccgggtggatttccaggggatggaatatcagggcggagatgatgagttttttgacttggacgactactag

SEQ ID NO: 110860 - DNA, 1215 bp, Artificial Sequence
  derived and/or modified sequence
atgatcagcctgatcatcccccccaaggaccagatcagcagagtggccaagatgctggccgacgagttcggcaccgccagcaacatcaagagcagagtgaacagactgagcgtgctgggcgccatcaccagcgtgcagcagagactgaagctgtacaacaaggtgccccccaacggcctggtggtgtactgcggcaccatcgtgaccgaggagggcaaggagaagaaggtgaacatcgacttcgagcccttcaagcccatcaacaccagcctgtacctgtgcgacaacaagttccacaccgaggccctgaccgccctgctgagcgacgacagcaagttcggcttcatcgtgatcgacggcagcggcgccctgttcggcaccctgcagggcaacaccagagaggtgctgcacaagttcaccgtggacctgcccaagaagcacggcagaggcggccagagcgccctgagattcgccagactgagaatggagaagagacacaactacgtgagaaaggtggccgagaccgccgtgcagctgttcatcagcggcgacaaggtgaacgtggccggcctggtgctggccggcagcgccgacttcaagaccgagctgagccagagcgacatgttcgaccagagactgcagagcaaggtgctgaagctggtggacatcagctacggcggcgagaacggcttcaaccaggccatcgagctgagcaccgaggtgctgagcaacgtgaagttcatccaggagaagaagctgatcggcagatacttcgacgagatcagccaggacaccggcaagtactgcttcggcgtggaggacaccctgaaggccctggagatgggcgccgtggagatcctgatcgtgtacgagaacctggacatcatgagatacgtgctgcactgccagggcaccgaggaggagaagatcctgtacctgacccccgagcaggagaaggacaagagccacttcaccgacaaggagaccggccaggagcacgagctgatcgagagcatgcccctgctggagtggttcgccaacaactacaagaagttcggcgccaccctggagatcgtgaccgacaagagccaggagggcagccagttcgtgaagggcttcggcggcatcggcggcatcctgagatacagagtggacttccagggcatggagtaccagggcggcgacgacgagttcttcgacctggacgactactag

SEQ ID NO: 110861 - protein, 806 aa, Artificial Sequence
  derived and/or modified sequence
MAKAKKVGARRKASGAPAGARGGPAKANSNPFEVKVNRQKFQILGRKTRHDVGLPGVSRARALRKRTQTLLKEYKERDKSNVFRDKRFGEYNSNMSPEEKMMKRFALEQQRHHEKKSIYNLNEDEELTHYGQSLADIEKHNDIVDSDSDAEDRGTLSAELTAAHFGGGGGLLHKKTQQEGEEREKPKSRKELIEELIAKSKQEKRERQAQREDALELTEKLDQDWKEIQTLLSHKTPKSENRDKKEKPKPDAYDMMVRELGFEMKAQPSNRMKTEAELAKEEQEHLRKLEAERLRRMLGKDEDENVKKPKHMSADDLNDGFVLDKDDRRLLSYKDGKMNVEEDVQEEQSKEASDPESNEEEGDSSGGEDTEESDSPDSHLDLESNVESEEENEKPAKEQRQTPGKGLISGKERAGKATRDELPYTFAAPESYEELRSLLLGRSMEEQLLVVERIQKCNHPSLAEGNKAKLEKLFGFLLEYVGDLATDDPPDLTVIDKLVVHLYHLCQMFPESASDAIKFVLRDAMHEMEEMIETKGRAALPGLDVLIYLKITGLLFPTSDFWHPVVTPALVCLSQLLTKCPILSLQDVVKGLFVCCLFLEYVALSQRFIPELINFLLGILYIATPNKASQGSTLVHPFRALGKNSELLVVSAREDVATWQQSSLSLRWASRLRAPTSTEANHIRLSCLAVGLALLKRCVLMYGSLPSFHAIMGPLQALLTDHLADCSHPQELQELCQSTLTEMESQKQLCRPLTCEKSKPVPLKLFTPRLVSNSRPQVIHLPWPPNYRCEPQHPAKKVIFFRVIML

SEQ ID NO: 110862 - DNA, 2421 bp, Artificial Sequence
  derived and/or modified sequence
atggccaaggccaagaaagtcggggcaagacgcaaggcaagtggcgctcctgctggggcacgcggcggcccagcaaaagctaattccaaccccttcgaagtgaaagtcaaccgacagaagttccagatcttgggaaggaaaactagacacgacgtggggctgccaggggtctcaagggccagagctctgaggaaaagaacgcaaacgctactgaaggagtacaaggagagggacaaaagcaatgttttcagagacaagcgctttggtgagtataattctaatatgtctccggaggaaaaaatgatgaaacgctttgctctcgaacagcaacgccaccacgagaaaaaaagcatctacaatctgaacgaagatgaggagctcacccactatgggcagtcactagccgatattgagaagcacaacgatatcgtggactctgacagcgatgctgaggataggggcaccctgtccgccgagctgaccgctgctcacttcggaggaggggggggactcctccataaaaagacacagcaggaaggagaagaacgcgagaagccaaagtcccgcaaggaactgatcgaagaactgatagcaaaatcaaagcaggagaaaagggaacggcaggcccagcgagaggacgcgctggaactgaccgagaaactcgatcaggattggaaggaaatccagacgcttctcagccacaaaaccccaaagtcagagaatagggacaaaaaagagaaacccaaacctgacgcgtatgacatgatggttcgggaactgggatttgagatgaaggcacagccgtccaatcgcatgaagactgaggctgaacttgccaaagaggaacaagaacatctgagaaaactggaggctgagcgcttgcggcgaatgcttggaaaagatgaggatgaaaatgttaaaaagccaaaacatatgtccgccgacgaccttaacgacggcttcgtgctggacaaagacgataggaggctactcagctacaaggatggcaagatgaatgtcgaggaagacgtgcaagaagagcaatccaaagaagcctccgaccctgaaagcaatgaggaagaaggagactcatctggcggcgaggacaccgaggaatcagattcccccgactcccacttagatctcgagtccaatgttgaaagcgaggaggaaaatgaaaagccggccaaggagcagcgccaaacccctgggaagggcctgatctctggaaaagagcgtgctggaaaagcaacccgggatgagctaccctacacattcgccgcacccgaaagttatgaggagttgcgctctctgctcctgggtaggtctatggaggaacagctgctcgtggtggagaggatccagaagtgtaatcatccctcccttgctgaggggaataaagccaaactagagaagctctttggcttcctgcttgaatatgtaggggaccttgctacggatgacccgccagatctgaccgtgattgacaaattagtagtgcatctttaccacttgtgtcagatgtttcccgaatcagcgtctgacgccattaagttcgtgctgcgcgatgccatgcacgaaatggaggagatgatcgaaacaaagggaagagccgcactgcctggtctagacgtgctaatctatctgaaaattacagggctgctatttccaacctccgacttttggcatcccgtagtcacacccgcactcgtgtgtctgtcccagctcctaacgaaatgccccatcctgtcgcttcaggacgttgttaaaggtctatttgtgtgctgcttgtttctggaatacgtggcccttagccagaggttcattccagaactgattaactttttgttaggaatcctgtatatcgcgacaccgaacaaggcttcccaaggcagcactttggtgcacccgttcagggcactgggaaagaactccgagcttcttgttgtcagcgctagagaagacgtggccacctggcaacagtcctcattgagtcttcgctgggcttccaggctgcgggccccgacgtctacagaagctaaccatattaggctctcatgccttgcggtgggcctggcactgttaaaacggtgcgtactgatgtatggcagtctgccaagcttccatgccattatgggacccttgcaggcactcctgaccgaccacctcgccgactgcagccacccacaggagctgcaggaactgtgccaatctactctgactgagatggaatcccagaagcagctttgcaggccgcttacttgcgagaagagtaaacctgtgcccctgaagttatttacccctagactagtctcaaacagtcgcccccaagttatccatcttccatggcctcccaactatcggtgtgaacctcagcacccagccaaaaaggtgattttcttcagagtaatcatgctgtag

SEQ ID NO: 110863 - DNA, 2421 bp, Artificial Sequence
  derived and/or modified sequence
atggccaaggccaagaaggtgggcgcccggaggaaggccagcggggccccagctggggcccggggcggccctgccaaggccaacagcaacccctttgaggtgaaggtgaaccggcagaagttccagatcctgggcaggaagaccaggcatgatgtgggcctgcccggggtgtcccgggcccgggccctgaggaagaggacccagaccctgctgaaggagtacaaggagcgggacaagagcaatgtgttccgggacaagagatttggagagtacaacagcaacatgagccctgaggagaagatgatgaagagatttgccctggagcagcagaggcaccacgagaagaagagcatctacaacctgaatgaagatgaggagctgacccactacggccagagcctggccgacatcgagaagcacaatgacatcgtggacagcgacagtgatgctgaagatcggggcaccctgtctgctgagctgacagctgcccactttggaggcggcggcggcctgctgcacaagaagacccagcaggagggggaggagcgggagaagcccaagagcaggaaggagctgattgaggagctgattgccaagagcaagcaggagaagcgggagcggcaggcccagcgggaggatgccctggagctgacagagaagctggaccaggactggaaggagatccagaccctgctgagccacaagacccccaagtctgagaacagagacaagaaggagaagcccaagccagatgcctatgacatgatggtgcgggagctgggctttgagatgaaggcccagcccagcaacaggatgaagacagaggccgagctggccaaggaggagcaggagcacctgaggaagctggaggccgagcggctgcggaggatgctgggcaaggatgaagatgaaaatgtgaagaagcccaagcacatgtctgcagatgacctgaatgatggctttgtgctggacaaggatgaccggcggctgctgagctacaaggatggcaagatgaatgtggaggaggatgtgcaggaggagcagagcaaggaggccagtgaccctgagagcaatgaggaggagggggacagcagtggaggagaggacacagaggagagtgacagcccagacagccacctggacctggagagcaatgtggagagcgaggaggagaatgagaagccagccaaggagcagaggcagaccccaggcaagggcctcatcagcggcaaggagcgggccggcaaggccaccagagatgagctgccctacacctttgctgcccctgagagctatgaggagctgcggagcctgctgctgggccgctccatggaggagcagctgctggtggtggagcgcatccagaagtgcaaccaccccagcctggccgagggcaacaaggccaagctggagaagctgtttggcttcctgctggagtatgtgggggacctggccacagatgatcctccagacctgactgtgattgacaagctggtggtgcacctgtaccacctgtgccagatgtttcctgagagcgccagtgatgccatcaagtttgtgctgagagatgccatgcatgagatggaggagatgattgagaccaagggccgggccgccctgcccggcctggatgtgctgatctacctgaagatcaccggcctgctcttccccaccagtgacttctggcaccctgtggtgaccccagccctggtgtgcctgagccagctgctgaccaagtgccccatcctgagcctgcaggatgtggtgaagggcctgtttgtgtgctgcctcttcctggagtatgtggccctgagccagcgcttcatccctgagctgatcaacttcctgctgggcatcctgtacatcgccacccccaacaaggccagccagggcagcaccctggtgcaccccttccgggccctgggcaagaacagcgagctgctggtggtgtctgcccgggaggatgtggccacctggcagcagagcagcctgagcctgcgctgggccagccggctgcgggcccccaccagcacagaggccaaccacatccggctgagctgcctggccgtgggcctggccctgctgaagagatgtgtgctgatgtatggcagcctgcccagcttccacgccatcatgggccccctgcaggccctgctgacagaccacctggccgactgcagccacccccaggagctgcaggagctgtgccagagcaccctgacagagatggagagccagaagcagctgtgccggcccctgacctgtgagaagagcaagcctgtgcccctgaagctgttcaccccccggctggtgagcaacagccggccccaggtgatccacctgccctggccacccaactaccgctgtgagccccagcacccagccaagaaggtgatcttcttccgggtcatcatgctgtag

SEQ ID NO: 110864 - DNA, 2421 bp, Artificial Sequence
  derived and/or modified sequence
atggccaaggccaagaaggtgggcgcccggcggaaggccagcggcgctcccgccggagctagaggaggccccgccaaagcaaattcaaatccatttgaagtaaaggtcaataggcagaagttccaaatcctgggtcggaagacacggcacgacgtcgggttacccggcgtcagcagggcccgggcattgaggaagaggacccagacactcctgaaggaatataaagagcgagataaatcaaatgtgttccgggataaacgcttcggagaatacaattccaatatgagtccagaagagaaaatgatgaagcggtttgcgctggagcagcagcgccatcatgagaaaaagtctatatacaatctgaatgaggatgaggagctgactcattatggacaatcactagccgacattgagaaacataatgacatcgtggattctgattccgacgccgaagatcgtggaactctttccgctgaactgaccgctgctcactttggcgggggaggcggcctgctgcacaaaaagactcaacaagaaggcgaagagagagagaagccaaagtcgagaaaagagttaatcgaagagctcattgccaaatcaaaacaggagaaaagagaacggcaggcccagcgtgaagatgctctggaactgacagaaaagcttgaccaagactggaaagagatacagaccctgcttagtcacaaaactccgaagtctgaaaatcgggataagaaggaaaaaccgaagcccgacgcatatgatatgatggtccgcgagctcggcttcgaaatgaaggctcagcctagtaacagaatgaaaactgaggcggagttagcaaaggaggagcaggaacacctgcgcaagcttgaggcggagaggctccgccgaatgctggggaaagatgaagatgaaaacgtgaaaaagccaaaacatatgtcagccgacgatctcaatgacggctttgtgcttgataaagacgataggcgcctcctgagttacaaagatggaaagatgaacgttgaggaggatgtgcaggaggaacagagcaaggaagcctctgatcctgaaagtaacgaggaagagggcgactccagcggcggagaagacacggaagaatctgacagtcctgattctcacctggacctggaatcaaacgtcgaaagtgaggaggaaaatgaaaagccagcaaaggagcagaggcagactcccggcaagggacttatttcagggaaagagcgcgctggtaaggcgacccgcgatgagctaccgtatacctttgcagctcccgaatcctatgaggagctacgttcactcctactcggccgctcgatggaagagcagctcctcgtcgtcgagcgaatccagaagtgtaatcaccccagcttggctgaggggaacaaggcgaagttggaaaagctcttcggtttcctgctggagtacgtgggcgacttagcaaccgacgatcctcccgatctgaccgtgatcgataagctcgttgttcacttataccacctgtgccagatgttccccgaatccgcttccgacgcgattaagtttgtgctgcgcgacgccatgcacgagatggaagagatgattgagacgaagggaagagccgccctgcccggcctagacgtcctgatatacctcaaaataacaggcctcctatttccaaccagcgacttctggcacccggtagtcacacccgccttagtgtgcctttcacagctgttaactaagtgccccattctgtccctccaggatgttgtgaaaggcctctttgtctgttgcctgtttctggagtatgttgccctatcccagcgttttattccagagctgattaattttttgctagggattctctatatcgctaccccgaacaaagcttcccaggggtccaccctggtacatccctttcgggctctcggcaagaattcagaattgttggtagtgagcgcccgagaggatgtggctacgtggcaacaaagtagtctgtctctgcggtgggcttccagacttagagcgccaacttctactgaagccaatcacatccgcctttcatgtctcgccgttggactggccctgttgaagagatgtgttctgatgtacggcagtctgccctcttttcacgccatcatgggcccactccaggcactgctcaccgatcaccttgccgactgctctcaccctcaggagctgcaggagctgtgccaatctacccttaccgaaatggaatctcagaagcagctatgtcgcccactaacctgtgaaaagtcgaaacccgtccccctgaagctgtttacaccgcggttggtttccaacagccggccccaggttattcatcttccttggcctccaaactataggtgcgaaccacagcatccagctaagaaagtgatctttttccgagtgatcatgctgtag

SEQ ID NO: 110865 - DNA, 2535 bp, Artificial Sequence
  derived and/or modified sequence
gcggggcgcgcgccatggcgaaggcgaagaaggtcggggcgcgaaggaaggcctccggggcgccggcgggagcgcgagggggcccggcgaaggccaactccaatccgttcgaggtgaaagttaacaggcagaagttccagatcctgggccggaagacgcgccacgacgtgggactgcccggggtgtctcgcgcacgggccctcaggaagcgtacacagactttactaaaagagtacaaagaaagggataaatccaatgtattcagagataaacgcttcggagaatacaacagcaacatgagccccgaggagaagatgatgaagaggtttgctctggaacagcagcgacatcatgagaaaaaaagcatctacaatctaaatgaagatgaagaattgactcattatggccagtctttggcagacatcgagaagcataatgacattgtggacagtgacagcgatgctgaggatcgaggaacgttgtctgctgagctgactgctgcccactttggaggaggcggtgggctccttcacaagaagactcaacaggaaggcgaggagcgggagaaaccgaagtcccggaaagagctgattgaagagctcattgccaagtcaaaacaagagaagagggagagacaagctcaacgagaagatgccctcgagctcacggagaagctagaccaagactggaaagaaattcagactctcctgtcccacaaaactcccaagtcagagaacagagacaaaaaggaaaaacccaagcccgatgcatatgacatgatggttcgcgagcttggctttgaaatgaaggcgcagccctctaacaggatgaagacggaggcagaattggcaaaggaagagcaggagcacctcaggaagctggaggctgagagacttcgaagaatgcttggaaaggatgaggatgaaaatgttaagaaaccaaaacatatgtcagcagatgatctgaatgatggcttcgtgctagataaagatgacaggcgtttgctttcctacaaagatggaaagatgaatgtcgaggaagatgtccaggaagagcaaagcaaggaagccagtgaccctgagagcaacgaggaagaaggtgacagttcaggcggggaggacacagaggagagcgacagcccagatagccacttggacctggaatccaacgtggagagtgaggaagaaaacgagaagccagcaaaagagcagaggcagactcctgggaaagggttgataagcggcaaggaaagagctggaaaagctaccagagacgagctgccctacacgttcgcagcccctgaatcctatgaggaactgagatctctgttgttaggaagatcgatggaagagcagcttttggtggtggagagaattcagaagtgcaaccacccgagtctcgcagaaggaaacaaagcaaaattagaaaaactgtttggctttcttttggaatacgttggcgatttggctacagatgacccaccagacctcacagtcattgataagttggttgtgcacttatatcatctttgccagatgtttcctgaatctgcaagtgacgctatcaaatttgttctccgagatgcgatgcatgagatggaagaaatgattgagaccaaaggccgggcggcattgccagggttggatgtgctcatttatttgaaaatcactgggctgctatttccaacttccgacttctggcacccagtggtgacccctgccctcgtgtgcctcagtcagctgctcaccaagtgccccatcctgtccctccaggacgtggtgaagggcctgttcgtgtgctgcctgttcctggagtatgtggctttgtcccagaggtttatacctgagcttattaattttcttcttgggattctttacatagcaactccaaacaaagcaagccaaggttccactctggtgcaccctttcagagcgcttgggaagaactcggaactgctcgtggtgtctgctagagaggatgtggccacgtggcagcagagcagcctctccctccgctgggcgagtagactgagggccccaacttcgacagaggccaatcacatccgactgtcctgcctggctgtgggcctggccctgctgaagcgctgcgtgctcatgtacgggtccctgccatccttccacgccatcatggggcctctccaagccctcctcacggatcacctggcggactgcagccacccgcaggagctccaggagctgtgtcagagcacactgaccgaaatggaaagccagaagcagctctgccggccgctgacctgtgagaagagcaagcctgtcccactgaagcttttcacaccccggctggtctcgaattcccgacctcaggtaatccacctgccttggccccccaattataggtgtgagccacagcacccagccaaaaaagtaattttttttagagtaataatgctataatgttggtgtgattccaacctccagctccccccacccgctgcctgcggttttgtttctgttaaaacgtcacctgatgaaatagaatgaatcctgaaatgca

SEQ ID NO: 110866 - DNA, 2421 bp, Artificial Sequence
  derived and/or modified sequence
atggcaaaggctaaaaaggtgggcgcaaggcgcaaagcatctggggctccggcaggcgcacggggtggcccagccaaggccaacagcaacccattcgaggttaaggtgaatcgccagaagttccaaatcctcggtaggaagacacggcacgatgtgggcctaccaggagtgtctagagccagggctttacggaagagaacacaaactctgctgaaggagtataaggaacgggataaaagtaacgtttttcgcgataaacggttcggcgaatataactccaatatgtcccctgaagagaagatgatgaagcgcttcgcacttgaacagcaacgccatcatgagaagaagtctatctacaacctcaatgaggatgaggaactcacccattacggccaaagcttggccgatatcgaaaaacacaatgatatcgttgattccgacagcgatgccgaggatcggggaacactgagcgctgagctaactgcggcacacttcggcggagggggtggtcttctgcataagaaaacgcaacaggaaggtgaggagagagaaaaacctaagtcgcgaaaggagctgattgaggagctcatcgccaaatccaagcaggagaaacgggaacgtcaagctcagcgagaagacgcactggagctcactgaaaagctggatcaggactggaaagagatacagacgttgctgtcacataaaacccccaaatccgagaatagggataagaaggagaagcctaaacctgacgcatatgatatgatggtgcgggaattgggctttgagatgaaagctcagccgagtaatcggatgaaaacggaggccgagcttgctaaggaagagcaggaacaccttagaaaactcgaagctgaaaggttgcgcaggatgcttgggaaagacgaagatgagaacgtgaaaaagcctaagcacatgtcggcagacgatctgaatgatggctttgtgctggataaagacgataggagacttctgagttacaaggatggaaagatgaacgtagaagaagatgtgcaggaggagcagtcaaaggaggcttcagacccagagtcaaacgaggaagaaggagattcaagcggcggagaggatactgaggagagcgattcccctgacagccaccttgacctggaatccaatgtcgagtccgaggaagaaaacgagaaaccggctaaagaacagaggcagacacccggtaaaggcttgatctccggaaaggagcgggctggcaaggctactagagatgaactgccttatacttttgctgcacctgagtcatacgaagagctgaggagtcttcttttagggaggtccatggaggaacagttactagtggttgagaggattcagaaatgtaaccatcccagcctggctgagggcaataaggcgaagctcgaaaagctatttggcttcctacttgagtacgtgggagacttagcgactgatgatccacccgacctaactgttattgataagctggtcgtgcacctgtatcatctgtgccagatgtttcccgaatccgctagtgatgccattaagttcgtattacgagacgctatgcatgaaatggaagagatgatagaaactaaaggaagagcagcacttccagggctggacgttctgatctacctgaagattactggcctgcttttccccacttcagacttctggcaccctgttgtcacgcctgccttagtttgcctcagtcagcttctgactaaatgtcctattttgtctctccaggacgtggtgaaaggactgttcgtatgctgcctgttcctcgagtacgttgccctctcacagaggttcatccccgagttaattaacttcttactgggtatactttatattgccaccccaaacaaggcgtcccaggggtccacattagtgcatccatttagggccctcggcaagaactctgaactgttggtggtatcagcaagagaggacgtggcaacctggcagcagagttcactgtccctacgctgggcctcccggttgagagcaccgacatcaaccgaagccaaccacatcagactttcctgtctcgctgtggggttagcgttgctgaagagatgcgtcctcatgtatggtagcctaccatcgtttcatgcgatcatgggacctctgcaggctctactcaccgatcatctggctgactgcagccacccccaagaacttcaagagttgtgtcagtccacccttaccgaaatggagtcacaaaaacaactgtgtcgtcccctgacctgcgagaagtccaagcccgttcctctgaaattatttactcctagactggtctccaattcaaggccacaggtgattcatctgccctggccacccaattaccgttgcgagccgcaacaccccgcaaagaaggtgattttcttccgagtcataatgctgtag

SEQ ID NO: 110867 - DNA, 2421 bp, Artificial Sequence
  derived and/or modified sequence
atggccaaggccaagaaggtgggcgccagaagaaaggccagcggcgcccccgccggcgccagaggcggccccgccaaggccaacagcaaccccttcgaggtgaaggtgaacagacagaagttccagatcctgggcagaaagaccagacacgacgtgggcctgcccggcgtgagcagagccagagccctgagaaagagaacccagaccctgctgaaggagtacaaggagagagacaagagcaacgtgttcagagacaagagattcggcgagtacaacagcaacatgagccccgaggagaagatgatgaagagattcgccctggagcagcagagacaccacgagaagaagagcatctacaacctgaacgaggacgaggagctgacccactacggccagagcctggccgacatcgagaagcacaacgacatcgtggacagcgacagcgacgccgaggacagaggcaccctgagcgccgagctgaccgccgcccacttcggcggcggcggcggcctgctgcacaagaagacccagcaggagggcgaggagagagagaagcccaagagcagaaaggagctgatcgaggagctgatcgccaagagcaagcaggagaagagagagagacaggcccagagagaggacgccctggagctgaccgagaagctggaccaggactggaaggagatccagaccctgctgagccacaagacccccaagagcgagaacagagacaagaaggagaagcccaagcccgacgcctacgacatgatggtgagagagctgggcttcgagatgaaggcccagcccagcaacagaatgaagaccgaggccgagctggccaaggaggagcaggagcacctgagaaagctggaggccgagagactgagaagaatgctgggcaaggacgaggacgagaacgtgaagaagcccaagcacatgagcgccgacgacctgaacgacggcttcgtgctggacaaggacgacagaagactgctgagctacaaggacggcaagatgaacgtggaggaggacgtgcaggaggagcagagcaaggaggccagcgaccccgagagcaacgaggaggagggcgacagcagcggcggcgaggacaccgaggagagcgacagccccgacagccacctggacctggagagcaacgtggagagcgaggaggagaacgagaagcccgccaaggagcagagacagacccccggcaagggcctgatcagcggcaaggagagagccggcaaggccaccagagacgagctgccctacaccttcgccgcccccgagagctacgaggagctgagaagcctgctgctgggcagaagcatggaggagcagctgctggtggtggagagaatccagaagtgcaaccaccccagcctggccgagggcaacaaggccaagctggagaagctgttcggcttcctgctggagtacgtgggcgacctggccaccgacgacccccccgacctgaccgtgatcgacaagctggtggtgcacctgtaccacctgtgccagatgttccccgagagcgccagcgacgccatcaagttcgtgctgagagacgccatgcacgagatggaggagatgatcgagaccaagggcagagccgccctgcccggcctggacgtgctgatctacctgaagatcaccggcctgctgttccccaccagcgacttctggcaccccgtggtgacccccgccctggtgtgcctgagccagctgctgaccaagtgccccatcctgagcctgcaggacgtggtgaagggcctgttcgtgtgctgcctgttcctggagtacgtggccctgagccagagattcatccccgagctgatcaacttcctgctgggcatcctgtacatcgccacccccaacaaggccagccagggcagcaccctggtgcaccccttcagagccctgggcaagaacagcgagctgctggtggtgagcgccagagaggacgtggccacctggcagcagagcagcctgagcctgagatgggccagcagactgagagcccccaccagcaccgaggccaaccacatcagactgagctgcctggccgtgggcctggccctgctgaagagatgcgtgctgatgtacggcagcctgcccagcttccacgccatcatgggccccctgcaggccctgctgaccgaccacctggccgactgcagccacccccaggagctgcaggagctgtgccagagcaccctgaccgagatggagagccagaagcagctgtgcagacccctgacctgcgagaagagcaagcccgtgcccctgaagctgttcacccccagactggtgagcaacagcagaccccaggtgatccacctgccctggccccccaactacagatgcgagccccagcaccccgccaagaaggtgatcttcttcagagtgatcatgctgtag

SEQ ID NO: 110868 - DNA, 606 bp, Artificial Sequence
  derived and/or modified sequence
atgagactgctgctggccctgctgggcgtgctgctgagcgtgcccggcccccccgtgctgagcctggaggccagcgaggaggtggagctggagccctgcctggcccccagcctggagcagcaggagcaggagctgaccgtggccctgggccagcccgtgagactgtgctgcggcagagccgagagaggcggccactggtacaaggagggcagcagactggcccccgccggcagagtgagaggctggagaggcagactggagatcgccagcttcctgcccgaggacgccggcagatacctgtgcctggccagaggcagcatgatcgtgctgcagaacctgaccctgatcaccggcgacagcctgaccagcagcaacgacgacgaggaccccaagagccacagagaccccagcaacagacacagctacccccagcaggccccctactggacccacccccagagaatggagaagaagctgcacgccgtgcccgccggcaacaccgtgaagttcagatgccccgccgccggcaaccccacccccaccatcagatggctgaaggacggccaggccttccacggcgagaacagaatcggcggcatcagatag

SEQ ID NO: 110869 - DNA, 264 bp, Artificial Sequence
  derived and/or modified sequence
atgagactgctgctggccctgctgggcgtgctgctgagcgtgcccggcccccccgtgctgagcctggaggccagcgaggaggtggagctggagccctgcctggcccccagcctggagcagcaggagcaggagctgaccgtggccctgggccagcccgtgagactgtgctgcggcagagccgagagaggcggccactggtacaaggagggcagcagactggcccccgccggcagagtgagaggctggagaggcagactggagtag

SEQ ID NO: 110870 - DNA, 327 bp, Artificial Sequence
  derived and/or modified sequence
atgagactgctgctggccctgctgggcgtgctgctgagcgtgcccggcccccccgtgctgagcctggaggccagcgaggaggtggagctggagccctgcctggcccccagcctggagcagcaggagcaggagctgaccgtggccctgggccagcccgtgagactgtgctgcggcagagccgagagaggcggccactggtacaaggagggcagcagactggcccccgccggcagagtgagaggctggagaggcagactggagatcgccagcttcctgcccgaggacgccggcagatacctgtgcctggccagaggcagcatgatctag

SEQ ID NO: 110871 - DNA, 345 bp, Artificial Sequence
  derived and/or modified sequence
atgagactgctgctggccctgctgggcgtgctgctgagcgtgcccggcccccccgtgctgagcctggaggccagcgaggaggtggagctggagccctgcctggcccccagcctggagcagcaggagcaggagctgaccgtggccctgggccagcccgtgagactgtgctgcggcagagccgagagaggcggccactggtacaaggagggcagcagactggcccccgccggcagagtgagaggctggagaggcagactggagatcgccagcttcctgcccgaggacgccggcagatacctgtgcctggccagaggcagcatgatcgtgctgcagaacctgacctag

SEQ ID NO: 110872 - DNA, 606 bp, Artificial Sequence
  derived and/or modified sequence
atgaggttgcttctcgcactcctcggggtcctcctgtcagtaccgggccccccagtgctctctttggaagccagcgaggaggtcgaactagaaccttgcttggctccttctctggagcaacaggaacaggagctgaccgtggccctagggcagcctgtgcggctgtgctgcggtagggcggagaggggcggccattggtacaaagaagggtccagactcgccccagccgggagggtgcggggatggcggggacgcctggagattgccagcttcctgcctgaagatgcaggccgctatctgtgtctcgcccgggggtctatgatcgtgcttcaaaatcttactctcatcactggggactccttgacaagctctaacgacgacgaggatcccaagtcacaccgcgatccctccaacaggcactcttatccgcaacaagcaccttattggactcacccacagagaatggaaaaaaagctccacgctgttcctgccgggaacacagttaaatttcgctgtcccgctgctgggaatccgaccccaacaattagatggctcaaagacgggcaggctttccacggggaaaatagaattggcggtatcaggtag

SEQ ID NO: 110873 - DNA, 264 bp, Artificial Sequence
  derived and/or modified sequence
atgcgactgctgctggccctgctaggggtccttctcagcgttccagggccccccgtgctgtcactagaagcttcagaggaggtggagttagaaccgtgcttggccccatcactggagcagcaggagcaggagctgaccgtcgcactgggtcaacctgtgaggctgtgctgcgggagagccgagaggggggggcactggtataaggagggttcccgtctggccccagccggccgcgtgcgaggctggcggggacgtctcgaatag

SEQ ID NO: 110874 - DNA, 327 bp, Artificial Sequence
  derived and/or modified sequence
atgaggctattattggcgcttttgggggttttgctgagcgtccccggaccacccgtgctgtctctcgaagccagcgaggaggtggagttagagccttgtctcgccccctccctggagcagcaagagcaagagctgacggtcgccttgggccagcccgtaagactctgctgcggtagggctgaacggggcggacattggtataaggaaggatcaaggctcgcccctgcaggccgggtccgcggttggagaggacgattagagatcgcctcattcctcccagaagacgccggaagatacctgtgtttggcaagaggtagtatgatttag

SEQ ID NO: 110875 - DNA, 345 bp, Artificial Sequence
  derived and/or modified sequence
atgcgcctgctgttagcattactgggcgtccttttgagcgtgcccggaccccccgtcctttctctcgaggcctccgaggaagtggagttggagccatgcttagcaccatctctcgaacagcaggaacaggaactaacagtggcccttggccaaccagtgagactctgttgcggtagggctgagcgcgggggtcactggtataaggaaggtagcagattggcccctgccggcagggtgagaggttggcgcggacgattggaaattgccagttttctgccagaggacgcagggcggtacctctgcttggcccggggttcgatgattgttcttcaaaatttaacatag

SEQ ID NO: 110876 - DNA, 606 bp, Artificial Sequence
  derived and/or modified sequence
atgaggctgctgctggccctgctgggcgtgctgctgtctgtgcccggcccccctgtgctgagcctggaggccagcgaggaggtggagctggagccctgcctggcccccagcctggagcagcaggagcaggagctgactgtggccctgggccagcctgtgcggctgtgctgcggccgggcagagcggggcggccactggtacaaggagggcagccggctggccccagctggccgggtgcggggctggaggggccgcctggagatcgccagcttcctgcctgaagatgctggccgctacctgtgcctggcccggggctccatgattgtgctgcagaacctgaccctcatcactggagacagcctgaccagcagcaatgatgatgaggaccccaagagccaccgggaccccagcaacagacacagctacccccagcaggccccctactggacccacccccagaggatggagaagaagctgcatgctgtgcctgctggcaacacagtgaagttccgctgcccagctgctggcaaccccacccccaccatccgctggctgaaggatggccaggccttccacggggagaacagaattggaggcatcagatag

SEQ ID NO: 110877 - DNA, 264 bp, Artificial Sequence
  derived and/or modified sequence
atgaggctgctgctggccctgctgggcgtgctgctgtctgtgcccggcccccctgtgctgagcctggaggccagcgaggaggtggagctggagccctgcctggcccccagcctggagcagcaggagcaggagctgactgtggccctgggccagcctgtgcggctgtgctgcggccgggcagagcggggcggccactggtacaaggagggcagccggctggccccagctggccgggtgcggggctggaggggccgcctggagtag

SEQ ID NO: 110878 - DNA, 327 bp, Artificial Sequence
  derived and/or modified sequence
atgaggctgctgctggccctgctgggcgtgctgctgtctgtgcccggcccccctgtgctgagcctggaggccagcgaggaggtggagctggagccctgcctggcccccagcctggagcagcaggagcaggagctgactgtggccctgggccagcctgtgcggctgtgctgcggccgggcagagcggggcggccactggtacaaggagggcagccggctggccccagctggccgggtgcggggctggaggggccgcctggagatcgccagcttcctgcctgaagatgctggccgctacctgtgcctggcccggggctccatgatctag

SEQ ID NO: 110879 - DNA, 345 bp, Artificial Sequence
  derived and/or modified sequence
atgaggctgctgctggccctgctgggcgtgctgctgtctgtgcccggcccccctgtgctgagcctggaggccagcgaggaggtggagctggagccctgcctggcccccagcctggagcagcaggagcaggagctgactgtggccctgggccagcctgtgcggctgtgctgcggccgggcagagcggggcggccactggtacaaggagggcagccggctggccccagctggccgggtgcggggctggaggggccgcctggagatcgccagcttcctgcctgaagatgctggccgctacctgtgcctggcccggggctccatgattgtgctgcagaacctgacctag

SEQ ID NO: 110880 - DNA, 606 bp, Artificial Sequence
  derived and/or modified sequence
atgcggctgctgctggccctgctgggcgtgctgctgagcgtgcccggcccacctgtcttgtctcttgaagcctctgaggaggtcgagcttgagccatgccttgcaccttcattagagcagcaggagcaggaactcactgtcgccctcgggcagcccgtgcgactgtgctgtgggcgggccgagagaggtggccattggtacaaggaagggtcgcgtctggcaccagctggccgggtgcgcgggtggaggggtcgtctggagatcgcctcttttctgcctgaggatgctggtaggtatctgtgcctggctaggggatcaatgatagtgctgcagaacttgactctgattaccggcgatagtctaacttccagcaatgacgatgaggatcccaagtcccatcgggaccctagcaatcgtcattcttacccccagcaggcgccatactggacccatcctcagcgcatggaaaagaagttgcacgcagtaccagccggaaatacagtaaagtttaggtgtccagcggccggcaacccgacacctactattcgctggctcaaggatggccaggcatttcacggggaaaataggattggggggataagatag

SEQ ID NO: 110881 - DNA, 264 bp, Artificial Sequence
  derived and/or modified sequence
atgcggctgctgctggccctgctgggcgtgctgctgagcgtgcccgggcctccagtgctgtcgctggaggctagtgaggaagtcgagctggagccctgcctcgccccctcactggagcagcaggagcaggagctgactgtggccttgggtcagccggtaagattatgttgcggacgggctgagagaggtggtcactggtacaaggaagggagtaggttggcgccggccggcagggtgcgaggatggcgaggccgtttggagtag

SEQ ID NO: 110882 - DNA, 327 bp, Artificial Sequence
  derived and/or modified sequence
atgcggctgctgctggccctgctgggcgtgctgctgagcgtgcccggacccccagtgctgtctctggaggcctcagaggaggttgaattagaaccatgcctggccccctccctcgaacagcaagagcaggaactcacagtcgcactgggacagcccgtgcggctgtgttgtggaagggcggaacgtggcggtcattggtataaagagggatcacgtcttgcaccagctgggcgcgtgcggggatggcgtgggagactcgagattgcaagctttctcccagaggatgcgggaagatatctctgccttgcaaggggtagtatgatttag

SEQ ID NO: 110883 - DNA, 345 bp, Artificial Sequence
  derived and/or modified sequence
atgcggctgctgctggccctgctgggcgtgctgctgagcgtgcccggtccgccagtactatctctagaggcctctgaggaggtcgaactggaaccgtgtttagccccttccttggagcagcaggagcaggagctgacagtagctctcgggcagccagtccgcctgtgctgcggaagggcggagcgaggcggccactggtacaaagagggaagtagattggctcctgccggtagagtgagagggtggagagggagacttgagatcgcaagcttcctgcccgaggatgccggacgctatctgtgcctggcccggggctctatgatcgtgctacaaaatttgacctag

SEQ ID NO: 110884 - DNA, 606 bp, Artificial Sequence
  derived and/or modified sequence
atgcgcctgctgctggcactgctcggcgtgctgctgtctgttcccggtccaccagtgctcagtctggaggcctcagaggaggtcgagttggaaccttgccttgccccttccctcgagcagcaggagcaggaactgaccgtcgctctcggacagccggtgcgattatgttgcgggagggcagagcggggtggccactggtacaaagaaggcagtagattggctccagcaggcagggtgcgtggttggcgcggtcggcttgagatcgcatcattcctgccagaagacgcgggacgctatctgtgtttagccagggggtctatgatcgtattgcagaaccttaccctcatcaccggtgactcacttacaagtagtaatgatgacgaagaccccaagagccacagagatcctagcaatcgtcactcatatccacagcaggccccttactggactcacccccagcgaatggaaaagaagcttcacgcggttcccgctggtaataccgtgaagtttagatgcccagctgccggaaaccccaccccaactattagatggctgaaggacggccaagctttccatggcgaaaatcgtattggcggtatcagatag

SEQ ID NO: 110885 - DNA, 264 bp, Artificial Sequence
  derived and/or modified sequence
atgcggttgcttttggcgttgttgggcgttcttttaagcgtcccgggacccccagtgctgtctttagaggcttcagaagaagtggagctcgaaccctgcctagctccttccttggaacaacaggaacaggagttgactgtggccttgggacagcctgtgagattgtgttgcggcagagctgaaagagggggtcactggtataaggagggcagcaggctggcccctgcgggacgagttagaggctggaggggcaggctggagtag

SEQ ID NO: 110886 - DNA, 327 bp, Artificial Sequence
  derived and/or modified sequence
atgcggctcctgctggcactactgggcgtgctgctgtcagttcctgggcctcctgtgctgagtctggaggcttctgaggaggtggagctggagccgtgcctggctccaagcttggagcagcaggagcaggaattaaccgtcgcgctgggccagcccgttaggctgtgctgcgggagagccgagagaggaggccattggtataaagagggatcccgcctcgcccctgcgggacgcgtgcgaggatggcgcggaaggctcgagatcgctagcttcctgcccgaagatgcaggcagatacctgtgcttggctcgaggatctatgatctag

SEQ ID NO: 110887 - DNA, 345 bp, Artificial Sequence
  derived and/or modified sequence
atgcgtcttctgctggccctactcggagtcttactgtcggtgcccggtccccctgttctcagcctggaagcttctgaagaagttgagttggagccatgtctggcacctagcctggaacagcaggagcaggaactaaccgtcgccctaggacaaccagtgagactctgctgtggcagggctgaacggggtggacactggtacaaagaaggtagtaggctggcacccgctgggcgtgtgaggggctggcgaggaaggctcgaaattgcttccttcctccccgaggatgccggtagatacctgtgtctggctcggggtagcatgatcgtgttgcagaaccttacttag

SEQ ID NO: 110888 - protein, 1472 aa, Artificial Sequence
  derived and/or modified sequence
MDTTAAAALPAFVALLLLSPWPLLGSAQGQFSAGGCTFDDGPGACDYHQDLYDDFEWVHVSAQEPHYLPPEMPQGSYMIVDSSDHDPGEKARLQLPTMKENDTHCIDFSYLLYSQKGLNPGTLNILVRVNKGPLANPIWNVTGFTGRDWLRAELAVSTFWPNEYQVIFEAEVSGGRSGYIAIDDIQVLSYPCDKSPHFLRLGDVEVNAGQNATFQCIATGRDAVHNKLWLQRRNGEDIPVAQTKNINHRRFAASFRLQEVTKTDQDLYRCVTQSERGSGVSNFAQLIVREPPRPIAPPQLLGVGPTYLLIQLNANSIIGDGPIILKEVEYRMTSGSWTETHAVNAPTYKLWHLDPDTEYEIRVLLTRPGEGGTGLPGPPLITRTKCAEPMRTPKTLKIAEIQARRIAVDWESLGYNITRCHTFNVTICYHYFRGHNESKADCLDMDPKAPQHVVNHLPPYTNVSLKMILTNPEGRKESEETIIQTDEDVPGPVPVKSLQGTSFENKIFLNWKEPLDPNGIITQYEISYSSIRSFDPAVPVAGPPQTVSNLWNSTHHVFMHLHPGTTYQFFIRASTVKGFGPATAINVTTNISAPTLPDYEGVDASLNETATTITVLLRPAQAKGAPISAYQIVVEELHPHRTKREAGAMECYQVPVTYQNAMSGGAPYYFAAELPPGNLPEPAPFTVGDNRTYQGFWNPPLAPRKGYNIYFQAMSSVEKETKTQCVRIATKAAATEEPEVIPDPAKQTDRVVKIAGISAGILVFILLLLVVILIVKKRRSYYSYSYYLKLAKKRKDAMGNTRQEMTHMVNAMDRSYADQSTLHAEDPLSITFMDQHNFSPRLPNDPLVPTAVLVPITDENHSATAESSRLLDVPRYLCEGTESPYQTGQLHPAIRVADLLQHINLMKTSDSYGFKEEYESFFEGQSASWDVAKKDQNRAKNRYGNIIAYDHSRVILQPVEDDPSSDYINANYIDIWLYRDGYQRPSHYIATQGPVHETVYDFWRMIWQEQSACIVMVTNLVEVGRVKCYKYWPDDTEVYGDFKVTCVEMEPLAEYVVRTFTLERRGYNEIREVKQFHFTGWPDHGVPYHATGLLSFIRRVKLSNPPSAGPIVVHCSAGAGRTGCYIVIDIMLDMAEREGVVDIYNCVKALRSRRINMVQTEEQYIFIHDAILEACLCGETAIPVCEFKAAYFDMIRIDSQTNSSHLKDEFQTLNSVTPRLQAEDCSIACLPRNHDKNRFMDMLPPDRCLPFLITIDGESSNYINAALMDSYRQPAAFIVTQYPLPNTVKDFWRLVYDYGCTSIVMLNEVDLSQGCPQYWPEEGMLRYGPIQVECMSCSMDCDVINRIFRICNLTRPQEGYLMVQQFQYLGWASHREVPGSKRSFLKLILQVEKWQEECEEGEGRTIIHCLNGGGRSGMFCAIGIVVEMVKRQNVVDVFHAVKTLRNSKPNMVEAPEQYRFCYDVALEYLESS

SEQ ID NO: 110889 - protein, 1462 aa, Artificial Sequence
  derived and/or modified sequence
MDTTAAAALPAFVALLLLSPWPLLGSAQGQFSAGGCTFDDGPGACDYHQDLYDDFEWVHVSAQEPHYLPPEMPQGSYMIVDSSDHDPGEKARLQLPTMKENDTHCIDFSYLLYSQKGLNPGTLNILVRVNKGPLANPIWNVTGFTGRDWLRAELAVSTFWPNEYQVIFEAEVSGGRSGYIAIDDIQVLSYPCDKSPHFLRLGDVEVNAGQNATFQCIATGRDAVHNKLWLQRRNGEDIPVAQTKNINHRRFAASFRLQEVTKTDQDLYRCVTQSERGSGVSNFAQLIVREPPRPIAPPQLLGVGPTYLLIQLNANSIIGDGPIILKEVEYRMTSGSWTETHAVNAPTYKLWHLDPDTEYEIRVLLTRPGEGGTGLPGPPLITRTKCAEPMRTPKTLKIAEIQARRIAVDWESLGYNITRCHTFNVTICYHYFRGHNESKADCLDMDPKAPQHVVNHLPPYTNVSLKMILTNPEGRKESEETIIQTDEDVPGPVPVKSLQGTSFENKIFLNWKEPLDPNGIITQYEISYSSIRSFDPAVPVAGPPQTVSNLWNSTHHVFMHLHPGTTYQFFIRASTVKGFGPATAINVTTNISAPTLPDYEGVDASLNETATTITVLLRPAQAKGAPISAYQIVVEELHPHRTKREAGAMECYQVPVTYQNAMSGGAPYYFAAELPPGNLPEPAPFTVGDNRTYQGFWNPPLAPRKGYNIYFQAMSSVEKETKTQCVRIATKAAATEEPEVIPDPAKQTDRVVKIAGISAGILVFILLLLVVILIVKKSKLAKKRKDAMGNTRQEMTHMVNAMDRSYADQSTLHAEDPLSITFMDQHNFSPRLPNDPLVPTAVLVPITDENHSATAESSRLLDVPRYLCEGTESPYQTGQLHPAIRVADLLQHINLMKTSDSYGFKEEYESFFEGQSASWDVAKKDQNRAKNRYGNIIAYDHSRVILQPVEDDPSSDYINANYIDIWLYRDGYQRPSHYIATQGPVHETVYDFWRMIWQEQSACIVMVTNLVEVGRVKCYKYWPDDTEVYGDFKVTCVEMEPLAEYVVRTFTLERRGYNEIREVKQFHFTGWPDHGVPYHATGLLSFIRRVKLSNPPSAGPIVVHCSAGAGRTGCYIVIDIMLDMAEREGVVDIYNCVKALRSRRINMVQTEEQYIFIHDAILEACLCGETAIPVCEFKAAYFDMIRIDSQTNSSHLKDEFQTLNSVTPRLQAEDCSIACLPRNHDKNRFMDMLPPDRCLPFLITIDGESSNYINAALMDSYRQPAAFIVTQYPLPNTVKDFWRLVYDYGCTSIVMLNEVDLSQGCPQYWPEEGMLRYGPIQVECMSCSMDCDVINRIFRICNLTRPQEGYLMVQQFQYLGWASHREVPGSKRSFLKLILQVEKWQEECEEGEGRTIIHCLNGGGRSGMFCAIGIVVEMVKRQNVVDVFHAVKTLRNSKPNMVEAPEQYRFCYDVALEYLESS

SEQ ID NO: 110890 - DNA, 4419 bp, Artificial Sequence
  derived and/or modified sequence
atggatactaccgccgccgccgcccttccagcattcgttgcactgctgctgctgtccccctggccactactggggtctgcacaaggtcagtttagcgccgggggctgtacatttgatgacggtcctggggcgtgtgattaccatcaggacttgtacgatgacttcgagtgggttcacgtatcagcccaagagccccactacctgccgcctgagatgccccaaggaagctacatgatcgtcgattcttccgaccacgaccctggggaaaaagcccgtctgcagctacctacaatgaaggagaatgatacccattgcattgactttagctatctgctctattcccaaaaaggccttaatcccgggactctgaatattctggtgcgcgtgaacaaaggcccactcgccaatcctatctggaacgtaaccggatttacggggcgcgattggctcagggcggagttggcagtatccaccttctggcctaacgagtaccaggtgatatttgaagccgaggtgtctggagggcgctctgggtacatcgcaatagacgatatccaggtcctttcttatccgtgtgataagtcccctcactttttgcgattgggcgacgttgaggtgaatgccggacagaatgctacctttcagtgcatcgcaaccggacgggacgcagtccataataaactgtggctccagaggagaaacggcgaagacattcctgtggctcagacaaaaaacataaatcaccgacgttttgcagccagcttccgtctgcaggaagttactaaaactgatcaagatttatatagatgtgtcacacagtccgaaagagggagtggcgtttcgaacttcgcccagctgatcgtgcgggagcctcctcgacccatcgctcccccccagctgctcggcgtggggcccacttatctgctgatacagctgaatgcaaattcaattatcggggacggccctattatcctaaaagaggtagagtataggatgacctcgggatcttggacagagacacacgcagtgaacgccccaacctataaattgtggcacctagatcccgacaccgaatacgagatacgtgttcttctcactaggcctggtgagggtggcaccggcttgcctggccctccactcattacccgcaccaagtgcgcggaacctatgaggaccccgaagactctaaagatcgccgaaattcaggcccgtcgcatcgccgtggattgggaatccctcgggtataatatcacaagatgccacacctttaatgtcaccatctgttaccattactttagaggccacaacgagtccaaagcagattgtctggacatggatccaaaggcaccccagcatgtggtgaatcacctgcctccctataccaacgtgtcacttaaaatgatactgacaaatcctgaggggcggaaggaatccgaggaaaccataatccagacagatgaggacgtaccaggcccagtccccgttaagagtctgcaaggcacatcttttgaaaataagatttttctcaactggaaggaacccctcgaccccaacggtattatcactcagtatgagatctcctactctagcattcgctctttcgacccagccgttcccgtggcaggtccgcctcagaccgtcagcaacctgtggaactcaacccatcatgtgtttatgcacctgcaccccggcacgacatatcagttttttatccgtgccagtacagttaagggttttgggcctgccaccgccatcaacgtcaccaccaacatttcagccccgaccttgcctgactatgaaggagtagatgcgtccctgaacgaaacagctaccacaattacagtcctgctgcgacctgcacaagcaaagggggcccctataagcgcgtatcagattgtggttgaggagctgcaccctcatagaaccaagagagaggctggtgccatggaatgctaccaggtgcctgtgacgtaccagaacgccatgagtggcggagccccctactatttcgccgccgagcttccacctgggaatctcccagagcccgcgcctttcactgtaggagacaatagaacataccagggcttttggaatcctcctttggcgcccaggaaaggctacaacatctacttccaggcaatgagtagtgtggaaaaagagaccaagacacagtgtgtcagaatcgccaccaaggccgcagcaaccgaggagccagaagtgattcctgatccagctaagcagaccgatcgcgtggtgaaaatcgccgggataagcgcaggcattctggtgtttattttgcttttgctggtggtgattttaattgtgaaaaagcggcgcagctactactcatattcatattacctcaagctagctaaaaaacgcaaggacgctatggggaatactcgccaagaaatgacccatatggtgaatgccatggacaggagttacgctgaccagagtaccctgcacgcagaggaccctctttctatcacttttatggaccagcacaacttcagcccccgcttacccaacgatccacttgtgcccactgcagtgctagtgcctatcactgacgagaaccactccgctacagccgaatctagccggctgctggacgtgccgagatacctgtgcgaggggacggagtctccttaccagactggacagctgcacccagcgatacgggtggctgatttgttgcaacatattaatttgatgaaaacttcagatagctatggatttaaagaggagtatgagtccttttttgaaggacaatctgccagttgggacgtcgccaaaaaggaccagaatcgcgcaaaaaatcgttacgggaatatcattgcttacgatcatagcagagttattttacaaccagtggaagacgatccctcttccgattacatcaatgcaaactacattgatatatggctgtatcgcgatgggtaccagagacccagtcactacatcgctacccaaggacctgtacatgagacggtctacgacttttggaggatgatttggcaggaacagagcgcctgcatcgtgatggtgactaacctggtcgaggtgggaagagtcaagtgttataagtattggcctgacgacaccgaggtatatggagacttcaaagtcacttgtgtcgagatggagcctctggcagagtatgttgtgcgcacctttactttggagagacgcggctataatgagatccgagaggtcaaacaattccacttcaccggatggcccgatcatggggtcccttatcacgctactggcctcctgtcctttattcggagggtcaaactgtctaacccaccctctgcgggtccaatcgtagtgcattgctccgccggtgctggtagaaccgggtgctacattgtaattgacattatgttggatatggctgaaagagagggagtggtcgacatctacaattgtgtgaaggccctgaggagtaggaggatcaacatggtacagactgaggagcaatacatattcatacatgatgcaatccttgaggcatgcctgtgcggcgaaacagcaattccagtctgcgaattcaaggctgcatattttgatatgattcgaattgactctcaaacaaattcttcccacctgaaggatgaattccaaactctgaacagcgttacccctagactccaagctgaagattgttctattgcttgtctgcctcgcaatcacgataagaatcgtttcatggacatgctccccccagaccgttgtctgccattcctcattaccatagacggcgagagcagcaactatatcaatgctgctttgatggatagctaccgtcagcccgcggcttttatcgttactcagtatccactgcccaacaccgttaaggatttctggcgcctggtgtacgactacggttgtacatctatcgttatgcttaatgaagttgacttatcccaaggctgtccacaatactggcctgaagagggcatgttacgctatggtccgattcaagtagagtgcatgagttgcagtatggactgcgacgtcataaaccgcatttttcgtatttgcaatctcaccaggcctcaagaaggctacttaatggtgcagcagttccagtacctgggttgggccagtcacagggaggtccccgggagtaagagatcctttttaaagttaattttacaggtggaaaagtggcaagaggaatgtgaagagggtgaagggaggacaatcatacattgcttgaatggagggggccgctctggcatgttttgtgccattggaatcgtcgttgagatggtgaaacggcagaatgtggtggatgtgttccacgctgttaagacgctgagaaattcaaagccaaatatggtcgaagctcccgagcagtaccgcttctgctacgacgtggccctcgaatatttggagtccagctag

SEQ ID NO: 110891 - DNA, 4389 bp, Artificial Sequence
  derived and/or modified sequence
atggacaccactgccgccgcagctctccccgccttcgtggctctcttgctactgtcgccatggccccttttaggtagtgcacagggtcaatttagcgcaggcggctgcactttcgacgacggaccaggagcgtgcgattatcaccaagacctgtacgacgatttcgaatgggttcatgttagcgcccaggaacctcattaccttccccctgaaatgccccaagggtcttatatgatagtcgacagtagcgatcatgacccgggagaaaaggccagattgcagctgcccaccatgaaggagaatgatacccactgcatcgatttctcctacctgctttactcacaaaagggattaaatcccgggacattgaacatattggtacgggtgaataaggggcccctggctaacccaatttggaacgttactggtttcactgggcgagactggctgcgggccgaacttgcagtgagtacattttggccaaatgaatatcaagtgatctttgaggccgaagttagtggaggaagaagcggctacatcgccatcgacgatatccaagtgctctcctatccgtgtgacaaatctccacactttttgcgcttaggagacgtggaagtgaacgctggccagaatgccacatttcagtgtatcgccaccggtagggatgctgtccataataagctgtggcttcaaaggcgcaatggagaggacatccccgttgcccagaccaaaaatatcaatcacaggaggtttgcagcctcatttcggcttcaggaggtgacaaagaccgatcaggatctgtatcggtgcgtgacccagtccgaacggggcagtggggtgtctaacttcgcacaactcatcgtccgtgagccgcctaggcccatcgcccctcctcaactcctcggagtgggacccacctacctcctcatacagttgaacgccaatagcatcatcggcgatggtccaattattctgaaggaagtggagtatagaatgactagcggttcgtggaccgagactcatgcggttaatgcacccacatataaattatggcatctggaccccgacaccgaatacgagattcgcgtcctcttaacccggcctggggaaggtggcaccggcctgcctgggcctccactgatcacccgtacaaaatgtgccgaacccatgcggactcctaaaacactgaagatcgccgagatacaggctaggagaatcgctgtggattgggagagcttaggttacaacatcacccgctgtcacacatttaatgtcactatttgttatcattatttcagagggcacaatgagtccaaggcggattgcttagatatggatccgaaggcccctcagcatgttgtgaaccatctccctccctataccaatgtgtcgcttaagatgattctcaccaatccggaaggccgcaaggagtccgaggaaactatcattcagaccgacgaagatgttcccggcccggtccccgtcaagtccctgcaggggacgtcatttgagaataagatcttcttgaactggaaggaaccacttgatccgaatggaattatcactcagtacgagatatcctattcatccatccgatccttcgaccccgctgtccccgtagcggggcctcctcagaccgtctccaatctgtggaactctactcaccatgtttttatgcacttacatcctggtacaacttaccagtttttcattagggccagtaccgtgaagggctttggcccagctacagccatcaacgttacaactaacataagtgcccctaccctaccagattatgagggcgtggacgccagtttgaatgaaaccgctacaactatcaccgtgcttcttcgaccagctcaagccaagggggcccccatttccgcctaccagattgtcgtggaagaactccatcctcatcgaacgaagcgggaagcaggcgccatggaatgttaccaggtcccagtgacttatcagaatgcgatgagcggaggcgctccctattattttgcagcagagctcccacccggaaatcttccggagcctgctccttttaccgtgggggataataggacttaccagggattttggaaccctcctctggcccccaggaaaggttacaacatctactttcaggcgatgtcgtctgtggagaaggagacgaaaacacaatgtgtgagaattgctactaaagccgcagccacggaggagccggaggttatccctgatcctgccaagcagaccgaccgagtcgtgaagattgctggcataagcgctggtatactagtgtttatcctcctgttgcttgtcgtaatcctgattgtgaagaagagtaaactggcaaagaagagaaaagacgctatgggcaacactagacaggaaatgacccatatggtgaacgcgatggatagatcctacgcagatcaatctacattgcacgctgaggatccactgtctatcaccttcatggatcagcacaacttctcaccccgattgccaaacgatccgctcgtgccaaccgctgtccttgtgccgataacagatgaaaatcacagcgccactgcagaatcctcccgcctcctggacgtgcctcgatatctgtgtgaaggaaccgagtccccgtaccagaccgggcagttacatccggctatacgcgtcgccgacctgctgcaacacatcaacctgatgaagacttccgattcatacggttttaaagaagagtatgagagtttctttgaaggacagtccgcatcctgggatgttgctaagaaggatcaaaaccgagctaagaatagatatggcaatatcatcgcctacgaccattcaagagtgatattacagcccgtagaagacgacccttccagtgactacatcaatgccaactatatcgatatctggctgtacagagatgggtaccaaaggcccagccattatattgccacccaaggccccgtgcatgaaacagtctatgacttctggcggatgatatggcaggaacagtcagcgtgcatcgttatggtgactaatttagttgaggtcgggcgagtgaagtgttataagtactggcccgacgacactgaggtgtatggagacttcaaggtgacatgtgtagagatggaaccccttgcggaatacgtggttaggaccttcacgttggaaagacggggatataatgagatcagagaggtgaagcagttccattttacaggatggccggaccatggtgtgccttaccacgccactggattgctgtcatttatccgacgcgtgaagctaagcaatcccccaagtgccggcccaatcgttgtgcattgctcagcgggagccggccgcacagggtgttacattgtcatcgatatcatgctcgacatggctgagcgcgagggcgtcgttgatatatacaactgcgtgaaggcattgagaagcaggcggatcaatatggtgcagaccgaggagcagtacatctttatccatgatgccatcctggaagcctgcctgtgcggggaaacagctatacctgtatgcgaattcaaagccgcctattttgatatgattcggatcgatagtcagaccaatagcagccacctgaaggatgagtttcagactctgaactccgtcacacccagactgcaggctgaagattgcagcatcgcctgtctgcctcgaaatcatgacaagaatagatttatggatatgttgccacccgatcgctgtcttccctttctcatcaccatagacggcgagtccagtaattacatcaacgctgccttgatggatagctatagacagcccgccgccttcatcgtcacccaatatcccctgccaaacactgtgaaagacttctggagacttgtctatgattatggttgcacctcaatcgttatgttgaacgaggtggacctgtctcaaggatgcccacagtactggcctgaagaagggatgctaagatacggaccaatccaggttgagtgtatgtcctgttcgatggattgcgatgtgattaatagaatctttagaatatgcaatttgacaaggccacaggaaggatatctgatggttcaacagtttcagtacctcgggtgggcctcgcaccgtgaggttcccggcagcaaacggtcctttctgaagctgatcctgcaagtcgagaagtggcaagaggaatgtgaggagggtgaggggagaacaattattcactgtctgaacgggggtggccgatccggtatgttttgtgctattggcattgtcgtggagatggttaaaagacagaacgtggtggatgtctttcacgctgtaaaaactctgaggaactctaagcccaacatggttgaggccccagaacagtatcgcttctgctacgatgtggcgctggagtatctggagagctcctag

SEQ ID NO: 110892 - DNA, 4419 bp, Artificial Sequence
  derived and/or modified sequence
atggacaccacagctgctgctgccctgcctgcctttgtggccctgctgctgctgagcccctggcccctgctgggcagcgcccagggccagttctctgctgggggctgcacctttgatgatggccctggggcctgtgactaccaccaggacctgtatgatgactttgagtgggtgcacgtgtctgcccaggagccccactacctgcccccagagatgccccagggcagctacatgattgtggacagcagtgaccatgaccctggagagaaggcccggctgcagctgcccaccatgaaggaaaatgacacccactgcatcgacttctcctacctgctgtacagccagaagggcctgaaccctggcaccctgaacatcctggtgcgggtgaacaagggccccctggccaaccccatctggaatgtgacaggcttcaccggccgggactggctgcgggcagagctggccgtgtccaccttctggcccaatgagtaccaggtgatctttgaggccgaggtgtctgggggccgcagcggctacatcgccattgatgacatccaggtgctgagctacccctgtgacaagagcccccacttcctgcggctgggagatgtggaggtgaatgccggccagaatgccaccttccagtgcatcgccaccggcagagatgctgtgcacaacaagctgtggctgcagaggagaaatggagaggacatccctgtggcccagaccaagaacatcaaccacagaagatttgctgccagcttccggctgcaggaggtgaccaagacagaccaggacctgtaccgctgtgtgacccagagcgagcggggcagcggcgtgagcaactttgcccagctgattgtgcgggagcccccccggcccatcgccccaccccagctgctgggcgtgggccccacctacctgctgatccagctgaatgccaacagcatcattggagatggccccatcatcctgaaggaggtggagtacaggatgaccagcggctcctggacagagacccatgctgtgaatgcccccacctacaagctgtggcacctggaccctgacacagaatatgagatccgggtgctgctgaccaggcctggagagggcggcaccggcctgcccggccccccactcatcaccaggaccaagtgtgccgagcccatgaggacccccaagaccctgaagattgctgagatccaggccaggagaattgctgtggactgggagagcctgggctacaacatcacccgctgccacaccttcaacgtgaccatctgctaccactacttccggggccacaatgaaagcaaggctgactgcctggacatggaccccaaggccccccagcacgtggtgaaccacctgcccccctacaccaacgtgtccctgaagatgatcctgaccaaccctgagggcaggaaggagagcgaggagaccatcatccagacagatgaagatgtgcccggccctgtgcctgtgaagagcctgcagggcaccagctttgagaacaagatcttcctgaactggaaggagcccctggaccccaacggcatcatcacccagtatgagatctcctacagcagcatccgcagctttgatcctgctgtgcctgtggccggccccccccagacagtgagcaacctgtggaacagcacccaccacgtgttcatgcacctgcaccctggcaccacctaccagttcttcatccgggccagcacagtgaagggctttggacctgccacagccatcaacgtgaccaccaacatcagcgcccccaccctgcctgactatgaaggagtggatgccagcctgaatgaaacagccaccaccatcaccgtgctgctgcggcctgcccaggccaagggggcccccatcagcgcctaccagatcgtggtggaggagctgcacccccacaggaccaagcgggaggccggggccatggagtgctaccaggtgcctgtgacctaccagaatgccatgtctggaggagccccctactactttgctgctgagctgcccccaggcaacctgcctgagcccgcccccttcaccgtgggggacaacagaacctaccagggcttctggaacccccccctggcccccaggaagggctacaacatctacttccaggccatgagctctgtggagaaggagaccaagacccagtgtgtgcgcatcgccaccaaggctgctgccacagaggagcctgaggtgatcccagaccctgccaagcagacagacagagtggtgaagattgctggcatctctgctggcatcctggtgttcatcctgctgctgctggtggtgatcctgattgtgaagaagaggaggagctactacagctacagctactacctgaagctggccaagaagaggaaggatgccatgggcaacacccggcaggagatgacccacatggtgaatgccatggacaggagctatgctgaccagagcaccctgcacgccgaggaccccctgagcatcaccttcatggaccagcacaacttcagcccccggctgcccaatgaccccctggtgcccacagctgtgctggtgcccatcacagatgagaaccacagcgccacagctgagagcagccggctgctggatgtgccccgctacctgtgtgagggcacagagagcccctaccagacaggccagctgcacccagccatccgggtggccgacctgctgcagcacatcaacctgatgaagaccagtgacagctatggcttcaaggaggagtatgagagcttctttgagggccagagcgcctcctgggatgtggccaagaaggaccagaacagagccaagaacagatatggcaacatcatcgcctatgaccacagcagggtcatcctgcagcctgtggaggatgaccccagcagtgactacatcaatgccaactacatcgacatctggctgtacagagatggctaccagaggcccagccactacatcgccacccagggccctgtgcatgagaccgtgtatgacttctggaggatgatctggcaggagcagagcgcctgcatcgtgatggtgaccaacctggtggaggtgggccgggtgaagtgctacaagtactggccagatgacacagaggtgtatggagacttcaaggtgacctgtgtggagatggagcccctggccgagtatgtggtgaggaccttcaccctggagcggcggggctacaatgagatccgggaggtgaagcagttccacttcaccggctggccagaccacggcgtgccctaccacgccaccggcctgctgtccttcatccggcgggtgaagctgagcaaccccccatctgctggccccatcgtggtgcactgcagcgctggagctggccgcacaggctgctacatcgtcatcgacatcatgctggacatggccgagcgggagggcgtggtggacatctacaactgtgtgaaggccctgcggagccgccgcatcaacatggtgcagacagaggagcagtacatcttcatccatgatgccatcctggaggcctgcctgtgtggggagacagccatccctgtgtgtgagttcaaggccgcctactttgacatgatcagaattgacagccagaccaacagcagccacctgaaggatgagttccagaccctgaacagcgtgaccccccggctgcaggccgaggactgcagcatcgcctgcctgcccaggaaccacgacaagaaccgcttcatggacatgctgcccccagaccgctgcctgcccttcctgatcaccattgatggagagagcagcaactacatcaatgctgccctgatggacagctaccggcagcctgctgccttcatcgtgacccagtaccccctgcccaacacagtgaaggacttctggaggctggtgtatgactatggctgcaccagcatcgtgatgctgaatgaggtggacctgagccagggctgcccccagtactggccagaggagggcatgctgcgctatggccccatccaggtggagtgcatgagctgcagcatggactgtgatgtgatcaaccgcatcttccgcatctgcaacctgacccggccccaggagggctacctgatggtgcagcagttccagtacctgggctgggccagccaccgggaggtgcccggcagcaagaggagcttcctgaagctgatcctgcaggtggagaagtggcaggaggagtgtgaggagggggagggccgcaccatcatccactgcctgaatggaggcggccgcagcggcatgttctgtgccatcggcatcgtggtggagatggtgaagaggcagaatgtggtggatgtgttccacgctgtgaagaccctgaggaacagcaagcccaacatggtggaggcccctgagcagtaccgcttctgctatgatgtggccctggagtacctggagagcagctag

SEQ ID NO: 110893 - DNA, 4389 bp, Artificial Sequence
  derived and/or modified sequence
atggacaccacagctgctgctgccctgcctgcctttgtggccctgctgctgctgagcccctggcccctgctgggcagcgcccagggccagttctctgctgggggctgcacctttgatgatggccctggggcctgtgactaccaccaggacctgtatgatgactttgagtgggtgcacgtgtctgcccaggagccccactacctgcccccagagatgccccagggcagctacatgattgtggacagcagtgaccatgaccctggagagaaggcccggctgcagctgcccaccatgaaggaaaatgacacccactgcatcgacttctcctacctgctgtacagccagaagggcctgaaccctggcaccctgaacatcctggtgcgggtgaacaagggccccctggccaaccccatctggaatgtgacaggcttcaccggccgggactggctgcgggcagagctggccgtgtccaccttctggcccaatgagtaccaggtgatctttgaggccgaggtgtctgggggccgcagcggctacatcgccattgatgacatccaggtgctgagctacccctgtgacaagagcccccacttcctgcggctgggagatgtggaggtgaatgccggccagaatgccaccttccagtgcatcgccaccggcagagatgctgtgcacaacaagctgtggctgcagaggagaaatggagaggacatccctgtggcccagaccaagaacatcaaccacagaagatttgctgccagcttccggctgcaggaggtgaccaagacagaccaggacctgtaccgctgtgtgacccagagcgagcggggcagcggcgtgagcaactttgcccagctgattgtgcgggagcccccccggcccatcgccccaccccagctgctgggcgtgggccccacctacctgctgatccagctgaatgccaacagcatcattggagatggccccatcatcctgaaggaggtggagtacaggatgaccagcggctcctggacagagacccatgctgtgaatgcccccacctacaagctgtggcacctggaccctgacacagaatatgagatccgggtgctgctgaccaggcctggagagggcggcaccggcctgcccggccccccactcatcaccaggaccaagtgtgccgagcccatgaggacccccaagaccctgaagattgctgagatccaggccaggagaattgctgtggactgggagagcctgggctacaacatcacccgctgccacaccttcaacgtgaccatctgctaccactacttccggggccacaatgaaagcaaggctgactgcctggacatggaccccaaggccccccagcacgtggtgaaccacctgcccccctacaccaacgtgtccctgaagatgatcctgaccaaccctgagggcaggaaggagagcgaggagaccatcatccagacagatgaagatgtgcccggccctgtgcctgtgaagagcctgcagggcaccagctttgagaacaagatcttcctgaactggaaggagcccctggaccccaacggcatcatcacccagtatgagatctcctacagcagcatccgcagctttgatcctgctgtgcctgtggccggccccccccagacagtgagcaacctgtggaacagcacccaccacgtgttcatgcacctgcaccctggcaccacctaccagttcttcatccgggccagcacagtgaagggctttggacctgccacagccatcaacgtgaccaccaacatcagcgcccccaccctgcctgactatgaaggagtggatgccagcctgaatgaaacagccaccaccatcaccgtgctgctgcggcctgcccaggccaagggggcccccatcagcgcctaccagatcgtggtggaggagctgcacccccacaggaccaagcgggaggccggggccatggagtgctaccaggtgcctgtgacctaccagaatgccatgtctggaggagccccctactactttgctgctgagctgcccccaggcaacctgcctgagcccgcccccttcaccgtgggggacaacagaacctaccagggcttctggaacccccccctggcccccaggaagggctacaacatctacttccaggccatgagctctgtggagaaggagaccaagacccagtgtgtgcgcatcgccaccaaggctgctgccacagaggagcctgaggtgatcccagaccctgccaagcagacagacagagtggtgaagattgctggcatctctgctggcatcctggtgttcatcctgctgctgctggtggtgatcctgattgtgaagaagagcaagctggccaagaagaggaaggatgccatgggcaacacccggcaggagatgacccacatggtgaatgccatggacaggagctatgctgaccagagcaccctgcacgccgaggaccccctgagcatcaccttcatggaccagcacaacttcagcccccggctgcccaatgaccccctggtgcccacagctgtgctggtgcccatcacagatgagaaccacagcgccacagctgagagcagccggctgctggatgtgccccgctacctgtgtgagggcacagagagcccctaccagacaggccagctgcacccagccatccgggtggccgacctgctgcagcacatcaacctgatgaagaccagtgacagctatggcttcaaggaggagtatgagagcttctttgagggccagagcgcctcctgggatgtggccaagaaggaccagaacagagccaagaacagatatggcaacatcatcgcctatgaccacagcagggtcatcctgcagcctgtggaggatgaccccagcagtgactacatcaatgccaactacatcgacatctggctgtacagagatggctaccagaggcccagccactacatcgccacccagggccctgtgcatgagaccgtgtatgacttctggaggatgatctggcaggagcagagcgcctgcatcgtgatggtgaccaacctggtggaggtgggccgggtgaagtgctacaagtactggccagatgacacagaggtgtatggagacttcaaggtgacctgtgtggagatggagcccctggccgagtatgtggtgaggaccttcaccctggagcggcggggctacaatgagatccgggaggtgaagcagttccacttcaccggctggccagaccacggcgtgccctaccacgccaccggcctgctgtccttcatccggcgggtgaagctgagcaaccccccatctgctggccccatcgtggtgcactgcagcgctggagctggccgcacaggctgctacatcgtcatcgacatcatgctggacatggccgagcgggagggcgtggtggacatctacaactgtgtgaaggccctgcggagccgccgcatcaacatggtgcagacagaggagcagtacatcttcatccatgatgccatcctggaggcctgcctgtgtggggagacagccatccctgtgtgtgagttcaaggccgcctactttgacatgatcagaattgacagccagaccaacagcagccacctgaaggatgagttccagaccctgaacagcgtgaccccccggctgcaggccgaggactgcagcatcgcctgcctgcccaggaaccacgacaagaaccgcttcatggacatgctgcccccagaccgctgcctgcccttcctgatcaccattgatggagagagcagcaactacatcaatgctgccctgatggacagctaccggcagcctgctgccttcatcgtgacccagtaccccctgcccaacacagtgaaggacttctggaggctggtgtatgactatggctgcaccagcatcgtgatgctgaatgaggtggacctgagccagggctgcccccagtactggccagaggagggcatgctgcgctatggccccatccaggtggagtgcatgagctgcagcatggactgtgatgtgatcaaccgcatcttccgcatctgcaacctgacccggccccaggagggctacctgatggtgcagcagttccagtacctgggctgggccagccaccgggaggtgcccggcagcaagaggagcttcctgaagctgatcctgcaggtggagaagtggcaggaggagtgtgaggagggggagggccgcaccatcatccactgcctgaatggaggcggccgcagcggcatgttctgtgccatcggcatcgtggtggagatggtgaagaggcagaatgtggtggatgtgttccacgctgtgaagaccctgaggaacagcaagcccaacatggtggaggcccctgagcagtaccgcttctgctatgatgtggccctggagtacctggagagcagctag

SEQ ID NO: 110894 - DNA, 4419 bp, Artificial Sequence
  derived and/or modified sequence
atggacaccaccgccgccgccgccctgcccgccttcgtggccctgctcctcctgagtccatggcccttgctgggaagtgctcaagggcagttttcagcaggtgggtgtaccttcgatgatggaccaggcgcttgtgactatcaccaggacctgtacgatgacttcgaatgggttcatgtcagcgcacaggagccccattaccttcctccagaaatgccccaggggtcatacatgattgtggatagcagcgatcatgaccctggggagaaagccagactacagctgcccacgatgaaagaaaatgatacccactgcatcgatttcagctacctgctgtactcccaaaagggactaaacccagggactctgaatattctcgtccgggtcaacaagggccctctggccaaccctatatggaacgtaacgggcttcaccgggcgagattggctgcgtgccgagttagctgtgagtactttctggcccaacgaataccaggtgatattcgaagcagaggtaagtggcggccggagtgggtatatcgctatcgacgacatacaggtcttatcctacccctgcgacaagagccctcacttcctccggctcggagatgttgaggtaaatgccggtcagaacgctaccttccagtgtattgctactggtcgcgacgcagtccacaataaactttggctgcagcgcaggaacggggaggatatccccgttgcccagaccaaaaacatcaatcaccgtaggttcgccgcctccttcaggctgcaggaggttaccaagaccgatcaggatctgtaccggtgtgtaacccagagcgaaaggggaagtggggtttcaaatttcgctcagctcatcgtacgcgagcccccacgaccgatcgcccccccccaattactgggcgtcggaccaacctatctccttatccagctgaatgctaatagtatcattggggacggccctataatccttaaggaggtggagtaccggatgacttccggttcctggaccgagacccatgccgtgaatgctcccacctacaaattgtggcatttggacccagacacggaatacgaaatccgcgtgctgctcaccaggcccggtgaaggcggtacgggtctacccggaccaccactgattacccggaccaagtgcgctgaacctatgcgaacacccaaaacgttaaagattgccgagattcaagcaagaaggatcgcagttgactgggagtctctgggctacaacatcacccgctgccacacattcaatgtgaccatctgctatcattatttccgcggccacaacgaatcaaaggcggattgcctcgacatggaccctaaagccccacagcacgtggtgaatcatctgcccccctatactaacgtgtcactcaaaatgattctcaccaatcctgaaggaagaaaagagagcgaggaaacaatcattcagaccgacgaggacgtccccgggcctgtgccggtcaaatctctgcagggtaccagctttgagaataagatttttctgaactggaaggagccactggaccctaacgggattatcacccaatatgagatctcctattcttctatcaggtcatttgaccccgccgtgcctgttgcgggccctccgcaaacagtctccaatctgtggaattcaactcatcatgtattcatgcacctccaccctggcactacctaccagtttttcattagggcgtccaccgtcaaaggattcggaccagccaccgcgatcaacgttactacaaacatatccgcacctacactccctgattatgagggcgtggacgcgtccttaaacgagacagcaacgaccataactgtgctgttaaggccagctcaggcaaagggggctcctattagcgcatatcagattgtcgtcgaggagctccacccccatcgtactaagcgtgaggcaggcgccatggaatgttaccaggtgcctgtgacatatcagaacgctatgtccggtggagccccctactatttcgccgcggaactgccccccgggaacttgcctgagcccgcacctttcacagtaggggataataggacctaccagggattctggaatcctccactggccccacgaaagggttacaatatctatttccaggctatgtcttccgtggagaaagagacgaagacccagtgtgtgagaattgccacaaaggctgcagccaccgaggagcccgaggtcatcccagacccagcaaagcagaccgatcgagttgtgaagatagccggcatttccgccggaatactagtttttattcttctgttgttagtcgtaattctaattgttaaaaaaagacgttcctactactcatactcatattacctgaagttggcaaaaaagcggaaggatgctatgggcaatactaggcaggagatgacccacatggtcaatgctatggacagatcctatgcggaccagagcaccctccacgctgaagatcccctcagcattacattcatggatcagcacaactttagtccaaggctgcctaatgatcctctcgtgcctacagccgtgctggtaccgatcaccgatgagaaccacagcgccaccgctgagagctctcgactgctggatgtccctaggtacctctgtgaggggacagaatcaccctaccaaactggccagctgcatcccgcaatccgggttgccgacctgctccagcatattaatttgatgaagacgagtgatagttacgggtttaaggaagagtacgagtccttctttgagggccaaagcgcctcctgggacgttgccaaaaaggatcaaaacagggcgaagaacagatatggtaatatcatagcctacgatcactctagggtaattctccagcccgtagaggacgacccctctagcgattacattaatgctaactatatcgacatttggctatatagagatggttatcagaggccttcccactatatcgcaacacagggccccgtccacgaaaccgtgtatgacttctggcgcatgatatggcaagaacagtccgcctgtatagtcatggttaccaatctcgtagaggtagggagggtgaagtgctacaagtattggccagatgacactgaggtctacggagatttcaaagttacatgcgttgagatggagcccttggccgaatacgtcgtccggaccttcacgttggagcgtagagggtacaacgaaattcgggaggttaagcagttccattttaccgggtggcctgaccacggagttccttatcatgccaccggattgctctcctttattaggcgcgttaaactgtccaatccccccagtgccggtcccattgttgtccactgttcggctggtgcaggaaggacaggttgttacatcgtgatcgacattatgctggatatggcggaaagagagggagtggtggacatttacaattgcgtcaaggccctcaggtccagaaggatcaacatggtacagaccgaagaacagtacatttttattcacgacgccattttggaggcttgtttatgcggggaaactgctatccccgtttgtgagtttaaagcagcctacttcgacatgatcaggatagatagtcagaccaactcctcacacctgaaggatgaattccagacactgaactctgtgactccacggttgcaggcggaggattgtagtattgcatgcctgcctcgaaatcacgataaaaatcgtttcatggacatgttgccccccgatcggtgtcttccattcctgatcaccattgatggggagtcatcaaattacattaacgctgcactgatggatagctatcgacaacccgccgctttcatcgtgacgcagtatccgctgccaaataccgtcaaggacttctggcggctcgtctatgattacgggtgtacgtccatcgtaatgctgaacgaggtggatctctctcaggggtgccctcagtactggccagaggagggtatgctaaggtatggcccgattcaggtggaatgtatgagctgtagtatggactgcgatgtcattaaccggatttttcggatctgcaatctgacacgcccccaagaaggatatttaatggtgcaacagtttcaatacttgggctgggcctctcatcgggaggttcctgggagcaagcgaagttttctcaagttgattctacaggtggaaaaatggcaggaggaatgcgaggaaggggaaggacggactatcattcactgcttgaatggtggcggaagaagcggaatgttctgtgccataggcatcgtggtagaaatggtaaaacggcagaatgtggtcgacgtattccacgctgttaagaccttaagaaattccaaacccaatatggtggaggctccagagcagtaccgcttctgttacgacgtagcccttgagtaccttgaatcgtcttag

SEQ ID NO: 110895 - DNA, 4389 bp, Artificial Sequence
  derived and/or modified sequence
atggacaccaccgccgccgccgccctgcccgccttcgtggccctgctgctcctgtcaccctggccattgctgggaagcgcccagggccagttttcagccggcggatgcacgttcgacgatgggcctggagcttgtgattatcatcaggacctgtacgatgacttcgagtgggtccacgtgtccgcccaagagcctcactacctccccccagagatgccacagggctcttacatgatagtggatagctccgatcacgacccaggggaaaaagcacggctccagctgcctaccatgaaggagaacgacactcattgcatcgacttctcatatctgttgtactctcagaaaggtttgaatccaggtacattgaacatcctggtgcgggttaacaaaggtcccctggctaatccgatttggaacgtaaccggctttaccggcagggattggttgagagccgagctggccgtatctacgttctggccgaacgaataccaggtgatttttgaggctgaggtctccggaggaaggagcggatatatcgctattgacgacattcaggtgctctcatacccatgtgataagtccccccacttcctacggctaggcgatgttgaagtaaacgccggtcagaacgccacgtttcaatgtattgcgactggcagagacgctgtgcacaacaaactgtggttgcagagacgcaatggcgaggatataccggtggcacaaactaaaaacataaaccaccggagatttgccgcatcattcagattgcaggaggtgactaagaccgatcaggatttgtaccgctgtgtgacacaatcggaaaggggttctggagtctccaatttcgcccagctgattgtgcgcgagccaccaaggcccatcgctccgccccaactgctgggagtaggacccacctacctgctgattcagctgaatgcgaacagtatcattggggacggaccgatcatccttaaagaagtcgaatatagaatgacgagcggcagctggaccgaaacacatgctgtgaatgctcctacctacaagttatggcacctcgacccagataccgagtacgagatacgagtgctcctgacccggcccggggagggcggcacaggcctcccagggccaccacttatcacccgcacgaagtgcgccgagcccatgcgaacccccaaaacacttaaaattgcagagatacaggccaggcggattgccgtggactgggaatccttgggatacaatatcacgaggtgccatacttttaacgtgacaatctgctaccattacttcagaggtcacaatgaatctaaggccgactgtttggacatggaccctaaggctccgcagcatgtcgttaatcacttgcccccttacactaatgtgagccttaagatgatcctaacaaacccagagggaaggaaggagtctgaagagaccattatccagaccgatgaagatgtccccggccctgtaccagtgaaatcactccaggggacatctttcgaaaacaagatattcttgaactggaaagagccgcttgaccccaacggaatcattactcagtatgagatctcatacagctccattcgctcgttcgatcctgccgtccctgtggctggccctccacagaccgtgagcaatctctggaatagcacccatcacgtttttatgcacctgcaccctggcaccacataccagttttttatccgcgcctcgactgttaaggggtttggtcccgccacagccatcaatgtgacgactaacattagcgctccaactctgcctgattatgagggtgtcgatgcatctctgaacgagaccgcgactacaattaccgtccttctgagacctgcccaggccaagggtgctcccattagtgcataccaaatcgtcgttgaagagttgcatcctcacaggacaaaacgagaggccggcgctatggagtgctaccaggtccccgtcacgtaccaaaacgcaatgagtggaggagcaccatattatttcgccgctgagctcccccctggcaacttaccggagcctgcccctttcacagttggcgacaatcggacgtaccaggggttctggaatccacctttggccccaagaaaaggctataatatctacttccaggccatgagctcggtggagaaggaaacgaagacacagtgtgtcagaattgcaactaaagcagcagcaacagaagagccggaagtgatacctgatcccgccaaacaaacagaccgcgtcgtcaagatagccgggatcagtgctggtattctagtttttattctcctgctgctcgttgtaatcctcattgtgaagaagtctaagctggctaagaagaggaaagacgccatgggcaatactagacaggagatgacacatatggtgaatgcgatggatcgttcatatgcagaccaatctacactgcatgccgaggaccctctgtctattacctttatggaccagcacaactttagccctaggctcccgaacgaccccctcgtgcccaccgcggttctcgttccaattacggatgaaaatcactcggctaccgcagaaagtagtaggctgcttgacgtgcctaggtatctctgcgaaggaacagagtccccctatcagactggtcaactgcacccggcaatcagggtggccgacctgttgcagcacatcaacctcatgaaaactagcgactcatacggctttaaagaggagtatgagtcattttttgaggggcagagtgcctcatgggatgtggccaagaaggatcagaacagggcgaagaatcggtacggcaatatcatcgcttatgatcactcgcgggtcatcctacagcccgtggaggacgatccatcctccgactatataaatgccaattacatcgacatatggctttaccgggatggttaccagcgtccctcccactacatcgctacccaggggccagtgcacgaaactgtgtatgacttctggcggatgatttggcaagaacagtccgcctgtatcgtgatggttactaacctggtcgaagttgggcgggtcaaatgctacaaatactggccagacgataccgaagtttacggggacttcaaggtgacttgtgtggagatggaacctctcgcagagtatgtcgttcgtacattcaccctggaacggcgcggatataatgagattcgtgaggtgaaacaatttcactttactgggtggccagaccacggggttccttaccatgccacagggctcctaagcttcattcgcagggttaagctgagcaacccccccagtgccggaccgattgtggtgcattgtagcgctggagcaggtcggaccgggtgttatatagtgatcgatattatgctcgacatggccgaacgggaaggggtggtagatatatacaattgtgtcaaggctctacgatcccgcagaatcaacatggtgcaaactgaggagcagtatatctttattcatgatgcaattctggaggcctgcctgtgtggggagaccgcaattcccgtgtgtgaattcaaggcagcctacttcgatatgatacgtatcgattcccagaccaattcttcccacctgaaagacgaatttcagaccttgaatagcgtgacgccccgattacaggctgaagactgctccattgcgtgtctgcctagaaatcatgataagaacaggtttatggacatgctgccccccgacagatgcctccctttcctgattacaatcgatggcgaatctagtaattatatcaatgccgccctgatggattcgtataggcagcccgccgcttttattgtgacacagtacccactgcccaacaccgtgaaggatttttggcggctggtgtatgactacggatgcacctccattgtgatgctgaacgaagttgatttaagtcagggatgtccccagtattggcctgaggaagggatgctgcgctacggacccatccaggtagaatgcatgagctgctctatggactgtgatgtcattaatcgtatatttcgaatctgcaatttaacacgcccccaggaaggttacttaatggtgcagcagttccaatacctgggctgggcctcccaccgggaggtgccaggaagtaaacggtcatttttgaaattgattctccaggtggagaaatggcaggaggaatgtgaggagggagagggccgcaccattatacactgtctgaacggagggggcaggtccggtatgttttgtgctatcggaattgtggttgagatggtcaagcgccagaacgtggtcgacgtttttcacgccgtcaagaccctgcggaattctaaacctaacatggtggaggcccctgaacagtaccggttctgttacgatgtcgcgctggagtatcttgaaagcagctag

SEQ ID NO: 110896 - DNA, 4419 bp, Artificial Sequence
  derived and/or modified sequence
atggacacgaccgcggcagccgcactgcccgctttcgttgcacttttactcctgtcaccttggccactgctcggttccgcccaggggcaattctctgcagggggatgtactttcgacgacgggcctggcgcatgtgactatcaccaggatctgtacgacgattttgaatgggtgcacgtcagcgcccaggagccccactatctgcccccagagatgccacaggggagctacatgattgtggacagcagcgatcacgatcctggagagaaggcccgtctgcaattgccaacaatgaaggagaatgacacacattgtatagacttcagctacctactgtacagtcaaaaggggctaaatccaggtaccttaaatattctagtaagagtgaacaagggtcccctggcgaaccccatctggaatgttacaggcttcacgggtcgcgactggcttcgcgcagaactggccgtgtccaccttctggcccaacgaataccaagttatttttgaagcagaggtctcaggaggacgctcgggctacatcgctatcgatgacattcaagtgctcagctacccctgtgataagtccccccactttttgaggctgggcgacgttgaggtgaacgcagggcagaatgccacttttcagtgcatcgccacgggtcgcgacgctgtacataataaactctggctccagcggagaaacggcgaggatattcccgtggcccagactaagaatatcaatcaccgaagattcgctgccagctttcggctgcaggaggttacaaaaaccgatcaagacctgtaccggtgtgttacacaaagcgagcgcggtagcggtgtgagtaacttcgcccagctcattgtgcgggaacccccacggcctattgcccctccccaactattgggggtgggacctacctacttgctgatccaattaaatgccaactctatcatcggagatggaccaataatcctgaaggaggtagagtatagaatgacatctgggagttggacggaaactcacgctgtcaatgcccctacgtataaactgtggcacttggatcccgacaccgagtacgagattcgcgtcctgctgactcggcctggtgagggtggcacgggacttcccggacctcctttgataaccaggacaaagtgtgctgagccaatgaggacgccgaagaccctgaaaattgctgaaatccaggcgaggcgcattgcagtcgattgggaatccctaggatacaatataacaagatgccatacattcaacgttactatctgctaccactatttccgcggtcataacgagtctaaggctgactgcttagatatggatcccaaggcccctcagcacgtagtgaatcacttgcctccctatacaaatgttagcctgaaaatgatcctcacaaatcctgaggggaggaaggagtccgaagagacaatcattcaaactgacgaagacgtgccgggacccgtgcctgtcaagtccctgcaggggacatcattcgagaacaagattttcttaaattggaaagaacccctagacccaaacggtataataactcagtacgaaatatcttactcctccatcagaagttttgatcccgctgttccagtggcaggtccccctcagactgtgtcaaatctgtggaactcaacacatcatgtgtttatgcaccttcatccaggaaccacctaccaatttttcatccgcgcatccactgtaaaggggttcggacccgctaccgcaatcaatgtcactaccaatattagcgctcccactctgcccgactacgagggcgttgacgctagcctgaacgaaaccgccacaaccataactgtgctcctgagaccagcccaggcgaagggggcacccatcagtgcatatcagatcgtcgtggaggaactgcatccacatcgcactaagcgagaggctggagcaatggagtgttaccaagtacctgtgacctatcaaaacgccatgtctgggggagctccttactactttgccgctgagctcccacccggtaatcttccagaacctgccccatttaccgtcggcgataacagaacttaccaaggcttttggaatccgcctctcgctcccagaaagggatacaatatctacttccaagccatgtcatctgtggaaaaagagacaaaaacccagtgcgtacgcattgccaccaaagccgctgctacggaagaaccagaggtgattcccgacccagccaagcagaccgacagagtggtcaagattgcgggtatttccgcgggaatcttggtttttattctgctgctacttgtggttatcctaatagtgaaaaagagacggagttactactcttattcgtattatctaaagcttgcaaagaagaggaaggatgcaatggggaatactagacaagagatgacacatatggttaacgcgatggaccgatcttatgcggaccaaagcacactgcatgccgaggatcctctgtccattacctttatggatcagcataacttctccccaaggctgcctaatgaccctctggtacctacggccgttctcgtccctatcaccgacgagaaccactcagccacggctgagtctagtagacttctggacgtgccgcgatatttgtgtgaaggcacagagagtccttaccagaccggccagcttcatcccgcaatcagagtggccgacttactgcaacatatcaacttaatgaaaacctctgactcctacgggtttaaagaggagtacgagtctttcttcgaaggacagtcagcctcttgggatgtggcgaaaaaggaccagaatcgcgcaaaaaatcgttatggcaacatcatcgcctacgaccacagccgcgtgatccttcagcccgtggaagatgaccccagctccgactatattaacgctaactatatcgatatatggctgtaccgggatgggtatcagcgcccaagccactacatcgccacccaaggccctgttcatgagactgtgtatgatttctggagaatgatttggcaggaacagtccgcctgtattgtgatggtgaccaatctcgtggaggtgggcagggtcaagtgctacaagtattggcccgatgacaccgaagtgtatggcgatttcaaggttacatgtgttgagatggaaccattagccgagtacgtcgtgcggacatttaccttggagcgcagaggctataacgagatccgggaggtcaagcagtttcattttaccgggtggcctgatcatggagttccataccacgccaccggtctgttgagcttcattaggagagtgaagctttcaaaccctccatccgctggccctattgtggtccattgctcagccggtgccggacggacaggatgctacattgtcatcgacattatgctggatatggcagagagggaaggtgtggtggacatttacaattgcgtgaaggccctgcgaagtaggagaataaacatggtgcagacagaagagcagtacattttcatccatgatgcaatcttagaagcatgcctgtgtggggagacagcaatccctgtgtgcgagtttaaggctgcatattttgacatgatacgcatcgactctcagactaacagctcccacctgaaagatgaatttcagaccttgaattcagtgaccccgcgactgcaggctgaggattgttctatcgcctgcctgccaagaaatcacgataagaaccgatttatggacatgttgccccctgataggtgcttaccttttttgatcaccatagacggggaatcttcaaattacattaacgcagccctgatggattcctatagacagcccgcagctttcattgttactcagtaccctctgcccaacacagtgaaggacttttggcgactggtttatgattatggttgcaccagcatcgtcatgctcaacgaagtggacctgtcccaaggatgtccccaatattggcccgaggagggtatgttgcgctatgggccaatccaggtcgaatgcatgagctgtagtatggactgcgatgtgattaatagaatttttcgaatctgtaacctgaccaggccccaagaaggatacctgatggtgcaacagttccagtacctcggctgggcctcgcaccgtgaggtccctggaagcaaaagaagcttcctgaagctaattttgcaagtggagaagtggcaagaagagtgtgaggagggggagggtaggacaatcatccattgcctgaatggcggagggagatccggaatgttttgcgccatcggaatcgtggtggagatggtgaagaggcagaacgttgtcgacgtatttcacgctgtgaagacactgcgcaactcgaagcctaatatggttgaggctccagaacagtacagattctgctatgatgtcgccctcgaatacctagaatcctcctag

SEQ ID NO: 110897 - DNA, 4389 bp, Artificial Sequence
  derived and/or modified sequence
atggatacaacagccgcagccgctctgccagcatttgttgctctgctgctcctgagcccttggcctctactcggttccgctcagggtcagttctcagcagggggatgcacctttgatgacggaccaggcgcatgcgattatcaccaggacttgtacgacgacttcgagtgggtccacgtgtcagcacaggaaccccattatttaccccctgaaatgccccagggttcctacatgattgttgacagttctgatcacgaccccggagaaaaggccagactgcagttaccgacgatgaaagaaaacgatactcactgtatcgactttagttaccttctttactcacagaaaggtcttaaccccggtacactcaacatcttagtacgtgttaataagggacccctagcaaatcctatctggaatgtcaccgggtttactggtagggattggttacgcgctgagctggccgtctccactttctggcccaacgagtaccaggtcatcttcgaggccgaggtcagcggtggacgctccggctatatagccatcgacgacatacaagtgctctcctatccatgtgacaagtccccacacttcctcaggcttggggacgttgaagtaaacgcaggccagaacgccactttccagtgcatcgccactggacgggatgctgtgcataataaactctggttacaaaggagaaacggagaggacatccctgttgcacagacgaaaaacatcaaccatcggcgtttcgcagcatcattccgcctgcaggaggtcactaaaactgatcaggatctttatcggtgtgttactcagagtgagcgcggatccggggtatctaacttcgcacagctcatcgtacgtgaaccccctaggcccatcgctcctccacagctgcttggggtaggccctacctacctgctgatacagctaaatgccaatagcatcattggagatggtccgattattttgaaggaagtggaatataggatgaccagtggttcgtggactgagactcacgccgtgaatgcacccacatataagctctggcacctggatcccgacactgaatacgaaattagggtgcttctgacccgaccgggagaggggggaacagggctgccgggacccccacttataacaaggacgaaatgcgctgagccgatgcggaccccgaagacgctgaaaatagccgagatacaagcccgtcgaattgcagttgactgggaaagtttaggatataatatcacgcggtgccatacattcaatgttacgatttgctatcactatttccgaggccataacgagtctaaagccgattgtcttgatatggatccaaaagcccctcagcatgtcgtgaaccatttgcccccatacactaatgtgagtcttaaaatgatcctgacaaaccccgaaggacgtaaggagagcgaggaaaccattatccagacagatgaggatgtaccgggacctgtgccagtgaagagtctccagggtactagtttcgagaacaagatctttctcaactggaaggagccactggaccccaatggcattatcacacagtacgagatctcttattcaagcatcaggtcttttgaccccgcagtgccagtagcaggtcccccacagaccgtgagcaacctctggaactcaacccaccacgtgttcatgcacttacacccgggaactacgtatcagttcttcataagggcgagtacagtgaagggtttcggccctgccactgccatcaacgtgaccactaatatttcagcaccgacactgcctgattatgagggcgtggatgcatctctcaatgaaaccgcaaccactatcacagtgctgttgcggcctgctcaggctaaaggtgcaccaattagcgcctatcagatcgtcgtggaggagctccacccccacagaacgaaaagggaggccggagccatggaatgctaccaggttccagtaacataccaaaacgccatgagtggcggagctccctactattttgcagccgagcttccacctggcaatctgcctgagcctgctcctttcaccgttggcgacaatcgaacatatcagggcttctggaatcctcccctggcacccaggaaggggtacaacatctactttcaagccatgagctccgtggaaaaggagactaaaacccagtgcgtgaggatcgccaccaaagccgcagcaaccgaggagcctgaagtgatcccagatccagctaaacagaccgatcgggtggttaagatagctgggatcagcgcgggaattttagttttcatcctgttgctattagttgtcatcctaatcgtgaagaaatctaagctggcgaagaagagaaaggatgcaatgggaaacaccagacaggagatgacccacatggttaacgcaatggataggagttacgccgatcagagcaccctgcacgctgaagatccactctccattacgttcatggaccagcataatttcagtccgagactgccaaatgacccacttgtgcctacagccgtgctggttcccatcacagatgagaaccatagtgctacggctgagagctccaggctgctggatgtaccaagatatctgtgtgagggaaccgagagcccttatcagaccgggcaactccacccagccattagggttgcagacctattgcaacacatcaacctcatgaagacctcggacagttacggttttaaagaagagtacgaatctttttttgaaggccagagtgcctcatgggatgtagcaaaaaaagaccagaatcgggcaaaaaacagatacggcaatatcatcgcctacgatcattctcgggtcatcctccagccagttgaggacgatcccagcagtgactacattaacgccaactacattgacatttggctctatagggacggttaccagagaccaagccactatatcgctacgcagggccctgtgcatgaaacagtgtatgatttctggcggatgatttggcaagaacagagcgcctgcattgtgatggtgactaaccttgtcgaggttggcagagttaaatgttataaatactggcccgatgataccgaggtgtacggcgatttcaaggtaacgtgcgtggagatggaaccgctggccgagtacgtcgttcgtacctttaccttggagcggcgtgggtacaatgagatccgggaggttaagcagtttcacttcacaggatggcccgatcacggcgtgccatatcacgcaacaggtctgctctccttcatacgcagggtgaagttaagcaatcccccttccgccggacctatcgttgtacactgttctgcaggcgctggacgcaccggatgttacatcgtcatagatattatgctggatatggcagaaagggagggcgttgtcgacatttacaattgtgtcaaggccctaaggagtaggaggataaatatggtgcagacagaagagcaatacattttcattcacgacgcaatcctggaggcctgtttgtgcggtgagaccgctatacccgtctgtgaattcaaggccgcttatttcgacatgatacgaatcgacagccagaccaacagcagccacctcaaggacgaatttcaaaccctgaacagtgtcacacctcggctgcaggccgaagactgcagcatagcctgcctacctaggaatcacgataagaaccggttcatggacatgctgcccccagacaggtgtttacccttccttataacgattgacggtgagagctccaactacattaatgccgctttgatggattcttatagacagcctgcagcattcatcgtgacacagtaccctctgccaaatacagtcaaggatttttggcggctggtctatgactatggttgtaccagtatagttatgctaaacgaagtagatttgtctcaggggtgcccacaatattggccggaggagggcatgctgcgctacgggcctatccaggtcgaatgcatgagctgtagcatggattgtgatgtgatcaatagaattttccggatttgtaatctcacacgccctcaggagggctaccttatggttcaacagttccagtacttgggctgggcatcccacagggaagtccctggctccaagcgcagtttcctgaaattgatactgcaagtcgaaaaatggcaagaagagtgcgaagaaggcgaggggaggacaataatacactgcttgaacgggggaggaagatccgggatgttctgcgcaatcggaattgttgtggagatggtgaagaggcagaacgtggtggatgtgtttcacgcagtcaagactctcagaaatagtaagcccaatatggtcgaggcccctgagcagtaccggttttgttacgatgttgcgctggaatatctggagtcgagctag

SEQ ID NO: 110898 - DNA, 4758 bp, Artificial Sequence
  derived and/or modified sequence
tccgccgagcatggagagctgccgccgcggccggccggcgacgctggcgacgctttcgcccctgaggtagtttggcgaccgcgaagaaggaaaaagggcgggcgggcggctgtcctctcaccgtcctcaccccgcgaggcccggcccgctcctccgtcgtggatttcgcggcgatccccccggcagctctttgcaaagctgcttgaaacttctcccaaactcggcatggatacgactgcggcggcggcgctgcctgcttttgtggcgctcttgctcctctctccttggcctctcctgggatcggcccaaggccagttctccgcaggtggctgtacttttgatgatggtccaggggcctgtgattaccaccaggatctgtatgatgactttgaatgggtgcatgttagtgctcaagagcctcattatctaccacccgagatgccccaaggttcctatatgatagtggactcttcagatcacgaccctggagaaaaagccagacttcagctgcctacaatgaaggagaacgacactcactgcattgatttcagttacctattatatagccagaaaggactgaatcctggcactttgaacatattagttagggtgaataaaggacctcttgccaatccaatttggaatgtgactggattcacgggtagagattggcttcgggctgagctagcagtgagcaccttttggcccaatgaatatcaggtaatatttgaagctgaagtctcaggagggagaagtggttatattgccattgatgacatccaagtactgagttatccttgtgataaatctcctcatttcctccgtctaggggatgtagaggtgaatgcagggcaaaacgctacatttcagtgcattgccacagggagagatgctgtgcataacaagttatggctccagagacgaaatggagaagatataccagtagcccagactaagaacatcaatcatagaaggtttgccgcttccttcagattgcaagaagtgacaaaaactgaccaggatttgtatcgctgtgtaactcagtcagaacgaggttccggtgtgtccaattttgctcaacttattgtgagagaaccgccaagacccattgctcctcctcagcttcttggtgttgggcctacatatttgctgatccaactaaatgccaactcgatcattggcgatggtcctatcatcctgaaagaagtagagtaccgaatgacatcaggatcctggacagaaacccatgcagtcaatgctccaacttacaaattatggcatttagatccagataccgaatatgagatccgagttctacttacaagacctggtgaaggtggaacggggctcccaggacctccactaatcaccagaacaaaatgtgcagaacctatgagaaccccaaagacattaaagattgctgaaatacaggcaagacggattgctgtggactgggaatccttgggttacaacattacgcgttgccacacttttaatgtcactatctgctaccattacttccgtggtcacaacgagagcaaggcagactgtttggacatggaccccaaagcccctcagcatgttgtgaaccatctgccaccttatacaaatgtcagcctcaagatgatcctaaccaatccagagggaaggaaggagagtgaagagacaattattcaaactgatgaagatgtgcctggtcccgtaccagtaaaatctcttcaaggaacatcctttgaaaataagatcttcttgaactggaaagaacctttggatccaaatggaatcatcactcaatatgagatcagctatagcagtataagatcatttgatcctgcagttccagtggctggacctccccagactgtatcaaatttatggaacagtacacaccatgtctttatgcatctccaccctggaaccacgtaccagtttttcataagagccagcacggtcaaaggctttggtccagccacagccatcaatgtcaccaccaatatctcagctccaactttacctgactatgaaggagttgatgcctctctcaatgaaactgccaccacaataactgtattgttgagaccagcacaagccaaaggtgctcctatcagtgcttatcagattgttgtggaagaactgcacccacaccgaaccaagagagaagccggagccatggaatgctaccaggttcctgtcacataccaaaatgccatgagtgggggtgcaccgtattactttgctgcagaactccccccgggaaacctacctgagcctgccccgttcactgtgggtgacaatcggacctaccaaggcttttggaaccctcctttggctccgcgcaaaggatacaacatctatttccaggcgatgagcagtgtggagaaggaaactaaaacccagtgcgtacgcattgctacaaaagcagcagcaacagaagaaccagaagtgatcccagatcccgccaagcagacagacagagtggtgaaaatagcaggaattagtgctggaattttggtgttcatcctccttctcctagttgtcatattaattgtaaaaaagaggaggagctactattcttactcctactacctcaaacttgctaaaaaacgcaaagatgccatggggaatacccggcaggagatgactcacatggtgaatgcaatggatcgaagttatgctgatcagagcactctgcatgcagaagatcctctttccatcaccttcatggaccaacataactttagtccaagattgcccaatgatccacttgtaccgactgctgtgttagttcctataacagatgagaaccacagtgctacagcagagtccagtcgccttctagacgtacctcgctacctctgtgaggggacggaatccccttaccagacaggacagctgcatccagccatcagggtagctgatttactgcagcacattaatctcatgaagacatcagacagctatgggttcaaagaggaatatgagagcttttttgaaggacagtcagcatcttgggatgtagctaaaaaagatcaaaatagagcaaaaaaccgatatggaaacattatagcatatgatcactccagagtgattttgcaacccgtagaggatgatccttcctcagattatattaatgccaactatattgatatttggctgtacagggatggctaccagagaccaagtcattacattgcaacccaaggtcccgttcatgaaacagtgtatgatttctggaggatgatttggcaagaacaatctgcttgcattgtgatggttacaaatttagttgaggttggccgggttaaatgctataaatattggcctgatgatactgaagtttatggtgacttcaaagtaacgtgtgtagaaatggaaccacttgctgaatatgtagttaggacattcaccctggaaaggagggggtacaatgaaatccgtgaagttaaacagttccatttcacgggctggcctgaccatggagtgccctaccatgctacagggctgctttcctttatccggcgagtcaagttatcaaaccctcccagtgctggccccatcgttgtacattgcagtgctggtgctggacgaactggctgctacattgtgattgacatcatgctagacatggctgaaagagagggtgttgttgatatttacaattgtgtcaaagccttaagatctcggcgtattaatatggtccagacagaggaacagtacatttttattcatgatgccattttagaagcctgcttatgtggagaaactgccatacctgtctgtgaatttaaagctgcatattttgatatgattagaatagactcccagactaactcttcacatctcaaggatgaatttcagactctgaattcagtcacccctcgactacaagctgaagactgcagtatagcgtgcctgccaaggaaccatgacaagaaccgtttcatggacatgctgccacctgacagatgtctgccttttttaattacaattgatggggagagcagtaactacatcaatgctgctcttatggacagctacaggcaaccagctgctttcatcgtcacacaataccctctgccaaacactgtaaaagacttctggagattagtgtatgattatggctgtacctccattgtgatgttaaacgaagtcgacttgtcccagggctgccctcagtactggccagaggaagggatgctacgatatggccccatccaagtggaatgtatgtcttgttcaatggactgtgatgtgatcaaccggatttttaggatatgcaatctaacaagaccacaggaaggttatctgatggtgcaacagtttcagtacctaggatgggcttctcatcgagaagtgcctggatccaaaaggtcattcttgaaactgatacttcaggtggaaaagtggcaggaggaatgcgaggaaggggaaggccggacgattatccactgcctaaatggtggcgggcgaagtggcatgttctgtgctataggcatcgttgttgaaatggtgaaacggcaaaatgttgtcgatgttttccatgcagtaaagacactgaggaacagcaagccaaacatggtggaagccccggagcaataccgtttctgctatgatgtagctttggagtacctggaatcatcttagttgggtgagactctttaaagtgcatccatgaagaaacctgtccatctattgagccagcagctgttgtacctgttacacttgtgcagaaagattttaatgtggggggtgggagac

SEQ ID NO: 110899 - DNA, 5757 bp, Artificial Sequence
  derived and/or modified sequence
ggctgtcctctcaccgtcctcaccccgcgaggcccggcccgctcctccgtcgtggatttcgcggcgatccccccggcagctctttgcaaagctgcttgaaacttctcccaaactcggcatggatacgactgcggcggcggcgctgcctgcttttgtggcgctcttgctcctctctccttggcctctcctgggatcggcccaaggccagttctccgcaggtggctgtacttttgatgatggtccaggggcctgtgattaccaccaggatctgtatgatgactttgaatgggtgcatgttagtgctcaagagcctcattatctaccacccgagatgccccaaggttcctatatgatagtggactcttcagatcacgaccctggagaaaaagccagacttcagctgcctacaatgaaggagaacgacactcactgcattgatttcagttacctattatatagccagaaaggactgaatcctggcactttgaacatattagttagggtgaataaaggacctcttgccaatccaatttggaatgtgactggattcacgggtagagattggcttcgggctgagctagcagtgagcaccttttggcccaatgaatatcaggtaatatttgaagctgaagtctcaggagggagaagtggttatattgccattgatgacatccaagtactgagttatccttgtgataaatctcctcatttcctccgtctaggggatgtagaggtgaatgcagggcaaaacgctacatttcagtgcattgccacagggagagatgctgtgcataacaagttatggctccagagacgaaatggagaagatataccagtagcccagactaagaacatcaatcatagaaggtttgccgcttccttcagattgcaagaagtgacaaaaactgaccaggatttgtatcgctgtgtaactcagtcagaacgaggttccggtgtgtccaattttgctcaacttattgtgagagaaccgccaagacccattgctcctcctcagcttcttggtgttgggcctacatatttgctgatccaactaaatgccaactcgatcattggcgatggtcctatcatcctgaaagaagtagagtaccgaatgacatcaggatcctggacagaaacccatgcagtcaatgctccaacttacaaattatggcatttagatccagataccgaatatgagatccgagttctacttacaagacctggtgaaggtggaacggggctcccaggacctccactaatcaccagaacaaaatgtgcagaacctatgagaaccccaaagacattaaagattgctgaaatacaggcaagacggattgctgtggactgggaatccttgggttacaacattacgcgttgccacacttttaatgtcactatctgctaccattacttccgtggtcacaacgagagcaaggcagactgtttggacatggaccccaaagcccctcagcatgttgtgaaccatctgccaccttatacaaatgtcagcctcaagatgatcctaaccaatccagagggaaggaaggagagtgaagagacaattattcaaactgatgaagatgtgcctggtcccgtaccagtaaaatctcttcaaggaacatcctttgaaaataagatcttcttgaactggaaagaacctttggatccaaatggaatcatcactcaatatgagatcagctatagcagtataagatcatttgatcctgcagttccagtggctggacctccccagactgtatcaaatttatggaacagtacacaccatgtctttatgcatctccaccctggaaccacgtaccagtttttcataagagccagcacggtcaaaggctttggtccagccacagccatcaatgtcaccaccaatatctcagctccaactttacctgactatgaaggagttgatgcctctctcaatgaaactgccaccacaataactgtattgttgagaccagcacaagccaaaggtgctcctatcagtgcttatcagattgttgtggaagaactgcacccacaccgaaccaagagagaagccggagccatggaatgctaccaggttcctgtcacataccaaaatgccatgagtgggggtgcaccgtattactttgctgcagaactccccccgggaaacctacctgagcctgccccgttcactgtgggtgacaatcggacctaccaaggcttttggaaccctcctttggctccgcgcaaaggatacaacatctatttccaggcgatgagcagtgtggagaaggaaactaaaacccagtgcgtacgcattgctacaaaagcagcagcaacagaagaaccagaagtgatcccagatcccgccaagcagacagacagagtggtgaaaatagcaggaattagtgctggaattttggtgttcatcctccttctcctagttgtcatattaattgtaaaaaagagcaaacttgctaaaaaacgcaaagatgccatggggaatacccggcaggagatgactcacatggtgaatgcaatggatcgaagttatgctgatcagagcactctgcatgcagaagatcctctttccatcaccttcatggaccaacataactttagtccaagattgcccaatgatccacttgtaccgactgctgtgttagttcctataacagatgagaaccacagtgctacagcagagtccagtcgccttctagacgtacctcgctacctctgtgaggggacggaatccccttaccagacaggacagctgcatccagccatcagggtagctgatttactgcagcacattaatctcatgaagacatcagacagctatgggttcaaagaggaatatgagagcttttttgaaggacagtcagcatcttgggatgtagctaaaaaagatcaaaatagagcaaaaaaccgatatggaaacattatagcatatgatcactccagagtgattttgcaacccgtagaggatgatccttcctcagattatattaatgccaactatattgatatttggctgtacagggatggctaccagagaccaagtcattacattgcaacccaaggtcccgttcatgaaacagtgtatgatttctggaggatgatttggcaagaacaatctgcttgcattgtgatggttacaaatttagttgaggttggccgggttaaatgctataaatattggcctgatgatactgaagtttatggtgacttcaaagtaacgtgtgtagaaatggaaccacttgctgaatatgtagttaggacattcaccctggaaaggagggggtacaatgaaatccgtgaagttaaacagttccatttcacgggctggcctgaccatggagtgccctaccatgctacagggctgctttcctttatccggcgagtcaagttatcaaaccctcccagtgctggccccatcgttgtacattgcagtgctggtgctggacgaactggctgctacattgtgattgacatcatgctagacatggctgaaagagagggtgttgttgatatttacaattgtgtcaaagccttaagatctcggcgtattaatatggtccagacagaggaacagtacatttttattcatgatgccattttagaagcctgcttatgtggagaaactgccatacctgtctgtgaatttaaagctgcatattttgatatgattagaatagactcccagactaactcttcacatctcaaggatgaatttcagactctgaattcagtcacccctcgactacaagctgaagactgcagtatagcgtgcctgccaaggaaccatgacaagaaccgtttcatggacatgctgccacctgacagatgtctgccttttttaattacaattgatggggagagcagtaactacatcaatgctgctcttatggacagctacaggcaaccagctgctttcatcgtcacacaataccctctgccaaacactgtaaaagacttctggagattagtgtatgattatggctgtacctccattgtgatgttaaacgaagtcgacttgtcccagggctgccctcagtactggccagaggaagggatgctacgatatggccccatccaagtggaatgtatgtcttgttcaatggactgtgatgtgatcaaccggatttttaggatatgcaatctaacaagaccacaggaaggttatctgatggtgcaacagtttcagtacctaggatgggcttctcatcgagaagtgcctggatccaaaaggtcattcttgaaactgatacttcaggtggaaaagtggcaggaggaatgcgaggaaggggaaggccggacgattatccactgcctaaatggtggcgggcgaagtggcatgttctgtgctataggcatcgttgttgaaatggtgaaacggcaaaatgttgtcgatgttttccatgcagtaaagacactgaggaacagcaagccaaacatggtggaagccccggagcaataccgtttctgctatgatgtagctttggagtacctggaatcatcttagttgggtgagactctttaaagtgcatccatgaagaaacctgtccatctattgagccagcagctgttgtacctgttacacttgtgcagaaagattttaatgtggggggtgggagacttttacatttgagaggtaaaagtattttttttatgaagttgtgtatcttaataaaaaggactgaattagtttttattactatattaaagcatcaacatttcatgccacataaattatatttaataagaaccagattgaaatgagaacgtattggtgtttgtacagtgaacatgccaccttttttctcatggtttcagtagagcagctaccacatgttgcatgagttcatactttctacgtggcatttttctccctttctaaaatgaaagctgatgaatcttaaaaggaagaagaaaagaaaagctgtgcaaattcatagtaaagttcgttttttatatgtttccagtgtagcagatctctatataaatatataaatatatataactggcttattttcttttaatgtgcaatgatggctggatcatttaaagttctttttagaaaataacataagccaaagactcaagtgtaaatatgtctatatggagaaagcacattatatttattggttacttacattccttttttgatggctaaaatactaccaccacacaatcatcttttttttcctgaagaaagctttttctttagctaaaatcaattgtaaacgatttttgtagattattttttgtatgttttagtgtaagtagaagataaactttttattcataaaccaggaagcaatgttctttatagtgattctcttgtgtacatgcttgtgaattaaatttgtgtaaaatcccttggcaattgggtcttttaatataggaccaaattaaaacattttgctgaatatgtatagtttttcacaatttcattaggtaaataatggtttggtgatcatacatgagaaatgtacacattaaaaggccttgctgacaacttgcacaatgttgaacatagcctttaagcatcatttaaattttaaaggaatggagtttttcagcctgtggcccagcactggtcaagaaaacaagatggcaacatatatgctttcagggtcaaatttgagcaaactgtaaactgtcagggtgataaaatgtttctcttgatgtttacatgcacaagctttgcgttctgactataaaaagtgtgaacaaatcaatgccagattcctgttttgcgcattgtcatgg

SEQ ID NO: 110900 - DNA, 4419 bp, Artificial Sequence
  derived and/or modified sequence
atggacaccaccgccgccgccgccctgcccgccttcgtggccctgctgctgctgagcccctggcccctgctgggcagcgcccagggccagttcagcgccggcggctgcaccttcgacgacggccccggcgcctgcgactaccaccaggacctgtacgacgacttcgagtgggtgcacgtgagcgcccaggagccccactacctgccccccgagatgccccagggcagctacatgatcgtggacagcagcgaccacgaccccggcgagaaggccagactgcagctgcccaccatgaaggagaacgacacccactgcatcgacttcagctacctgctgtacagccagaagggcctgaaccccggcaccctgaacatcctggtgagagtgaacaagggccccctggccaaccccatctggaacgtgaccggcttcaccggcagagactggctgagagccgagctggccgtgagcaccttctggcccaacgagtaccaggtgatcttcgaggccgaggtgagcggcggcagaagcggctacatcgccatcgacgacatccaggtgctgagctacccctgcgacaagagcccccacttcctgagactgggcgacgtggaggtgaacgccggccagaacgccaccttccagtgcatcgccaccggcagagacgccgtgcacaacaagctgtggctgcagagaagaaacggcgaggacatccccgtggcccagaccaagaacatcaaccacagaagattcgccgccagcttcagactgcaggaggtgaccaagaccgaccaggacctgtacagatgcgtgacccagagcgagagaggcagcggcgtgagcaacttcgcccagctgatcgtgagagagccccccagacccatcgcccccccccagctgctgggcgtgggccccacctacctgctgatccagctgaacgccaacagcatcatcggcgacggccccatcatcctgaaggaggtggagtacagaatgaccagcggcagctggaccgagacccacgccgtgaacgcccccacctacaagctgtggcacctggaccccgacaccgagtacgagatcagagtgctgctgaccagacccggcgagggcggcaccggcctgcccggcccccccctgatcaccagaaccaagtgcgccgagcccatgagaacccccaagaccctgaagatcgccgagatccaggccagaagaatcgccgtggactgggagagcctgggctacaacatcaccagatgccacaccttcaacgtgaccatctgctaccactacttcagaggccacaacgagagcaaggccgactgcctggacatggaccccaaggccccccagcacgtggtgaaccacctgcccccctacaccaacgtgagcctgaagatgatcctgaccaaccccgagggcagaaaggagagcgaggagaccatcatccagaccgacgaggacgtgcccggccccgtgcccgtgaagagcctgcagggcaccagcttcgagaacaagatcttcctgaactggaaggagcccctggaccccaacggcatcatcacccagtacgagatcagctacagcagcatcagaagcttcgaccccgccgtgcccgtggccggccccccccagaccgtgagcaacctgtggaacagcacccaccacgtgttcatgcacctgcaccccggcaccacctaccagttcttcatcagagccagcaccgtgaagggcttcggccccgccaccgccatcaacgtgaccaccaacatcagcgcccccaccctgcccgactacgagggcgtggacgccagcctgaacgagaccgccaccaccatcaccgtgctgctgagacccgcccaggccaagggcgcccccatcagcgcctaccagatcgtggtggaggagctgcacccccacagaaccaagagagaggccggcgccatggagtgctaccaggtgcccgtgacctaccagaacgccatgagcggcggcgccccctactacttcgccgccgagctgccccccggcaacctgcccgagcccgcccccttcaccgtgggcgacaacagaacctaccagggcttctggaacccccccctggcccccagaaagggctacaacatctacttccaggccatgagcagcgtggagaaggagaccaagacccagtgcgtgagaatcgccaccaaggccgccgccaccgaggagcccgaggtgatccccgaccccgccaagcagaccgacagagtggtgaagatcgccggcatcagcgccggcatcctggtgttcatcctgctgctgctggtggtgatcctgatcgtgaagaagagaagaagctactacagctacagctactacctgaagctggccaagaagagaaaggacgccatgggcaacaccagacaggagatgacccacatggtgaacgccatggacagaagctacgccgaccagagcaccctgcacgccgaggaccccctgagcatcaccttcatggaccagcacaacttcagccccagactgcccaacgaccccctggtgcccaccgccgtgctggtgcccatcaccgacgagaaccacagcgccaccgccgagagcagcagactgctggacgtgcccagatacctgtgcgagggcaccgagagcccctaccagaccggccagctgcaccccgccatcagagtggccgacctgctgcagcacatcaacctgatgaagaccagcgacagctacggcttcaaggaggagtacgagagcttcttcgagggccagagcgccagctgggacgtggccaagaaggaccagaacagagccaagaacagatacggcaacatcatcgcctacgaccacagcagagtgatcctgcagcccgtggaggacgaccccagcagcgactacatcaacgccaactacatcgacatctggctgtacagagacggctaccagagacccagccactacatcgccacccagggccccgtgcacgagaccgtgtacgacttctggagaatgatctggcaggagcagagcgcctgcatcgtgatggtgaccaacctggtggaggtgggcagagtgaagtgctacaagtactggcccgacgacaccgaggtgtacggcgacttcaaggtgacctgcgtggagatggagcccctggccgagtacgtggtgagaaccttcaccctggagagaagaggctacaacgagatcagagaggtgaagcagttccacttcaccggctggcccgaccacggcgtgccctaccacgccaccggcctgctgagcttcatcagaagagtgaagctgagcaacccccccagcgccggccccatcgtggtgcactgcagcgccggcgccggcagaaccggctgctacatcgtgatcgacatcatgctggacatggccgagagagagggcgtggtggacatctacaactgcgtgaaggccctgagaagcagaagaatcaacatggtgcagaccgaggagcagtacatcttcatccacgacgccatcctggaggcctgcctgtgcggcgagaccgccatccccgtgtgcgagttcaaggccgcctacttcgacatgatcagaatcgacagccagaccaacagcagccacctgaaggacgagttccagaccctgaacagcgtgacccccagactgcaggccgaggactgcagcatcgcctgcctgcccagaaaccacgacaagaacagattcatggacatgctgccccccgacagatgcctgcccttcctgatcaccatcgacggcgagagcagcaactacatcaacgccgccctgatggacagctacagacagcccgccgccttcatcgtgacccagtaccccctgcccaacaccgtgaaggacttctggagactggtgtacgactacggctgcaccagcatcgtgatgctgaacgaggtggacctgagccagggctgcccccagtactggcccgaggagggcatgctgagatacggccccatccaggtggagtgcatgagctgcagcatggactgcgacgtgatcaacagaatcttcagaatctgcaacctgaccagaccccaggagggctacctgatggtgcagcagttccagtacctgggctgggccagccacagagaggtgcccggcagcaagagaagcttcctgaagctgatcctgcaggtggagaagtggcaggaggagtgcgaggagggcgagggcagaaccatcatccactgcctgaacggcggcggcagaagcggcatgttctgcgccatcggcatcgtggtggagatggtgaagagacagaacgtggtggacgtgttccacgccgtgaagaccctgagaaacagcaagcccaacatggtggaggcccccgagcagtacagattctgctacgacgtggccctggagtacctggagagcagctag

SEQ ID NO: 110901 - DNA, 4389 bp, Artificial Sequence
  derived and/or modified sequence
atggacaccaccgccgccgccgccctgcccgccttcgtggccctgctgctgctgagcccctggcccctgctgggcagcgcccagggccagttcagcgccggcggctgcaccttcgacgacggccccggcgcctgcgactaccaccaggacctgtacgacgacttcgagtgggtgcacgtgagcgcccaggagccccactacctgccccccgagatgccccagggcagctacatgatcgtggacagcagcgaccacgaccccggcgagaaggccagactgcagctgcccaccatgaaggagaacgacacccactgcatcgacttcagctacctgctgtacagccagaagggcctgaaccccggcaccctgaacatcctggtgagagtgaacaagggccccctggccaaccccatctggaacgtgaccggcttcaccggcagagactggctgagagccgagctggccgtgagcaccttctggcccaacgagtaccaggtgatcttcgaggccgaggtgagcggcggcagaagcggctacatcgccatcgacgacatccaggtgctgagctacccctgcgacaagagcccccacttcctgagactgggcgacgtggaggtgaacgccggccagaacgccaccttccagtgcatcgccaccggcagagacgccgtgcacaacaagctgtggctgcagagaagaaacggcgaggacatccccgtggcccagaccaagaacatcaaccacagaagattcgccgccagcttcagactgcaggaggtgaccaagaccgaccaggacctgtacagatgcgtgacccagagcgagagaggcagcggcgtgagcaacttcgcccagctgatcgtgagagagccccccagacccatcgcccccccccagctgctgggcgtgggccccacctacctgctgatccagctgaacgccaacagcatcatcggcgacggccccatcatcctgaaggaggtggagtacagaatgaccagcggcagctggaccgagacccacgccgtgaacgcccccacctacaagctgtggcacctggaccccgacaccgagtacgagatcagagtgctgctgaccagacccggcgagggcggcaccggcctgcccggcccccccctgatcaccagaaccaagtgcgccgagcccatgagaacccccaagaccctgaagatcgccgagatccaggccagaagaatcgccgtggactgggagagcctgggctacaacatcaccagatgccacaccttcaacgtgaccatctgctaccactacttcagaggccacaacgagagcaaggccgactgcctggacatggaccccaaggccccccagcacgtggtgaaccacctgcccccctacaccaacgtgagcctgaagatgatcctgaccaaccccgagggcagaaaggagagcgaggagaccatcatccagaccgacgaggacgtgcccggccccgtgcccgtgaagagcctgcagggcaccagcttcgagaacaagatcttcctgaactggaaggagcccctggaccccaacggcatcatcacccagtacgagatcagctacagcagcatcagaagcttcgaccccgccgtgcccgtggccggccccccccagaccgtgagcaacctgtggaacagcacccaccacgtgttcatgcacctgcaccccggcaccacctaccagttcttcatcagagccagcaccgtgaagggcttcggccccgccaccgccatcaacgtgaccaccaacatcagcgcccccaccctgcccgactacgagggcgtggacgccagcctgaacgagaccgccaccaccatcaccgtgctgctgagacccgcccaggccaagggcgcccccatcagcgcctaccagatcgtggtggaggagctgcacccccacagaaccaagagagaggccggcgccatggagtgctaccaggtgcccgtgacctaccagaacgccatgagcggcggcgccccctactacttcgccgccgagctgccccccggcaacctgcccgagcccgcccccttcaccgtgggcgacaacagaacctaccagggcttctggaacccccccctggcccccagaaagggctacaacatctacttccaggccatgagcagcgtggagaaggagaccaagacccagtgcgtgagaatcgccaccaaggccgccgccaccgaggagcccgaggtgatccccgaccccgccaagcagaccgacagagtggtgaagatcgccggcatcagcgccggcatcctggtgttcatcctgctgctgctggtggtgatcctgatcgtgaagaagagcaagctggccaagaagagaaaggacgccatgggcaacaccagacaggagatgacccacatggtgaacgccatggacagaagctacgccgaccagagcaccctgcacgccgaggaccccctgagcatcaccttcatggaccagcacaacttcagccccagactgcccaacgaccccctggtgcccaccgccgtgctggtgcccatcaccgacgagaaccacagcgccaccgccgagagcagcagactgctggacgtgcccagatacctgtgcgagggcaccgagagcccctaccagaccggccagctgcaccccgccatcagagtggccgacctgctgcagcacatcaacctgatgaagaccagcgacagctacggcttcaaggaggagtacgagagcttcttcgagggccagagcgccagctgggacgtggccaagaaggaccagaacagagccaagaacagatacggcaacatcatcgcctacgaccacagcagagtgatcctgcagcccgtggaggacgaccccagcagcgactacatcaacgccaactacatcgacatctggctgtacagagacggctaccagagacccagccactacatcgccacccagggccccgtgcacgagaccgtgtacgacttctggagaatgatctggcaggagcagagcgcctgcatcgtgatggtgaccaacctggtggaggtgggcagagtgaagtgctacaagtactggcccgacgacaccgaggtgtacggcgacttcaaggtgacctgcgtggagatggagcccctggccgagtacgtggtgagaaccttcaccctggagagaagaggctacaacgagatcagagaggtgaagcagttccacttcaccggctggcccgaccacggcgtgccctaccacgccaccggcctgctgagcttcatcagaagagtgaagctgagcaacccccccagcgccggccccatcgtggtgcactgcagcgccggcgccggcagaaccggctgctacatcgtgatcgacatcatgctggacatggccgagagagagggcgtggtggacatctacaactgcgtgaaggccctgagaagcagaagaatcaacatggtgcagaccgaggagcagtacatcttcatccacgacgccatcctggaggcctgcctgtgcggcgagaccgccatccccgtgtgcgagttcaaggccgcctacttcgacatgatcagaatcgacagccagaccaacagcagccacctgaaggacgagttccagaccctgaacagcgtgacccccagactgcaggccgaggactgcagcatcgcctgcctgcccagaaaccacgacaagaacagattcatggacatgctgccccccgacagatgcctgcccttcctgatcaccatcgacggcgagagcagcaactacatcaacgccgccctgatggacagctacagacagcccgccgccttcatcgtgacccagtaccccctgcccaacaccgtgaaggacttctggagactggtgtacgactacggctgcaccagcatcgtgatgctgaacgaggtggacctgagccagggctgcccccagtactggcccgaggagggcatgctgagatacggccccatccaggtggagtgcatgagctgcagcatggactgcgacgtgatcaacagaatcttcagaatctgcaacctgaccagaccccaggagggctacctgatggtgcagcagttccagtacctgggctgggccagccacagagaggtgcccggcagcaagagaagcttcctgaagctgatcctgcaggtggagaagtggcaggaggagtgcgaggagggcgagggcagaaccatcatccactgcctgaacggcggcggcagaagcggcatgttctgcgccatcggcatcgtggtggagatggtgaagagacagaacgtggtggacgtgttccacgccgtgaagaccctgagaaacagcaagcccaacatggtggaggcccccgagcagtacagattctgctacgacgtggccctggagtacctggagagcagctag

SEQ ID NO: 110902 - protein, 747 aa, Artificial Sequence
  derived and/or modified sequence
MTLNGCMLVLKSLIIYHPRCPKVIFEAEVSGGRSGYIAIDDIQVLSYPCDKSPHFLRLGDVEVNAGQNATFQCIATGRDAVHNKLWLQRRNGEDIPVAQTKNINHRRFAASFRLQEVTKTDQDLYRCVTQSERGSGVSNFAQLIVREPPRPIAPPQLLGVGPTYLLIQLNANSIIGDGPIILKEVEYRMTSGSWTETHAVNAPTYKLWHLDPDTEYEIRVLLTRPGEGGTGLPGPPLITRTKCAEPMRTPKTLKIAEIQARRIAVDWESLGYNITRCHTFNVTICYHYFRGHNESKADCLDMDPKAPQHVVNHLPPYTNVSLKMILTNPEGRKESEETIIQTDEDVPGPVPVKSLQGTSFENKIFLNWKEPLDPNGIITQYEISYSSIRSFDPAVPVAGPPQTVSNLWNSTHHVFMHLHPGTTYQFFIRASTVKGFGPATAINVTTNISAPTLPDYEGVDASLNETATTITVLLRPAQAKGAPISAYQIVVEELHPHRTKREAGAMECYQVPVTYQNAMSGGAPYYFAAELPPGNLPEPAPFTVGDNRTYQGFWNPPLAPRKGYNIYFQAMSSVEKETKTQCVRIATKAAATEEPEVIPDPAKQTDRVVKIAGISAGILVFILLLLVVILIVKKRYICWRRHICIRNIRRSYYSYSYYLKLAKKRKDAMGNTRQEMTHMVNAMDRSYADQSTLHAEDPLSITFMDQHNFSPRLPNDPLVPTAVLVPSPGRKNVYHGDNNSFFAISYL

SEQ ID NO: 110903 - DNA, 2244 bp, Artificial Sequence
  derived and/or modified sequence
atgacactgaacggttgcatgcttgtattaaagtccctgattatctatcacccccgttgtcccaaagtgatatttgaggctgaggtttctggcggtagatccgggtatattgctatcgacgatattcaagtcctgtcctatccctgtgataaatctccgcactttctcagactgggagacgtggaggtgaacgcgggccagaacgcgactttccagtgcatagccacgggtcgcgacgccgttcataataaattatggctccagcggaggaacggggaggatataccagtcgcccagaccaagaacatcaatcatcggagattcgctgcctccttcaggcttcaggaggttactaagacagatcaggatctatacaggtgtgtcacacagagcgagcgcggcagcggagtctcaaatttcgcgcagttaattgtcagggaacctccccgcccgatcgctccccctcagctgttgggggtgggacccacatatctgctaatccagctgaacgctaactccatcatcggcgacggacctattatcctgaaagaggtggagtaccgtatgactagtggctcctggacagagacacatgcggtgaatgctcctacctataagctgtggcatctcgacccagacactgaatacgagatccgggtccttctgacacgcccaggagaggggggtaccgggctccccggcccaccccttattactagaacaaaatgcgctgagcctatgaggacaccgaagacactgaagatcgcggaaatacaggctcgacgaattgctgtggattgggaaagcctgggctataatatcaccaggtgccatactttcaacgttaccatctgctaccattactttcggggacataatgagagcaaagcggactgtctggatatggatcccaaagccccgcaacacgtcgtgaaccacctcccaccttacaccaacgtgtcacttaagatgatattaaccaatcccgaaggacgcaaggagtctgaggagaccatcatccaaacagacgaggacgtacctggtccggtgcctgtgaagtctctccagggtacctccttcgagaataaaatattcctgaattggaaagaacctctggaccctaacggtatcatcacacagtacgaaatatcttattcatctatcaggagcttcgatcccgcagtacccgtagccgggccacctcagaccgtctcaaatctttggaattccactcaccacgtctttatgcatttgcacccagggactacctaccagtttttcattcgggcgtccactgtgaaagggtttggccccgcaaccgctataaatgtgacaactaacatttctgctcctacactgcccgactacgagggagtagacgcatctctgaacgagacagctacaactattactgttctgctgaggcccgcgcaggccaaaggggctcccatttctgcttaccagatagtagtggaggaactccatcctcatcggacgaaaagggaggccggagcaatggaatgctatcaggtgcctgtcacctaccagaatgctatgagtggcggggctccatactatttcgctgccgaacttccccctggtaacctgcccgaacctgcaccctttacggtgggcgacaaccgtacgtaccagggcttttggaaccctccactcgctccccggaaagggtacaatatttattttcaggccatgtcgagtgtggagaaagagaccaagacccaatgtgtgcgcattgctacaaaggctgcagctacagaggagcctgaggtaattccagacccagccaagcagacagaccgggtcgtgaaaattgcgggcatcagcgcagggattttggtgttcatcttgttgctcctggttgtcatcttgattgtgaaaaagaggtacatctgttggcgacggcacatatgcattagaaatatccggcggtcttattattcttatagttattacctcaagctggcgaaaaagcgaaaggatgccatgggaaacacgaggcaggaaatgacacatatggttaacgctatggaccggtcatacgctgatcagagtaccttgcacgccgaagatcccctgtccattacctttatggatcagcataatttttctcctcgcctccctaacgacccacttgtacccaccgcagtcctcgtgccgagcccaggaaggaagaatgtttaccacggggataataattcattctttgccattagctacctctag

SEQ ID NO: 110904 - DNA, 2244 bp, Artificial Sequence
  derived and/or modified sequence
atgaccctgaatggctgcatgctggtgctgaagagcctcatcatctaccacccccgctgccccaaggtgatctttgaagctgaggtgtctgggggccgcagcggctacatcgccattgatgacatccaggtgctgagctacccctgtgacaagagcccccacttcctgcggctgggagatgtggaggtgaatgccggccagaatgccaccttccagtgcatcgccaccggcagagatgctgtgcacaacaagctgtggctgcagaggagaaatggagaggacatccctgtggcccagaccaagaacatcaaccacagaagatttgctgccagcttccggctgcaggaggtgaccaagacagaccaggacctgtaccgctgtgtgacccagagcgagcggggcagcggcgtgagcaactttgcccagctgattgtgcgggagcccccccggcccatcgccccaccccagctgctgggcgtgggccccacctacctgctgatccagctgaatgccaacagcatcattggagatggccccatcatcctgaaggaggtggagtacaggatgaccagcggctcctggacagagacccatgctgtgaatgcccccacctacaagctgtggcacctggaccctgacacagaatatgagatccgggtgctgctgaccaggcctggagagggcggcaccggcctgcccggccccccactcatcaccaggaccaagtgtgccgagcccatgaggacccccaagaccctgaagattgctgagatccaggccaggagaattgctgtggactgggagagcctgggctacaacatcacccgctgccacaccttcaacgtgaccatctgctaccactacttccggggccacaatgaaagcaaggctgactgcctggacatggaccccaaggccccccagcacgtggtgaaccacctgcccccctacaccaacgtgtccctgaagatgatcctgaccaaccctgagggcaggaaggagagcgaggagaccatcatccagacagatgaagatgtgcccggccctgtgcctgtgaagagcctgcagggcaccagctttgagaacaagatcttcctgaactggaaggagcccctggaccccaacggcatcatcacccagtatgagatctcctacagcagcatccgcagctttgatcctgctgtgcctgtggccggccccccccagacagtgagcaacctgtggaacagcacccaccacgtgttcatgcacctgcaccctggcaccacctaccagttcttcatccgggccagcacagtgaagggcttcggccctgccacagccatcaacgtgaccaccaacatcagcgcccccaccctgcctgactatgagggcgtggatgccagcctgaatgaaacagccaccaccatcaccgtgctgctgcggcctgcccaggccaagggggcccccatcagcgcctaccagatcgtggtggaggagctgcacccccacaggaccaagcgggaggccggggccatggagtgctaccaggtgcctgtgacctaccagaatgccatgtctgggggcgccccctactactttgctgctgagctgcccccaggcaacctgcctgagcccgcccccttcaccgtgggggacaacagaacctaccagggcttctggaacccccccctggcccccaggaagggctacaacatctacttccaggccatgagctctgtggagaaggagaccaagacccagtgtgtgagaattgccaccaaggccgccgccacagaggagcctgaggtgatcccagaccctgccaagcagacagacagagtggtgaagattgctggcatctctgctggcatcctggtgttcatcctgctgctgctggtggtgatcctgattgtgaagaagcgctacatctgctggaggaggcacatctgcatccggaacatcagaagaagctactacagctacagctactacctgaagctggccaagaagaggaaggatgccatgggcaacacccggcaggagatgacccacatggtgaatgccatggacaggagctatgctgaccagagcaccctgcatgctgaggaccccctgagcatcaccttcatggaccagcacaacttcagcccccggctgcccaatgaccccctggtgcccacagctgtgctggtgcccagccctggcaggaagaatgtgtaccatggagacaacaacagcttctttgccatctcctacctgtag

SEQ ID NO: 110905 - DNA, 2244 bp, Artificial Sequence
  derived and/or modified sequence
atgaccctgaacggctgcatgctggtgctgaagagcctgatcatctaccatccaagatgccccaaagtcatatttgaggccgaagtttctggtgggaggtcagggtatattgctatagatgatatccaggtgctcagctatccttgtgacaaatccccacactttttgaggttgggagatgtggaggtgaacgcaggccagaacgcaacttttcagtgcattgcgacaggacgtgatgcggtgcataacaagctctggttgcagaggcgtaatggggaggatattcctgtggctcagaccaagaacataaatcacaggcgctttgcagcctctttcaggttgcaggaggtgacaaaaaccgatcaggatctgtaccgctgcgtcacgcaatcggagcggggatccggagtcagcaatttcgctcaactcattgtaagggagcctccgcgccctatagctccaccacaactgcttggtgtgggacctacctacctcttgattcagctgaatgccaattctattattggggatggccctattatcctaaaggaagtggaatatagaatgacctctggcagttggacggaaacacacgctgtgaatgccccaacctacaaactatggcacctcgaccccgacacagagtatgagatccgtgtgctattaacacgccctggtgaggggggcactgggctgcctgggccccctctcatcacaaggaccaaatgcgctgagcccatgcgcacccctaaaacgctgaagatagccgagatccaggcaagaagaattgctgtggattgggagtcactggggtacaacatcacacggtgccatactttcaatgtgacgatctgttaccactactttaggggacataatgaaagcaaggcagactgcctggacatggatcccaaggcgccccaacacgttgtaaatcacctgccaccatacactaatgtctctttaaagatgattcttaccaaccctgagggaaggaaggagtccgaggagaccatcattcagaccgatgaagacgtgcctgggcccgtacctgtcaaatctctgcagggcactagttttgagaacaaaatcttcttaaactggaaagaacccctggaccccaacggaataataacacaatacgagatcagttattcgtccatcagatcattcgacccagccgttccagtggccgggccccctcagacagtgagcaatctgtggaatagcacccaccacgtcttcatgcatctgcatcccgggactacctaccagtttttcatccgcgcctctacagtaaagggcttcgggcctgctacagccatcaacgtcactaccaatatcagcgcaccaacgctgcctgactacgaaggtgtagatgctagccttaatgaaacagctaccaccattacggtcttgctgaggcccgcccaggcgaaaggcgcacctatcagcgcctaccaaatcgtagtggaagagctgcacccgcatcgcacgaaacgcgaggctggagccatggaatgttaccaggttcctgtcacataccagaacgccatgtccggcggtgccccttactacttcgccgccgagttgccacccgggaatctccctgagccagcaccatttacagtgggcgataacaggacctaccaagggttctggaatcctccactcgcccctcgcaagggttataatatttattttcaggcaatgtccagtgtggagaaagaaaccaagacgcagtgcgtacgcatcgctacaaaggcggcggccacagaagagccagaggtaattcccgacccagccaaacaaaccgatcgggttgttaaaatcgccgggatctctgctggtattctggtctttattttattgctcttagtggttatcttgatcgtcaaaaaacggtacatttgttggcggaggcacatctgtatccgaaacatacgacgttcttattactcttattcctactaccttaagctggccaagaaaagaaaagacgccatgggtaacacgcgccaagagatgacccacatggttaacgccatggatcgaagctacgctgaccagtcgacgcttcacgcagaagacccactgagcatcacttttatggaccaacacaacttctcacccagactgccaaatgacccgctcgtacctacggctgtactggttccttcgcccggacgaaaaaacgtctaccatggcgataataactcattcttcgcgatatcctacctttag

SEQ ID NO: 110906 - DNA, 2244 bp, Artificial Sequence
  derived and/or modified sequence
atgactctgaacggttgcatgctggtgctgaagtccctgattatctatcatcctagatgccccaaagtgatcttcgaggcagaagtgtctggcggaaggagcggctacatcgctatcgatgatatccaggttcttagttacccatgtgacaagtccccacacttcttaagacttggagacgtcgaagttaatgctgggcagaacgctacattccagtgcattgctacaggccgagacgctgtgcataataagctgtggctgcagcggagaaatggcgaggatatacccgtcgctcaaactaagaacatcaatcatcgcaggtttgctgcctcattccgcctgcaggaagtgactaagacagaccaggatctgtaccggtgtgttactcagtccgaacgcggttccggagtatccaatttcgcacagctcattgtgcgcgaaccccctcgcccaatagcgccaccccagctcctgggagtaggcccaacataccttcttattcagttgaacgcaaactcaattatcggagatggtcctataatcctcaaagaagtcgaatatcgaatgacttctgggtcctggactgaaacccatgccgtgaacgcccctacatataagttgtggcatctcgaccccgacaccgagtacgaaattcgagtgctgctaactaggcccggagagggagggaccggtctgccaggtcccccactcattacaaggactaagtgtgcagagcctatgcggacccctaagaccctgaaaatcgcagagatccaagcacgcaggatcgctgtggactgggagtctctgggctataacattacgcggtgccatacctttaatgtcaccatctgctatcactacttccgaggacacaacgaatccaaggcagattgccttgatatggaccctaaagcccctcagcacgtggtgaaccatctgcccccatacacaaatgtgagtctgaaaatgatccttacaaacccagagggtcgcaaggagtcggaggaaaccatcattcagactgatgaggacgttcccggtccagtgccagtcaagagcctccagggcaccagctttgagaataagatattccttaactggaaggaaccccttgatcccaacggcattattacccagtacgagatctcctatagctctatcagatcttttgatcccgctgtgccggtggccggtccccctcagacagtgtccaatctttggaattctactcatcatgtttttatgcaccttcaccctggcacaacctatcagttctttatcagggcttcaactgtgaaaggcttcggtcctgcgaccgctatcaatgtcaccactaatatctcagcgcctactctccccgactatgagggtgtggacgctagcctcaatgaaaccgctacgactatcactgtcttgttacggccagcacaggctaaaggtgctcctattagcgcttaccagatcgttgtggaggaattgcaccctcaccgaacaaaaagggaagcaggggcaatggaatgttatcaggtgcctgtgacctaccagaatgcgatgtctggcggagcgccttactacttcgctgccgagctccctccagggaaccttccagagcccgctccttttactgtgggtgacaaccgtacataccagggcttctggaacccacctcttgcgcctcgaaagggctacaacatttattttcaggccatgtcctctgttgaaaaggagacaaaaactcagtgcgtcaggattgctacaaaagcggctgctactgaagaacccgaggtgattccagacccggcaaaacagacagacagggtggtgaagattgccggaattagcgcagggatcctcgtctttatcctcctgcttctcgttgttatactgattgtcaagaaacgctatatctgctggcggcgtcatatttgtatccggaatatcaggcggagctattatagttactcatactatttgaagctggccaaaaagagaaaagacgcaatgggcaatacaaggcaagaaatgacgcacatggtaaacgccatggacagatcatacgctgatcaatcgaccttacacgcggaggatccactttcaatcacctttatggatcagcacaacttttctccgcgactgcctaatgatcccctggtcccgacggccgtgttagttccatcaccaggacgcaagaacgtatatcacggggataacaacagctttttcgccataagttacctgtag

SEQ ID NO: 110907 - DNA, 2768 bp, Artificial Sequence
  derived and/or modified sequence
gtctctccggcaggaggcggtggcggcgccgcgcccgagcccgcattcctcagaagcgcccggagcccgcggggcgacgtcacccccggctccgcccccgtccctccccgagcaaagtaactcttgactaacaggagcagcctccgccgagcatggagagctgccgccgcggccggccggcgacgctggcgacgctttcgcccctgaggtagtttggcgaccgcgaagaaggaaaaagggcgggcgggcggctgtcctctcaccgtcctcaccccgcgaggcccggcccgctcctccgtcgtggatttcgcggcgatccccccggcagctctttgcaaagctgcttgaaacttctcccaaactcggcatggatacgactgcggcggcggcgctgcctgcttttgtggcgctcttgctcctctctccttggcctctcctgggatcggcccaaggccagttctccgcaggtggctgtacttttgatgatggtccaggggcctgtgattaccaccaggatctgtatgatgactttgaatgggtgcatgttagtgctcaagagcctcattatctaccacccgagatgccccaaggtaatatttgaagctgaagtctcaggagggagaagtggttatattgccattgatgacatccaagtactgagttatccttgtgataaatctcctcatttcctccgtctaggggatgtagaggtgaatgcagggcaaaacgctacatttcagtgcattgccacagggagagatgctgtgcataacaagttatggctccagagacgaaatggagaagatataccagtagcccagactaagaacatcaatcatagaaggtttgccgcttccttcagattgcaagaagtgacaaaaactgaccaggatttgtatcgctgtgtaactcagtcagaacgaggttccggtgtgtccaattttgctcaacttattgtgagagaaccgccaagacccattgctcctcctcagcttcttggtgttgggcctacatatttgctgatccaactaaatgccaactcgatcattggcgatggtcctatcatcctgaaagaagtagagtaccgaatgacatcaggatcctggacagaaacccatgcagtcaatgctccaacttacaaattatggcatttagatccagataccgaatatgagatccgagttctacttacaagacctggtgaaggtggaacggggctcccaggacctccactaatcaccagaacaaaatgtgcagaacctatgagaaccccaaagacattaaagattgctgaaatacaggcaagacggattgctgtggactgggaatccttgggttacaacattacgcgttgccacacttttaatgtcactatctgctaccattacttccgtggtcacaacgagagcaaggcagactgtttggacatggaccccaaagcccctcagcatgttgtgaaccatctgccaccttatacaaatgtcagcctcaagatgatcctaaccaatccagagggaaggaaggagagtgaagagacaattattcaaactgatgaagatgtgcctggtcccgtaccagtaaaatctcttcaaggaacatcctttgaaaataagatcttcttgaactggaaagaacctttggatccaaatggaatcatcactcaatatgagatcagctatagcagtataagatcatttgatcctgcagttccagtggctggacctccccagactgtatcaaatttatggaacagtacacaccatgtctttatgcatctccaccctggaaccacgtaccagtttttcataagagccagcacggtcaaaggctttggtccagccacagccatcaatgtcaccaccaatatctcagctccaactttacctgactatgaaggagttgatgcctctctcaatgaaactgccaccacaataactgtattgttgagaccagcacaagccaaaggtgctcctatcagtgcttatcagattgttgtggaagaactgcacccacaccgaaccaagagagaagccggagccatggaatgctaccaggttcctgtcacataccaaaatgccatgagtgggggtgcaccgtattactttgctgcagaactccccccgggaaacctacctgagcctgccccgttcactgtgggtgacaatcggacctaccaaggcttttggaaccctcctttggctccgcgcaaaggatacaacatctatttccaggcgatgagcagtgtggagaaggaaactaaaacccagtgcgtacgcattgctacaaaagcagcagcaacagaagaaccagaagtgatcccagatcccgccaagcagacagacagagtggtgaaaatagcaggaattagtgctggaattttggtgttcatcctccttctcctagttgtcatattaattgtaaaaaagagatatatatgttggagaagacacatctgcattagaaacattaggaggagctactattcttactcctactacctcaaacttgctaaaaaacgcaaagatgccatggggaatacccggcaggagatgactcacatggtgaatgcaatggatcgaagttatgctgatcagagcactctgcatgcagaagatcctctttccatcaccttcatggaccaacataactttagtccaagattgcccaatgatccacttgtaccgactgctgtgttagtcccttctccaggaagaaaaaatgtttatcatggggacaacaattcattttttgctatatcctatttgtag

SEQ ID NO: 110908 - DNA, 2244 bp, Artificial Sequence
  derived and/or modified sequence
atgaccctgaacggctgcatgctggtgctgaagagcctgatcatctaccaccccagatgccccaaggtgatcttcgaggccgaggtgagcggcggcagaagcggctacatcgccatcgacgacatccaggtgctgagctacccctgcgacaagagcccccacttcctgagactgggcgacgtggaggtgaacgccggccagaacgccaccttccagtgcatcgccaccggcagagacgccgtgcacaacaagctgtggctgcagagaagaaacggcgaggacatccccgtggcccagaccaagaacatcaaccacagaagattcgccgccagcttcagactgcaggaggtgaccaagaccgaccaggacctgtacagatgcgtgacccagagcgagagaggcagcggcgtgagcaacttcgcccagctgatcgtgagagagccccccagacccatcgcccccccccagctgctgggcgtgggccccacctacctgctgatccagctgaacgccaacagcatcatcggcgacggccccatcatcctgaaggaggtggagtacagaatgaccagcggcagctggaccgagacccacgccgtgaacgcccccacctacaagctgtggcacctggaccccgacaccgagtacgagatcagagtgctgctgaccagacccggcgagggcggcaccggcctgcccggcccccccctgatcaccagaaccaagtgcgccgagcccatgagaacccccaagaccctgaagatcgccgagatccaggccagaagaatcgccgtggactgggagagcctgggctacaacatcaccagatgccacaccttcaacgtgaccatctgctaccactacttcagaggccacaacgagagcaaggccgactgcctggacatggaccccaaggccccccagcacgtggtgaaccacctgcccccctacaccaacgtgagcctgaagatgatcctgaccaaccccgagggcagaaaggagagcgaggagaccatcatccagaccgacgaggacgtgcccggccccgtgcccgtgaagagcctgcagggcaccagcttcgagaacaagatcttcctgaactggaaggagcccctggaccccaacggcatcatcacccagtacgagatcagctacagcagcatcagaagcttcgaccccgccgtgcccgtggccggccccccccagaccgtgagcaacctgtggaacagcacccaccacgtgttcatgcacctgcaccccggcaccacctaccagttcttcatcagagccagcaccgtgaagggcttcggccccgccaccgccatcaacgtgaccaccaacatcagcgcccccaccctgcccgactacgagggcgtggacgccagcctgaacgagaccgccaccaccatcaccgtgctgctgagacccgcccaggccaagggcgcccccatcagcgcctaccagatcgtggtggaggagctgcacccccacagaaccaagagagaggccggcgccatggagtgctaccaggtgcccgtgacctaccagaacgccatgagcggcggcgccccctactacttcgccgccgagctgccccccggcaacctgcccgagcccgcccccttcaccgtgggcgacaacagaacctaccagggcttctggaacccccccctggcccccagaaagggctacaacatctacttccaggccatgagcagcgtggagaaggagaccaagacccagtgcgtgagaatcgccaccaaggccgccgccaccgaggagcccgaggtgatccccgaccccgccaagcagaccgacagagtggtgaagatcgccggcatcagcgccggcatcctggtgttcatcctgctgctgctggtggtgatcctgatcgtgaagaagagatacatctgctggagaagacacatctgcatcagaaacatcagaagaagctactacagctacagctactacctgaagctggccaagaagagaaaggacgccatgggcaacaccagacaggagatgacccacatggtgaacgccatggacagaagctacgccgaccagagcaccctgcacgccgaggaccccctgagcatcaccttcatggaccagcacaacttcagccccagactgcccaacgaccccctggtgcccaccgccgtgctggtgcccagccccggcagaaagaacgtgtaccacggcgacaacaacagcttcttcgccatcagctacctgtag

SEQ ID NO: 110909 - protein, 1439 aa, Artificial Sequence
  derived and/or modified sequence
MDTTAAAALPAFVALLLLSPWPLLGSAQGQFSAGGCTFDDGPGACDYHQDLYDDFEWVHVSAQEPHYLPPEMPQGSYMIVDSSDHDPGEKARLQLPTMKENDTHCIDFSYLLYSQKGLNPGTLNILVRVNKGPLANPIWNVTGFTGRDWLRAELAVSTFWPNEYQVIFEAEVSGGRSGYIAIDDIQVLSYPCDKSPHFLRLGDVEVNAGQNATFQCIATGRDAVHNKLWLQRRNGEDIPVAQTKNINHRRFAASFRLQEVTKTDQDLYRCVTQSERGSGVSNFAQLIVREPPRPIAPPQLLGVGPTYLLIQLNANSIIGDGPIILKEVEYRMTSGSWTETHAVNAPTYKLWHLDPDTEYEIRVLLTRPGEGGTGLPGPPLITRTKCAEPMRTPKTLKIAEIQARRIAVDWESLGYNITRCHTFNVTICYHYFRGHNESKADCLDMDPKAPQHVVNHLPPYTNVSLKMILTNPEGRKESEETIIQTDEDVPGPVPVKSLQGTSFENKIFLNWKEPLDPNGIITQYEISYSSIRSFDPAVPVAGPPQTVSNLWNSTHHVFMHLHPGTTYQFFIRASTVKGFGPATAINVTTNISAPTLPDYEGVDASLNETATTITVLLRPAQAKGAPISAYQIVVEELHPHRTKREAGAMECYQVPVTYQNAMSGGAPYYFAAELPPGNLPEPAPFTVGDNRTYQGFWNPPLAPRKGYNIYFQAMSSVEKETKTQCVRIATKAATEEPEVIPDPAKQTDRVVKIAGISAGILVFILLLLVVILIVKKSKLAKKRKDAMGNTRQEMTHMVNAMDRSYADQSTLHAEDPLSITFMDQHNFSPRYENHSATAESSRLLDVPRYLCEGTESPYQTGQLHPAIRVADLLQHINLMKTSDSYGFKEEYESFFEGQSASWDVAKKDQNRAKNRYGNIIAYDHSRVILQPVEDDPSSDYINANYIDGYQRPSHYIATQGPVHETVYDFWRMIWQEQSACIVMVTNLVEVGRVKCYKYWPDDTEVYGDFKVTCVEMEPLAEYVVRTFTLERRGYNEIREVKQFHFTGWPDHGVPYHATGLLSFIRRVKLSNPPSAGPIVVHCSAGAGRTGCYIVIDIMLDMAEREGVVDIYNCVKALRSRRINMVQTEEQYIFIHDAILEACLCGETAIPVCEFKAAYFDMIRIDSQTNSSHLKDEFQTLNSVTPRLQAEDCSIACLPRNHDKNRFMDMLPPDRCLPFLITIDGESSNYINAALMDSYRQPAAFIVTQYPLPNTVKDFWRLVYDYGCTSIVMLNEVDLSQGCPQYWPEEGMLRYGPIQVECMSCSMDCDVINRIFRICNLTRPQEGYLMVQQFQYLGWASHREVPGSKRSFLKLILQVEKWQEECEEGEGRTIIHCLNGGGRSGMFCAIGIVVEMVKRQNVVDVFHAVKTLRNSKPNMVEAPEQYRFCYDVALEYLESS

SEQ ID NO: 110910 - DNA, 4320 bp, Artificial Sequence
  derived and/or modified sequence
atggataccactgccgctgccgccctcccagcctttgtcgcactgctgctactgagcccttggcctctgctcggctccgcccagggtcaatttagcgccggcggctgcacctttgatgatggccctggcgcctgtgattaccaccaggacctgtatgacgatttcgaatgggtgcacgtttctgcccaggaacctcactatcttcccccggagatgccgcaagggagctacatgatcgtggattcttctgaccatgatcccggagaaaaagcccgccttcagttacccactatgaaggagaacgatacccattgcatcgattttagttatctgctgtactctcagaaaggcctcaaccccggtaccctcaacatcctggtgcgcgtcaacaagggacctctggcaaatcctatttggaacgtaacaggttttaccggccgggattggctgagggccgagttagcagtttctactttttggcctaacgaataccaagtgatctttgaggccgaggtttcaggcggcaggtccggctacatcgcaatcgacgatattcaagtgctgagttacccctgcgataagtccccacactttctcagacttggagatgtggaagtaaatgccgggcaaaacgccacattccaatgtatcgcaaccgggagagatgccgttcacaataaactgtggctgcagcggaggaacggggaagacatccctgtcgcccagacgaaaaacatcaatcataggagattcgccgccagcttccgcctacaggaggtaactaagactgatcaggatttgtacagatgcgtaacccagtccgaacgaggatccggggtgagcaatttcgctcagctcattgtgcgcgaacccccgcggcccatcgccccaccacagctcctgggcgttggcccaacatatctcctcattcagctcaacgccaattccattattggcgacggccctatcattcttaaggaggtggagtatcggatgacttcaggttcgtggaccgaaacccatgccgtgaacgccccaacctataaactgtggcacttagacccagatacagagtatgagatcagggtgttattaacgagacccggtgagggcgggacaggcttaccaggaccacccctgatcaccagaaccaagtgtgctgaacccatgcgcacaccaaagacactcaaaattgccgagatacaggcgcgccggatcgccgttgactgggagtccctcggctacaacattactcgatgtcacacatttaatgtgacaatatgctaccactacttccgggggcacaacgaatctaaggccgactgtctggatatggatcctaaagctcctcagcatgtggtgaaccatctcccaccgtacaccaatgtctcactgaagatgattctaacaaacccagaagggcggaaagagagtgaagagaccattattcagacagacgaggatgtccccggccccgtgcctgtcaaaagcttacaggggaccagttttgaaaacaagatcttcttgaactggaaagagcctctcgatcccaatgggatcatcacccaatacgagattagttactcaagtatccggtcttttgacccagcggtgcccgtggccgggccgccccagactgtaagcaacctttggaattctactcaccacgtttttatgcatctgcaccctggcaccacatatcagttcttcattagagcatccactgtgaagggattcggtcccgccaccgccataaatgtgactacaaatataagcgctcccacattacccgactatgagggggtggatgccagcctgaacgagactgccaccacgattacggtactgctgaggccagctcaggccaagggagcccctatctcggcttatcagatagtcgtcgaggaactacatcctcatcgcactaagagggaggcaggagctatggaatgttaccaagtccccgtgacctatcagaacgcaatgtctggaggggctccatattactttgccgctgagttaccccccggcaacctgcccgaaccagcccccttcacagtcggcgataataggacataccaagggttttggaatccccctcttgctccaaggaagggatacaatatatatttccaggcaatgagctcagtagaaaaggaaacaaaaacccagtgtgtgagaattgcaaccaaagctgctaccgaagaacctgaggtcatcccagacccagccaagcagacagacagagttgtcaagatcgccggcattagtgcaggcattctggtgtttatactgctactgctagtggttatccttatcgtaaaaaaaagtaagctggccaaaaaaagaaaagacgcgatgggcaatacacggcaggagatgacacatatggtaaacgccatggaccgctcctatgctgaccaatccactctgcacgccgaagatcccctgagcattacctttatggatcagcacaacttcagtcctcgctatgagaatcactccgcgacagctgaatcatctcggttgctggacgtaccccggtacttatgcgagggcaccgagtccccctatcagaccggccagttgcatcccgccataagagtggctgacctgctccagcacatcaatctgatgaaaacctccgattcatatgggttcaaagaggagtatgaatccttctttgaggggcagtcggcatcatgggatgtggcaaaaaaagaccagaatagagcgaaaaatcggtatggcaatatcattgcttacgatcactctcgagtgattctccaaccggtggaagatgacccatctagcgactatataaatgctaactacatagacggatatcagagacctagccattatatcgccacccagggaccagttcacgaaactgtttatgacttctggcgcatgatttggcaggaacaatctgcctgcattgtcatggtgactaatctggttgaagtcggaagggtgaagtgttacaaatactggcccgatgataccgaggtgtatggcgactttaaggtgacgtgcgtcgaaatggagcccctggccgagtatgtcgtcaggacctttacgctggagagaaggggatacaatgagattcgggaagtaaagcagtttcacttcaccgggtggcctgatcacggggtaccatatcacgctactggcctgctgtcattcattaggagagtgaagctcagcaacccgccgagtgctggccccattgtggtgcactgctccgcaggcgcaggccggaccgggtgctacatagtcatcgacattatgttggacatggccgaacgggagggcgtcgtggacatctataactgtgttaaagctctccggtctcggagaattaatatggtgcagacagaggagcagtatatcttcattcacgacgcgattttggaggcgtgtctttgtggcgaaaccgcaatccctgtgtgtgagttcaaggccgcttatttcgacatgattcgtattgactctcagacaaacagttctcacttaaaggacgaatttcagacgctcaattcagtgacaccgcgtctccaggctgaagattgtagcattgcctgcctccctagaaatcatgacaagaatcgctttatggatatgcttcccccagatcgttgtcttccgttcctcattactatcgacggcgagagttcaaactacatcaatgctgcacttatggattcttatcggcagcctgcagcattcattgttactcagtaccctctgcccaatacggttaaagatttctggaggctggtgtacgactacggttgcacctcaattgtgatgctgaacgaagtggacctttcccaaggttgtccgcagtattggcccgaggagggtatgcttaggtatgggcctattcaggtagagtgcatgtcatgctccatggactgcgatgtgattaaccgaatcttccgaatttgtaatctcacgcgccctcaggaaggctaccttatggtccaacagttccagtacctgggctgggcatcgcacagggaagtccccgggagcaagcgctcatttctcaagttgattctacaggtggagaagtggcaggaggaatgtgaggagggcgaagggcgcacaataatccactgcttgaacggaggggggcgcagcggaatgttttgtgccatcgggattgtggtggaaatggtgaaaaggcagaacgtggtcgacgtttttcacgccgtaaaaacactccggaatagcaaacccaacatggtcgaagctccagagcagtacagattttgttatgatgttgccctggagtacttggagtcatcatag

SEQ ID NO: 110911 - DNA, 4320 bp, Artificial Sequence
  derived and/or modified sequence
atggacaccacagctgctgctgccctgcctgcctttgtggccctgctgctgctgagcccctggcccctgctgggcagcgcccagggccagttctctgctgggggctgcacctttgatgatggccctggggcctgtgactaccaccaggacctgtatgatgactttgagtgggtgcacgtgtctgcccaggagccccactacctgcccccagagatgccccagggcagctacatgattgtggacagcagtgaccatgaccctggagagaaggcccggctgcagctgcccaccatgaaggaaaatgacacccactgcatcgacttctcctacctgctgtacagccagaagggcctgaaccctggcaccctgaacatcctggtgcgggtgaacaagggccccctggccaaccccatctggaatgtgacaggcttcaccggccgggactggctgcgggcagagctggccgtgtccaccttctggcccaatgagtaccaggtgatctttgaggccgaggtgtctgggggccgcagcggctacatcgccattgatgacatccaggtgctgagctacccctgtgacaagagcccccacttcctgcggctgggagatgtggaggtgaatgccggccagaatgccaccttccagtgcatcgccaccggcagagatgctgtgcacaacaagctgtggctgcagaggagaaatggagaggacatccctgtggcccagaccaagaacatcaaccacagaagatttgctgccagcttccggctgcaggaggtgaccaagacagaccaggacctgtaccgctgtgtgacccagagcgagcggggcagcggcgtgagcaactttgcccagctgattgtgcgggagcccccccggcccatcgccccaccccagctgctgggcgtgggccccacctacctgctgatccagctgaatgccaacagcatcattggagatggccccatcatcctgaaggaggtggagtacaggatgaccagcggctcctggacagagacccatgctgtgaatgcccccacctacaagctgtggcacctggaccctgacacagaatatgagatccgggtgctgctgaccaggcctggagagggcggcaccggcctgcccggccccccactcatcaccaggaccaagtgtgccgagcccatgaggacccccaagaccctgaagattgctgagatccaggccaggagaattgctgtggactgggagagcctgggctacaacatcacccgctgccacaccttcaacgtgaccatctgctaccactacttccggggccacaatgaaagcaaggctgactgcctggacatggaccccaaggccccccagcacgtggtgaaccacctgcccccctacaccaacgtgtccctgaagatgatcctgaccaaccctgagggcaggaaggagagcgaggagaccatcatccagacagatgaagatgtgcccggccctgtgcctgtgaagagcctgcagggcaccagctttgagaacaagatcttcctgaactggaaggagcccctggaccccaacggcatcatcacccagtatgagatctcctacagcagcatccgcagctttgatcctgctgtgcctgtggccggccccccccagacagtgagcaacctgtggaacagcacccaccacgtgttcatgcacctgcaccctggcaccacctaccagttcttcatccgggccagcacagtgaagggctttggacctgccacagccatcaacgtgaccaccaacatcagcgcccccaccctgcctgactatgaaggagtggatgccagcctgaatgaaacagccaccaccatcaccgtgctgctgcggcctgcccaggccaagggggcccccatcagcgcctaccagatcgtggtggaggagctgcacccccacaggaccaagcgggaggccggggccatggagtgctaccaggtgcctgtgacctaccagaatgccatgtctggaggagccccctactactttgctgctgagctgcccccaggcaacctgcctgagcccgcccccttcaccgtgggggacaacagaacctaccagggcttctggaacccccccctggcccccaggaagggctacaacatctacttccaggccatgagctctgtggagaaggagaccaagacccagtgtgtgcgcatcgccaccaaggccgccacagaggagcctgaggtgatcccagaccctgccaagcagacagacagagtggtgaagattgctggcatctctgctggcatcctggtgttcatcctgctgctgctggtggtgatcctgattgtgaagaagagcaagctggccaagaagaggaaggatgccatgggcaacacccggcaggagatgacccacatggtgaatgccatggacaggagctatgctgaccagagcaccctgcatgctgaggaccccctgagcatcaccttcatggaccagcacaacttcagccccaggtatgagaaccacagcgccacagctgagagcagccggctgctggatgtgccccgctacctgtgtgagggcacagagagcccctaccagacaggccagctgcacccagccatccgggtggccgacctgctgcagcacatcaacctgatgaagaccagtgacagctatggcttcaaggaggagtatgagagcttctttgagggccagagcgcctcctgggatgtggccaagaaggaccagaacagagccaagaacagatatggcaacatcatcgcctatgaccacagcagggtcatcctgcagcctgtggaggatgaccccagcagtgactacatcaatgccaactacattgatggctaccagaggcccagccactacatcgccacccagggccctgtgcatgaaacagtgtatgacttctggaggatgatctggcaggagcagagcgcctgcatcgtgatggtgaccaacctggtggaggtgggccgggtgaagtgctacaagtactggccagatgacacagaggtgtatggagacttcaaggtgacctgtgtggagatggagcccctggccgagtatgtggtgaggaccttcaccctggagcggcggggctacaatgagatccgggaggtgaagcagttccacttcaccggctggccagaccatggagtgccctaccacgccaccggcctgctgtccttcatcagaagagtgaagctgagcaacccccccagcgctggccccatcgtggtgcactgcagcgctggggccggccgcacaggctgctacatcgtgattgacatcatgctggacatggccgagcgggagggcgtggtggacatctacaactgtgtgaaggccctgcggagccgccgcatcaacatggtgcagacagaggagcagtacatcttcatccatgatgccatcctggaggcctgcctgtgtggggagacagccatccctgtgtgtgagttcaaggccgcctactttgacatgatcagaattgacagccagaccaacagcagccacctgaaggatgagttccagaccctgaacagcgtgaccccccggctgcaggccgaggactgcagcatcgcctgcctgcccagaaatcatgacaagaaccgcttcatggacatgctgcccccagaccgctgcctgcccttcctgatcaccattgatggagagagcagcaactacatcaatgctgccctgatggacagctaccggcagcctgctgccttcatcgtgacccagtaccccctgcccaacacagtgaaggacttctggaggctggtgtatgactatggctgcaccagcatcgtgatgctgaatgaggtggacctgagccagggctgcccccagtactggccagaggagggcatgctgcgctatggccccatccaggtggagtgcatgagctgcagcatggactgtgatgtgatcaaccgcatcttccgcatctgcaacctgacccggccccaggagggctacctgatggtgcagcagttccagtacctgggctgggccagccaccgggaggtgcccggcagcaagaggagcttcctgaagctgatcctgcaggtggagaagtggcaggaggagtgtgaggagggggagggccgcaccatcatccactgcctgaatggaggcggccgcagcggcatgttctgtgccatcggcatcgtggtggagatggtgaagaggcagaatgtggtggatgtgttccacgctgtgaagaccctgaggaacagcaagcccaacatggtggaggcccctgagcagtaccgcttctgctatgatgtggccctggagtacctggagagcagctag

SEQ ID NO: 110912 - DNA, 4320 bp, Artificial Sequence
  derived and/or modified sequence
atggacaccaccgccgccgccgccctgcccgccttcgtggccctgctgcttttatccccatggcccctgctgggaagtgcgcaggggcaattttctgctggaggctgcacctttgatgatggcccgggagcctgcgattatcatcaagacctgtacgacgattttgagtgggtgcacgtcagtgcgcaggagcctcattatctgcctccagaaatgccgcaggggtcctatatgatcgtggacagctcagatcatgaccccggcgaaaaggcgcgtttacagctgcccaccatgaaggagaatgatacccactgtattgatttctcctacctgctgtatagtcagaagggtctgaaccctggtacgttgaacattttggttcgagtgaacaaaggccctctagcaaatcctatttggaatgtcaccggattcacagggagggactggcttcgtgctgagctcgccgtaagtacattctggccaaacgagtatcaggttatctttgaggccgaagtctccggtggacgctcagggtacatcgcgatcgatgatatacaagttttgtcatacccttgcgacaaatccccacattttctgcggctgggcgacgttgaggtcaatgccgggcaaaacgctacattccagtgtatcgcaaccggcagagacgcagtgcataataaactttggctccagcggcgtaacggagaggatatacccgtcgctcagaccaagaatatcaatcacaggcggttcgctgcctcgtttagattgcaggaggtaaccaaaaccgatcaggacctctaccgatgcgtaacccaatccgaacgggggagcggagtgtctaacttcgcacagttgatcgtcagagagcctcctaggcctattgcccccccccaactcctgggagtgggtccaacctatctgttgattcaactgaatgcgaattccatcattggcgatggccctatcattctgaaagaagtcgaatatcgtatgacaagcggctcctggacagaaacccatgctgtcaatgcccctacctataaactgtggcatttggatcccgacaccgaatatgagattagagtgctgttaactcgacctggcgaaggtggcaccggactgcccggcccgcctttgatcacccggaccaagtgcgccgaacccatgcgcactcctaagaccctgaagattgctgagattcaggcacgcagaatcgcggtggactgggaatccctggggtacaacattacccgctgtcatactttcaatgtcacgatctgttaccactattttaggggacacaacgagtctaaggcagactgtttagacatggacccgaaggcaccacaacatgtagtgaaccacctgcctccctacaccaacgtgtctcttaagatgattctcacaaaccctgaggggagaaaggaatccgaggagacaatcatacagaccgacgaggatgttccaggtccagttcccgtgaagtccctccaaggtaccagtttcgagaacaaaattttcctgaactggaaggaaccactggatcccaatggcataatcactcagtatgagatctcatacagctctattcgctcatttgaccctgccgtccccgtcgccggtccccctcagacggtttccaacctttggaacagtactcatcatgttttcatgcaccttcaccccggcacaacataccagtttttcatcagagctagtaccgtcaaaggcttcgggcctgcgacagcaattaacgtgacaaccaatatttctgcaccaaccctcccggattacgaaggcgtggacgccagtttgaatgaaaccgcgaccacaatcaccgtgctcctgagaccagctcaggccaagggggccccgatctcagcttaccagatcgtggtagaggaactgcacccgcacaggacgaagcgagaggctggtgctatggagtgctaccaggtccctgtgacctaccaaaacgcaatgtctggtggagccccctattacttcgcagctgagttgcctcccgggaatcttccagagccggccccgtttaccgtgggggacaatagaacttaccagggattctggaatccaccacttgccccccgcaagggctacaatatctattttcaggccatgagctccgtcgaaaaggagactaaaactcagtgcgttaggattgcgacaaaggcagccacagaggaacccgaggtgattccggatcctgccaagcaaaccgatcgcgtggtgaaaatagcgggcatcagcgctggaatcctggtattcattctcctgctgctcgtggtgattttaattgttaagaaaagcaaactggccaagaagcggaaggatgcgatgggcaacacacgtcaagagatgacacacatggtgaacgctatggaccggtcttacgcagaccaatctaccttgcatgcagaagatcctctgtctattacttttatggaccagcataacttctcccctagatacgagaatcacagtgctaccgcagagtcgagccgcctgttggacgtgccacgctacctgtgtgagggcacggaaagcccctaccagacgggtcaactgcaccccgccatccgtgttgccgacttgctccagcacattaaccttatgaagaccagcgatagttatggctttaaggaagagtatgagtcatttttcgaaggccagagcgcatcctgggacgttgcaaagaaggaccagaatcgggccaaaaacaggtatggcaacattatagcctacgaccactctcgagtgatccttcagcccgttgaggacgaccccagtagtgactatattaatgctaattatatagacggctaccagcgccccagtcattatatcgccacccaaggtccagttcatgaaacagtttacgatttctggcggatgatctggcaagaacaaagtgcttgcatcgtgatggtaacaaatctcgtcgaggtgggcagagtgaagtgttacaagtattggcccgacgataccgaggtctacggtgacttcaaagttacctgcgtggagatggaaccattggccgaatacgtggtgcgtaccttcacgctggaacgtaggggctataacgaaatccgggaagttaagcagttccactttacaggctggcccgatcacggtgtgccttatcacgccactggtctgctgtcctttatccggcgcgtgaagttgtctaatccaccaagtgcgggaccaatcgtcgtccattgcagcgccggtgccggaagaaccgggtgctacatagtgatcgacatcatgcttgatatggctgagagagaaggtgtggtggatatatataactgcgtgaaagcactgcgatccaggcggattaacatggttcagaccgaagagcagtacattttcatccacgatgctatcctcgaagcctgtctctgtggagagacagcaataccagtgtgcgaatttaaggcagcctattttgatatgattagaatcgattcccagacaaacagcagtcatctcaaggacgagtttcagacgctcaattccgtcacccctcgtctccaagccgaggattgcagcattgcatgcctgcctcggaaccatgataagaatagatttatggacatgctgccgccagatcgctgtctgccctttttgatcaccatcgacggtgaaagttctaactatattaacgctgccctgatggatagttaccgccaaccggcagcattcattgtgacacagtaccctctgcccaacaccgttaaggacttttggcgattggtttacgattacgggtgtaccagcatcgtcatgttgaacgaggttgacttgagccagggctgtcctcagtactggcctgaagagggcatgttacggtatgggcccatccaggtggagtgtatgtcttgctctatggattgcgacgttataaatagaatctttagaatttgcaacttaacacgaccccaagaggggtacctaatggtgcagcagttccagtatctggggtgggcatcccaccgggaagtgcctgggtctaagcgctcctttctgaagttgatactgcaggtggagaagtggcaggaggagtgcgaggaaggcgaaggcaggactattatccactgtttaaatggagggggacggtcgggaatgttttgcgcaatcgggattgttgtggagatggtaaaacgccaaaacgttgtggacgtgtttcacgcagttaaaacccttcgaaactccaaacccaacatggtcgaagccccagagcagtataggttttgttatgacgtggctcttgagtatcttgagagcagttag

SEQ ID NO: 110913 - DNA, 4320 bp, Artificial Sequence
  derived and/or modified sequence
atggatacgacagcggctgctgcgctgcccgcttttgtagctttgctcctcctctcaccctggcccctactgggtagcgcccagggccaattttccgccggaggttgcaccttcgacgatgggcctggagcctgcgattaccatcaagacctgtacgatgacttcgagtgggtccacgtcagtgcccaggagccacactatcttccaccagagatgccccagggaagctacatgatagtggatagtagcgatcacgatcccggagagaaggccagacttcagttgccgaccatgaaggagaacgatactcattgtattgattttagctacctgctgtactcacagaaaggcctgaacccaggcacactcaacatactggtcagagtgaataagggccctctggcaaacccaatctggaatgtcacagggtttaccggacgcgattggttgcgggctgagctggctgtaagcactttttggcctaatgagtatcaggtgatttttgaggccgaggtctctggaggcaggtcaggatatatcgccattgatgacatccaggttctgtcttatccttgtgacaagtcaccccacttcctgcgtttgggcgatgttgaagtaaatgccggtcagaatgccacatttcagtgcatcgccactggccgtgatgcagtacacaataagctgtggctacagagacgtaatggggaggacatcccggtcgcccagaccaaaaatatcaatcacagacgctttgctgcaagctttcgactccaagaggtcactaagactgaccaggacttgtaccgctgtgttacgcagagtgagcgaggcagcggcgtgtccaatttcgctcagctgatagttcgcgagccacccaggcctatcgcaccccctcagctactcggcgtaggcccaacctacctcctgatccagctgaacgcaaactccatcataggggatgggcctataatcttgaaggaggtcgagtatagaatgacatcggggagctggacagaaactcacgccgtgaacgctccgacatataagttgtggcatctcgatccagataccgaatatgagatcagagtgttgctgaccaggcctggggaaggaggcactgggttgcccggacctccattgataacccgtacaaagtgcgctgagcccatgcggaccccgaagacacttaaaatcgcggagatacaggccaggagaattgccgtcgactgggaaagcttgggatataacataactcgctgtcatacgttcaacgtcacaatctgctaccattacttccggggtcataatgaaagcaaggccgattgcctggacatggatcctaaggcccctcagcacgtggtgaatcatctgcctccatacaccaacgtgagcctaaaaatgattctgactaatccagaaggcagaaaggaaagcgaggaaaccatcattcagacagatgaggacgtgccaggacctgtcccagtgaaaagtctgcaaggaacctctttcgaaaataagattttcttgaactggaaagaaccacttgaccctaatggtataatcactcagtatgagatatcctattcatctattaggtcattcgacccagccgtacccgtggccggaccgcctcagacagttagcaatttatggaactctacacaccatgtcttcatgcaccttcatcccggaacaacttaccaattctttattcgggcaagcactgtgaagggctttgggccagccacagctattaatgttaccactaatatttcagcccctacgctgcctgattacgagggcgttgacgctagcctgaatgagacagccactaccatcacagtcctactgcgaccagctcaggccaaaggcgcacccatcagcgcttatcagattgttgtggaagaactgcaccctcataggaccaaaagagaggccggagccatggaatgttaccaggttccggtaacatatcaaaatgcaatgtctggcggagccccatactattttgcagctgaacttcctccaggcaatctgcctgagccagcgccattcacagtcggagacaacagaacgtaccaggggttttggaatcccccattagcgccaaggaaaggttataatatctacttccaagcgatgagctcagtggagaaggaaacaaagactcagtgcgtgagaatcgcaaccaaagctgccacagaagagcctgaggtgatcccggatcctgcgaagcagacagacagagtagttaagattgcaggcatctcggcgggaatcctcgtgtttatcctccttctgctagttgtaattctgatagttaagaagagcaagctggctaagaaacggaaagatgcgatgggaaatacgagacaggagatgacccatatggtaaacgcaatggaccgctcttatgccgaccagtccactctgcacgccgaagatcccctgagtatcaccttcatggaccagcataatttctctccacggtacgagaaccactccgccacagcggaatcctcccgcctgctggatgttccgcgatacctctgcgaaggcacggaaagtccttaccagacaggacaactccatcccgctatcagagtcgcggatttgttacagcatattaatctcatgaagacatcagacagctatggattcaaggaagagtatgagtcattctttgagggccagagtgccagctgggacgtagctaagaaagatcaaaatcgagccaagaaccgttacggtaatattattgcctatgaccatagtcgcgtcatcttgcagcccgtggaggacgatccctcgtctgactatatcaatgccaattacatagatggatatcagcgtccaagtcactatatcgccacacaagggcctgtgcacgaaacagtatacgacttctggaggatgatctggcaagagcagtccgcttgcatcgtgatggttacaaacctggttgaagtcggcagggttaagtgttataagtactggcctgatgatactgaagtttacggagactttaaggtgacctgcgtggagatggaaccattggctgagtacgtcgtccgaacgtttaccttagaacggagaggatataatgaaataagagaggtgaagcagttccactttacggggtggccagaccacggggtaccatatcacgccacgggccttctttcgtttatcagacgggtgaagctctcgaatcctccgtctgcgggacctatcgtagtccactgcagcgccggagccggaagaacagggtgttacattgtcatcgacattatgctggacatggccgaaagggaaggagtggtagacatctacaactgtgtgaaagctttgcggtctcggaggatcaatatggtgcaaacggaggagcagtacatttttatccatgacgctattctcgaggcctgtctctgcggggagaccgcaattcctgtctgtgaatttaaggctgcctacttcgatatgattcgtatcgacagtcagaccaacagttcgcacctaaaggacgagtttcagaccctgaatagcgttacccccagactgcaggccgaggactgctctatcgcgtgcctgccacggaatcatgacaagaatagatttatggatatgctgcccccagacagatgtctgccctttcttatcactatcgacggggagtcttcaaactacatcaatgctgccttaatggacagttataggcagcctgctgcctttattgtcacccaatatcccttaccgaacacagtgaaggacttctggcgcctggtctacgactatggttgcaccagtattgtgatgctcaatgaggttgacttgtcacaggggtgcccacaatactggcctgaagaaggtatgcttaggtatgggccaatccaggttgaatgcatgagctgcagcatggattgtgacgtgattaacaggatctttcggatctgtaacctgactcgcccacaggaaggatatctgatggttcaacagttccagtacttaggttgggcgtctcatagggaggtgccgggttcaaagagaagctttttgaagttaattctgcaggtggaaaagtggcaggaagaatgcgaagagggcgagggcaggactattattcactgtctaaatggcggaggacggtcgggtatgttttgcgctatcggcatcgtggtggagatggttaagcgccagaacgtcgttgacgtcttccacgcagtgaagacattgcggaattccaagccaaacatggtcgaggctcccgagcaataccgattttgttacgatgtggcgctcgagtatctcgagtcctcatag

SEQ ID NO: 110914 - DNA, 4651 bp, Artificial Sequence
  derived and/or modified sequence
atggatacgactgcggcggcggcgctgcctgcttttgtggcgctcttgctcctctctccttggcctctcctgggatcggcccaaggccagttctccgcaggtggctgtacttttgatgatggtccaggggcctgtgattaccaccaggatctgtatgatgactttgaatgggtgcatgttagtgctcaagagcctcattatctaccacccgagatgccccaaggttcctatatgatagtggactcttcagatcacgaccctggagaaaaagccagacttcagctgcctacaatgaaggagaacgacactcactgcattgatttcagttacctattatatagccagaaaggactgaatcctggcactttgaacatattagttagggtgaataaaggacctcttgccaatccaatttggaatgtgactggattcacgggtagagattggcttcgggctgagctagcagtgagcaccttttggcccaatgaatatcaggtaatatttgaagctgaagtctcaggagggagaagtggttatattgccattgatgacatccaagtactgagttatccttgtgataaatctcctcatttcctccgtctaggggatgtagaggtgaatgcagggcaaaacgctacatttcagtgcattgccacagggagagatgctgtgcataacaagttatggctccagagacgaaatggagaagatataccagtagcccagactaagaacatcaatcatagaaggtttgccgcttccttcagattgcaagaagtgacaaaaactgaccaggatttgtatcgctgtgtaactcagtcagaacgaggttccggtgtgtccaattttgctcaacttattgtgagagaaccgccaagacccattgctcctcctcagcttcttggtgttgggcctacatatttgctgatccaactaaatgccaactcgatcattggcgatggtcctatcatcctgaaagaagtagagtaccgaatgacatcaggatcctggacagaaacccatgcagtcaatgctccaacttacaaattatggcatttagatccagataccgaatatgagatccgagttctacttacaagacctggtgaaggtggaacggggctcccaggacctccactaatcaccagaacaaaatgtgcagaacctatgagaaccccaaagacattaaagattgctgaaatacaggcaagacggattgctgtggactgggaatccttgggttacaacattacgcgttgccacacttttaatgtcactatctgctaccattacttccgtggtcacaacgagagcaaggcagactgtttggacatggaccccaaagcccctcagcatgttgtgaaccatctgccaccttatacaaatgtcagcctcaagatgatcctaaccaatccagagggaaggaaggagagtgaagagacaattattcaaactgatgaagatgtgcctggtcccgtaccagtaaaatctcttcaaggaacatcctttgaaaataagatcttcttgaactggaaagaacctttggatccaaatggaatcatcactcaatatgagatcagctatagcagtataagatcatttgatcctgcagttccagtggctggacctccccagactgtatcaaatttatggaacagtacacaccatgtctttatgcatctccaccctggaaccacgtaccagtttttcataagagccagcacggtcaaaggctttggtccagccacagccatcaatgtcaccaccaatatctcagctccaactttacctgactatgaaggagttgatgcctctctcaatgaaactgccaccacaataactgtattgttgagaccagcacaagccaaaggtgctcctatcagtgcttatcagattgttgtggaagaactgcacccacaccgaaccaagagagaagccggagccatggaatgctaccaggttcctgtcacataccaaaatgccatgagtgggggtgcaccgtattactttgctgcagaactccccccgggaaacctacctgagcctgccccgttcactgtgggtgacaatcggacctaccaaggcttttggaaccctcctttggctccgcgcaaaggatacaacatctatttccaggcgatgagcagtgtggagaaggaaactaaaacccagtgcgtacgcattgctacaaaagcagcaacagaagaaccagaagtgatcccagatcccgccaagcagacagacagagtggtgaaaatagcaggaattagtgctggaattttggtgttcatcctccttctcctagttgtcatattaattgtaaaaaagagcaaacttgctaaaaaacgcaaagatgccatggggaatacccggcaggagatgactcacatggtgaatgcaatggatcgaagttatgctgatcagagcactctgcatgcagaagatcctctttccatcaccttcatggaccaacataactttagtccaagatatgagaaccacagtgctacagcagagtccagtcgccttctagacgtacctcgctacctctgtgaggggacggaatccccttaccagacaggacagctgcatccagccatcagggtagctgatttactgcagcacattaatctcatgaagacatcagacagctatgggttcaaagaggaatatgagagcttttttgaaggacagtcagcatcttgggatgtagctaaaaaagatcaaaatagagcaaaaaaccgatatggaaacattatagcatatgatcactccagagtgattttgcaacccgtagaggatgatccttcctcagattatattaatgccaactatattgatggctaccagagaccaagtcattacattgcaacccaaggtcccgttcatgaaacagtgtatgatttctggaggatgatttggcaagaacaatctgcttgcattgtgatggttacaaatttagttgaggttggccgggttaaatgctataaatattggcctgatgatactgaagtttatggtgacttcaaagtaacgtgtgtagaaatggaaccacttgctgaatatgtagttaggacattcaccctggaaaggagggggtacaatgaaatccgtgaagttaaacagttccatttcacgggctggcctgaccatggagtgccctaccatgctacagggctgctttcctttatccggcgagtcaagttatcaaaccctcccagtgctggccccatcgttgtacattgcagtgctggtgctggacgaactggctgctacattgtgattgacatcatgctagacatggctgaaagagagggtgttgttgatatttacaattgtgtcaaagccttaagatctcggcgtattaatatggtccagacagaggaacagtacatttttattcatgatgccattttagaagcctgcttatgtggagaaactgccatacctgtctgtgaatttaaagctgcatattttgatatgattagaatagactcccagactaactcttcacatctcaaggatgaatttcagactctgaattcagtcacccctcgactacaagctgaagactgcagtatagcgtgcctgccaaggaaccatgacaagaaccgtttcatggacatgctgccacctgacagatgtctgccttttttaattacaattgatggggagagcagtaactacatcaatgctgctcttatggacagctacaggcaaccagctgctttcatcgtcacacaataccctctgccaaacactgtaaaagacttctggagattagtgtatgattatggctgtacctccattgtgatgttaaacgaagtcgacttgtcccagggctgccctcagtactggccagaggaagggatgctacgatatggccccatccaagtggaatgtatgtcttgttcaatggactgtgatgtgatcaaccggatttttaggatatgcaatctaacaagaccacaggaaggttatctgatggtgcaacagtttcagtacctaggatgggcttctcatcgagaagtgcctggatccaaaaggtcattcttgaaactgatacttcaggtggaaaagtggcaggaggaatgcgaggaaggggaaggccggacgattatccactgcctaaatggtggcgggcgaagtggcatgttctgtgctataggcatcgttgttgaaatggtgaaacggcaaaatgttgtcgatgttttccatgcagtaaagacactgaggaacagcaagccaaacatggtggaagccccggagcaataccgtttctgctatgatgtagctttggagtacctggaatcatcttagttgggtgagactctttaaagtgcatccatgaagaaacctgtccatctattgagccagcagctgttgtacctgttacacttgtgcagaaagattttaatgtggggggtgggagacttttacatttgagaggtaaaagtattttttttatgaagttgtgtatcttaataaaaaggactgaattagtttttattactatattaaagcatcaacatttcatgccacataaattatatttaataagaaccagattgaaatgagaacgtattggtgtttgtacagtgaacatgccaccttttttctcatggtttcagtagagcagctaccacatgtt

SEQ ID NO: 110915 - DNA, 4320 bp, Artificial Sequence
  derived and/or modified sequence
atggacaccaccgccgccgccgccctgcccgccttcgtggccctgctgctgctgagcccctggcccctgctgggcagcgcccagggccagttcagcgccggcggctgcaccttcgacgacggccccggcgcctgcgactaccaccaggacctgtacgacgacttcgagtgggtgcacgtgagcgcccaggagccccactacctgccccccgagatgccccagggcagctacatgatcgtggacagcagcgaccacgaccccggcgagaaggccagactgcagctgcccaccatgaaggagaacgacacccactgcatcgacttcagctacctgctgtacagccagaagggcctgaaccccggcaccctgaacatcctggtgagagtgaacaagggccccctggccaaccccatctggaacgtgaccggcttcaccggcagagactggctgagagccgagctggccgtgagcaccttctggcccaacgagtaccaggtgatcttcgaggccgaggtgagcggcggcagaagcggctacatcgccatcgacgacatccaggtgctgagctacccctgcgacaagagcccccacttcctgagactgggcgacgtggaggtgaacgccggccagaacgccaccttccagtgcatcgccaccggcagagacgccgtgcacaacaagctgtggctgcagagaagaaacggcgaggacatccccgtggcccagaccaagaacatcaaccacagaagattcgccgccagcttcagactgcaggaggtgaccaagaccgaccaggacctgtacagatgcgtgacccagagcgagagaggcagcggcgtgagcaacttcgcccagctgatcgtgagagagccccccagacccatcgcccccccccagctgctgggcgtgggccccacctacctgctgatccagctgaacgccaacagcatcatcggcgacggccccatcatcctgaaggaggtggagtacagaatgaccagcggcagctggaccgagacccacgccgtgaacgcccccacctacaagctgtggcacctggaccccgacaccgagtacgagatcagagtgctgctgaccagacccggcgagggcggcaccggcctgcccggcccccccctgatcaccagaaccaagtgcgccgagcccatgagaacccccaagaccctgaagatcgccgagatccaggccagaagaatcgccgtggactgggagagcctgggctacaacatcaccagatgccacaccttcaacgtgaccatctgctaccactacttcagaggccacaacgagagcaaggccgactgcctggacatggaccccaaggccccccagcacgtggtgaaccacctgcccccctacaccaacgtgagcctgaagatgatcctgaccaaccccgagggcagaaaggagagcgaggagaccatcatccagaccgacgaggacgtgcccggccccgtgcccgtgaagagcctgcagggcaccagcttcgagaacaagatcttcctgaactggaaggagcccctggaccccaacggcatcatcacccagtacgagatcagctacagcagcatcagaagcttcgaccccgccgtgcccgtggccggccccccccagaccgtgagcaacctgtggaacagcacccaccacgtgttcatgcacctgcaccccggcaccacctaccagttcttcatcagagccagcaccgtgaagggcttcggccccgccaccgccatcaacgtgaccaccaacatcagcgcccccaccctgcccgactacgagggcgtggacgccagcctgaacgagaccgccaccaccatcaccgtgctgctgagacccgcccaggccaagggcgcccccatcagcgcctaccagatcgtggtggaggagctgcacccccacagaaccaagagagaggccggcgccatggagtgctaccaggtgcccgtgacctaccagaacgccatgagcggcggcgccccctactacttcgccgccgagctgccccccggcaacctgcccgagcccgcccccttcaccgtgggcgacaacagaacctaccagggcttctggaacccccccctggcccccagaaagggctacaacatctacttccaggccatgagcagcgtggagaaggagaccaagacccagtgcgtgagaatcgccaccaaggccgccaccgaggagcccgaggtgatccccgaccccgccaagcagaccgacagagtggtgaagatcgccggcatcagcgccggcatcctggtgttcatcctgctgctgctggtggtgatcctgatcgtgaagaagagcaagctggccaagaagagaaaggacgccatgggcaacaccagacaggagatgacccacatggtgaacgccatggacagaagctacgccgaccagagcaccctgcacgccgaggaccccctgagcatcaccttcatggaccagcacaacttcagccccagatacgagaaccacagcgccaccgccgagagcagcagactgctggacgtgcccagatacctgtgcgagggcaccgagagcccctaccagaccggccagctgcaccccgccatcagagtggccgacctgctgcagcacatcaacctgatgaagaccagcgacagctacggcttcaaggaggagtacgagagcttcttcgagggccagagcgccagctgggacgtggccaagaaggaccagaacagagccaagaacagatacggcaacatcatcgcctacgaccacagcagagtgatcctgcagcccgtggaggacgaccccagcagcgactacatcaacgccaactacatcgacggctaccagagacccagccactacatcgccacccagggccccgtgcacgagaccgtgtacgacttctggagaatgatctggcaggagcagagcgcctgcatcgtgatggtgaccaacctggtggaggtgggcagagtgaagtgctacaagtactggcccgacgacaccgaggtgtacggcgacttcaaggtgacctgcgtggagatggagcccctggccgagtacgtggtgagaaccttcaccctggagagaagaggctacaacgagatcagagaggtgaagcagttccacttcaccggctggcccgaccacggcgtgccctaccacgccaccggcctgctgagcttcatcagaagagtgaagctgagcaacccccccagcgccggccccatcgtggtgcactgcagcgccggcgccggcagaaccggctgctacatcgtgatcgacatcatgctggacatggccgagagagagggcgtggtggacatctacaactgcgtgaaggccctgagaagcagaagaatcaacatggtgcagaccgaggagcagtacatcttcatccacgacgccatcctggaggcctgcctgtgcggcgagaccgccatccccgtgtgcgagttcaaggccgcctacttcgacatgatcagaatcgacagccagaccaacagcagccacctgaaggacgagttccagaccctgaacagcgtgacccccagactgcaggccgaggactgcagcatcgcctgcctgcccagaaaccacgacaagaacagattcatggacatgctgccccccgacagatgcctgcccttcctgatcaccatcgacggcgagagcagcaactacatcaacgccgccctgatggacagctacagacagcccgccgccttcatcgtgacccagtaccccctgcccaacaccgtgaaggacttctggagactggtgtacgactacggctgcaccagcatcgtgatgctgaacgaggtggacctgagccagggctgcccccagtactggcccgaggagggcatgctgagatacggccccatccaggtggagtgcatgagctgcagcatggactgcgacgtgatcaacagaatcttcagaatctgcaacctgaccagaccccaggagggctacctgatggtgcagcagttccagtacctgggctgggccagccacagagaggtgcccggcagcaagagaagcttcctgaagctgatcctgcaggtggagaagtggcaggaggagtgcgaggagggcgagggcagaaccatcatccactgcctgaacggcggcggcagaagcggcatgttctgcgccatcggcatcgtggtggagatggtgaagagacagaacgtggtggacgtgttccacgccgtgaagaccctgagaaacagcaagcccaacatggtggaggcccccgagcagtacagattctgctacgacgtggccctggagtacctggagagcagctag

SEQ ID NO: 110916 - protein, 681 aa, Artificial Sequence
  derived and/or modified sequence
MDMGTIKRRLENNYYWAASECMQDFNTMFTNCYIYNKPTDDIVLMAQTLEKIFLQKVASMPQEEQELVVTIPKNSHKKGAKLAALQGSVTSAHQVPAVSSVSHTALYTPPPEIPTTVLNIPHPSVISSPLLKSLHSAGPPLLAVTAAPPAQPLAKKKGVKRKADTTTPTPTAILAPGSPASPPGSLEPKAARLPPMRRESGRPIKPPRKDLPDSQQQHQSSKKGKLSEQLKHCNGILKELLSKKHAAYAWPFYKPVDASALGLHDYHDIIKHPMDLSTVKRKMENRDYRDAQEFAADVRLMFSNCYKYNPPDHDVVAMARKLQDVFEFRYAKMPDEPLEPGPLPVSTAMPPGLAKSSSESSSEESSSESSSEEEEEEDEEDEEEEESESSDSEEERAHRLAELQEQLRAVHEQLAALSQGPISKPKRKREKKEKKKKRKAEKHRGRAGADEDDKGPRAPRPPQPKKSKKASGSGGGSAALGPSGFGPSGGSGTKLPKKATKTAPPALPTGYDSEEEEESRPMSYDEKRQLSLDINKLPGEKLGRVVHIIQAREPSLRDSNPEEIEIDFETLKPSTLRELERYVLSCLRKKPRKPYTIKKPVGKTKEELALEKKRELEKRLQDVSGQLNSTKKPPKKANEKTESSSAQQVAVSRLSASSSSSDSSSSSSSSSSSDTSDSDSG

SEQ ID NO: 110917 - protein, 681 aa, Artificial Sequence [sequence omitted]

SEQ ID NO: 110918 - DNA, 987 bp, Artificial Sequence
  derived and/or modified sequence
taagctaaaagctcttcagaatcatcaagcgaggagtccagtagtgagtcatcctctgaggaggaagaggaagaggatgaagatgaagaggaggaagaatctgagtcatcagactctgaagaagaaagagctcacagactggccgagctacaggagcagcttcgagctgttcacgagcagttggctgcactcagccaaggccccatctctaagcccaagagaaagcgcgagaagaaggaaaaaaaaaagaaacgcaaagcagagaaacatcgagggcgagccggggctgatgaagacgataagggaccaagagcccctcggccgccccagcccaaaaagagcaagaaggcctccggctccggcggcggctccgccgcgcttggaccctccggcttcgggcccagcggaggatctggcacaaagctgcccaaaaaagcaacaaagactgcacccccggctctgcctacgggctacgactcggaagaagaagaagagtccaggcccatgagctatgatgagaaacggcagctgtctttggatattaataagttgcccggcgagaaactagggcgcgttgttcatatcatacaggcaagggagcctagcttgagggatagcaatccagaggagattgagatcgatttcgagactctgaaaccatcgaccttgagagagctggagaggtacgtcttgtcctgcctacggaagaaaccgaggaagccatatactatcaagaagcccgtcggcaaaacaaaagaagagctggcactagagaaaaaacgagaacttgagaagagattgcaagatgtcagtggacaactgaactcgaccaaaaagccccccaagaaagctaatgaaaaaacagagagctcatcagcacagcaggtcgcagtgtcaagattaagcgcgagcagctcttccagcgactcttctagtagcagcagctcttccagttcatctgatacctcagattccgactctggatag

SEQ ID NO: 110919 - DNA, 2046 bp, Artificial Sequence
  derived and/or modified sequence
atggatatggggaccattaagcgccgtctggagaacaattattactgggctgcctcagaatgtatgcaagatttcaacactatgtttaccaactgctacatatacaacaagccgaccgacgatatcgtcctgatggcacagactttggagaagattttcttacagaaggtggcatctatgccccaggaagagcaagagctggtcgtcactatcccgaaaaactcgcataaaaagggggctaagctggctgccctccagggctctgtgacaagtgctcatcaggttcccgccgtcagctctgtaagtcataccgccctgtatacacctccacctgagatcccaaccaccgtgctgaacattccccatccaagcgtgatctcaagtcccctcttgaaaagcctccactctgccggtcccccactgttagccgtaacagctgctccacctgcgcaacctctggccaagaaaaaaggcgttaagagaaaggctgacaccaccacccccacacccactgccatactagcgccagggtcaccagcatcaccaccagggtccctggaacctaaggctgcacgcctgccacctatgcggcgagagtccgggcgcccaattaaacccccgagaaaggatttacctgactctcagcaacagcatcagtcatcaaaaaaagggaaattgtccgagcaactgaaacactgcaatggcatcctcaaggagctcctgtctaaaaagcacgcagcctatgcctggccattttacaaacctgttgacgcctccgctctcggtctgcatgattatcacgacataatcaaacatccaatggacctgagcactgtgaaaagaaagatggaaaacagagactaccgggatgcccaagagttcgcagcagatgttcgtctcatgttcagtaattgttacaagtacaacccacccgaccacgatgtcgtggcaatggctcgtaaactccaagatgtttttgagttccggtacgcgaagatgcccgacgaaccgctggagcctggccctttgcccgtgagcacagcgatgcctcccggactggccaaatcgtcatccgagagcagctccgaagagtcctccagcgagtctagctccgaggaggaggaggaagaggatgaggaggatgaagaggaggaagagtctgaaagttccgactcggaagaagagcgtgcacaccgactcgccgagctgcaggaacaactgcgagctgtgcatgaacagctagctgcgctatcccagggccccatttcgaaacctaagcgcaagcgtgagaaaaaagaaaagaaaaagaagcgcaaggctgaaaagcatagaggacgggccggggccgacgaggacgacaagggtccgcgagccccccgtccacctcagccgaaaaaatccaaaaaggcaagcggttcaggaggcggctcggcggcattgggcccctcaggctttggtcctagtggagggtccgggaccaagctaccaaaaaaggctactaagaccgcccctcccgcgctgcccaccggctatgattccgaggaggaggaagaaagcaggcctatgtcttacgatgaaaaacgccaactctcattggatatcaacaagctgcccggcgagaaacttggaagggtggtacatatcattcaggctagagagccctccttgcgggattctaatccagaggaaattgagatcgattttgaaacactcaagccaagtacacttagagagctggagaggtatgtgttaagctgcctgcggaagaaacccaggaagccctatacaatcaaaaagccggtgggaaagacaaaagaggaacttgccttggagaaaaagcgcgaacttgaaaagcggttacaggacgtgtctgggcagttgaacagcaccaaaaaacctcctaagaaggctaacgagaaaactgaatctagctctgcgcagcaggtagcagttagccggctcagcgcgagcagttcgtccagcgacagctcctcctcttcaagttcatcctcctcctccgatacttcagacagcgatagcggctag

SEQ ID NO: 110920 - DNA, 987 bp, Artificial Sequence
  derived and/or modified sequence
taggcgaagagttcctctgaatcttcatccgaggaaagtagtagcgaaagctctagtgaagaggaagaagaggaggatgaggatgaagaggaggaagagtctgaatcgagcgactcggaggaagagagggcccaccgcctcgcagagctgcaggaacaattaagggctgtccacgagcagctcgcagctctgagtcagggacctatctcgaaacccaagaggaagagggagaaaaaagagaaaaagaaaaaaagaaaggcagaaaagcaccgaggtcgggcgggtgcggatgaagatgacaagggacctcgagccccacggccgcctcagccgaagaagagtaagaaagcttcaggctctggcggcggcagcgccgccctcggcccctctggcttcgggccttcaggagggtccggcactaaattaccaaagaaggctactaaaacagcccctccagcgcttccgacagggtacgattccgaggaggaagaggagtccaggcctatgagctacgatgagaagcgacagctgtctctcgacattaacaagctgcctggtgaaaaattaggaagggtggtgcacattatccaggccagggagccctccttgcgcgattcgaacccagaggagatagaaattgattttgagacgcttaagccttcaacactaagagaactggagcgctacgtcctgtcatgcctccggaagaagcctaggaaaccctatacaataaaaaagccagttgggaagaccaaggaggaactggccctcgagaagaagcgtgagttggaaaagcgtctgcaggatgtgagcggccagttaaactctaccaagaagccacccaaaaaggcgaatgagaaaactgaatccagctctgctcaacaggtagcagttagtcgtctgagtgcttcctcttcttctagtgacagctccagcagctcgagttcttccagtagcagcgacacctctgattctgactctggctag

SEQ ID NO: 110921 - DNA, 987 bp, Artificial Sequence
  derived and/or modified sequence
tgagcgaaatcgtcttcagagtcttctagcgaagaaagctcatcagaatcctcatctgaagaagaagaggaggaggacgaagacgaagaagaagaggagtccgaatcatcagacagtgaggaagagcgcgcacatcgcctagccgaactgcaggagcagctgagggcagtccatgagcaactggccgccctcagccaggggcccatctccaaacctaaacgcaagcgggaaaaaaaggaaaagaaaaagaagagaaaggctgagaagcaccgcgggcgggccggcgccgacgaggacgataaggggccacgggcccccagacctcctcaaccgaagaagtcaaaaaaagcctcaggttctggcggtggctctgccgccttgggacctagcggttttgggccctccggagggtctggaacgaagttacccaagaaggccacgaaaacagctcctcctgctcttcctacgggttatgactctgaggaggaggaggaatcacgtcccatgagctacgacgagaagaggcagttgtccctagacattaacaagctcccaggggaaaaactgggaagagtggtgcacatcatacaagctcgggagccatctctgagggatagtaaccctgaggagattgagatcgactttgagacactgaagccctcaacgctccgggaactcgaacggtacgtcctgtcctgtctcagaaaaaaaccccggaagccctacaccattaaaaaacccgtgggaaaaaccaaggaggaactggcgctggagaaaaaacgtgagctcgagaaaagactgcaagacgtgagcggacagctgaatagcaccaaaaagccaccaaagaaagcgaacgaaaaaactgagtccagctccgctcaacaagtggccgtttcccgcttatcggccagctcctcatcttctgacagtagttcctctagctcgagctcctcctcctctgacacctctgactctgacagcggctag

SEQ ID NO: 110922 - DNA, 987 bp, Artificial Sequence
  derived and/or modified sequence
tgagccaaatcttctagtgagagcagctctgaggagagctcttccgaatctagcagtgaagaagaagaggaagaagacgaggacgaagaggaagaagaaagtgaatcctccgactcggaagaggaaagggcacacaggctagctgaactccaggagcagttacgggctgtccacgagcagctggctgcattaagccaaggccccatctctaagcccaagagaaaaagggaaaaaaaggagaagaaaaaaaagcgtaaggcagagaagcatagaggtagggcgggtgcagatgaagacgataaaggtcctcgggccccccgcccgcctcagcccaaaaaatccaagaaggcatctgggtctggcggcgggtcagccgccttgggcccttctgggttcggaccatccggtggctctggaactaaactgccaaaaaaagctacaaaaaccgctcctccagccttgcccacaggttacgacagtgaggaagaggaggagtcacggccaatgtcctacgacgagaaaaggcagctctccctggacataaacaagctcccgggcgaaaagcttggccgcgttgtgcacataatccaagccagagaaccctcgctccgtgactctaaccctgaagagatagagatcgactttgagaccctgaaaccatctaccctgagggaattagaacgttatgtcctcagctgcctccggaagaaacccagaaaaccatacactattaaaaagcctgtcggaaaaaccaaggaggagctggcgctggagaagaagagagaactggaaaagcgtttgcaggacgtgtcaggacaactgaattcaacaaagaaaccccccaagaaggccaacgagaagaccgagagtagtagcgctcaacaggtggccgtttcaaggctttccgccagtagctcaagctctgactcttcttcaagcagcagcagcagcagttcctctgacacatcagattcagattcagggtag
